United States Patent Application Publication US 2018/0126003 A1 - sequence listing, part 169

SEQ ID NO: 296987 - DNA, 1910 bp, Artificial Sequence
  derived and/or modified sequence
aggcgtgacgttatttcattacacggcttctcggcattccacaggtttccctccgcctcctgagggcctttcctaacccacagagtggattcctggctccagaaaatgggcttggagcgggggccacgttgaggaaggcgaagggcattgtgggggcgttatgtaaaagtaggaccccaaccgacagatcctagtgctcgcgccacctgggcgcgcggagctttgctcgtttactattgaaaaagttccagcgcgggaaactgaacccggagctttgcgcacgcccgagccctcaagtaatgtgggttgtggtttttgttgttgttgtcgccacgcatgcgtcttcgtgccgtgtggctatttgattgtgtcaactcttctgattagaatggcgccattttgcggtacggaagctacacagcaacacgtataggagactctccccgagatcttctagggagtgacccatctatttttgtttgggaagaggaaactccgaaatgggatcgcggaagacttaaagggccaggctgatttttttttcctactggtctctgaggctgtggttgctacagggtcaccacgagcttggcttacttgtctcatccttcccttgcctggtatcattttctcagttctcccaaaagccatgtcccggcccttgctcatcaccttcaccccagccactgaccccagcgacctctggaaggatgggcagcagcagccacagcccgagaagccagagtccaccctggatggggctgcagcccgagctttctatgaggccctgattggggatgagagcagcgctcctgactcccagagatctcagactgaacctgccagagaaagaaagagaaagaaaagaagaataatgaaggcaccagcagcagaagcagtggcagaaggagcatcaggaagacatggacaagggagatcccttgaggctgaggataagatgactcaccggatactgagggcagcccaggagggggacctgccagaacttaggagactgctggaaccgcatgaggcaggaggagctggggggaatatcaacgcccgggatgccttctggtggaccccactgatgtgtgctgctcgagcgggccagggggcagctgtgagctatctcctgggccgtggggctgcctgggtgggggtctgtgagctgagtggcagggatgcggctcagctcgctgaagaagctggcttccctgaggtagcccgcatggtcagggagagccatggagagacaaggagcccggaaaaccggtctcctactccctccctccagtactgcgagaactgtgacacccacttccaagattccaaccaccgcacatccactgctcacctgctgtcactgtcgcagggtcctcagcctcccaaccttccacttggggtgcccatctccagcccgggcttcaaactgctgctgaggcggggctgggagccaggaatggggctgggaccccggggtgagggccgtgccaatcccatccccactgtcctcaagagggaccaggaaggactaggctacagatcagcaccccagccccgagtgacacatttcccagcttgggatacccgagctgtggctgggagggagagaccccctcgggtggccacactgagctggagggaggagagaaggagggaggagaaagacagggcttgggagcgggatctaaggacttacatgaacctcgagttctgactttggtaaagtctgaccctagtctgctgctgaagtctgaacttgggcctctgacctgggccctttgacttccccttcctgggatctgctcagatgcagatcctgaagtttttggtcaataggctctgtcttcgtgagagacgggctgagagtcagaaataaatcaaccatttgtggtttattcactttt

SEQ ID NO: 296988 - DNA, 1071 bp, Artificial Sequence
  derived and/or modified sequence
atgtctaggcccctactgatcacatttaccccagccactgacccatccgatctgtggaaagatggccagcaacagccccagcctgaaaaacctgaaagcacactcgatggcgcagccgctcgtgccttctacgaggcccttattggcgatgaaagcagtgcccctgatagtcagcgatcccagactgaaccagccagagagcggaaaagaaaaaaacgccggatcatgaaggccccagccgctgaggctgtggctgagggcgctagcggcaggcatgggcagggcaggtccttagaagcggaggacaaaatgacacaccggatactaagggccgctcaggagggagacctgccagagttgcggcgtctgttagaaccacacgaggccggcggggcggggggcaatattaacgcccgcgatgccttttggtggactcctctgatgtgcgccgcccgtgctggacagggcgccgcagtgtcgtatttgctcggaaggggagcagcatgggtcggcgtttgtgaactctctggccgcgacgcagcccagttggcggaggaagctggcttcccagaagttgcccgcatggtgagagaatcacacggggagactcgaagccccgaaaataggagccccacaccctccctgcagtactgcgagaattgcgacacacacttccaggatagcaatcaccgcacatccacagcacatcttttgtcgttaagccagggcccacagccacccaacctccctctcggcgtgcctatctcatcaccgggattcaagttgctcctgaggaggggatgggagcctggaatggggctcggaccacgcggggagggaagagccaatcccattcctactgtgctaaaacgcgatcaggaaggattggggtaccgcagcgcaccacaacctagggtgactcacttccccgcctgggacactagggctgtggcgggcagggagagacccccacgggtagccaccctgagctggcgagaagaacgacgccgggaagagaaggaccgcgcctgggaacgtgacctaagaacatatatgaacttggagttctag

SEQ ID NO: 296989 - DNA, 1071 bp, Artificial Sequence
  derived and/or modified sequence
atgtcacgacctctcctcatcaccttcacacccgcgacagatcctagcgacctctggaaggacgggcagcagcagccacagcccgagaagcctgaatccaccctcgacggcgcagctgcccgtgccttttatgaggccctgatcggcgacgagtcatccgctccggattcacaaagatcccagactgaacccgctcgcgaaaggaagagaaagaagagacgaatcatgaaagcacctgcggcagaggcggttgctgagggggcatctggtcgtcatgggcaaggcagatctcttgaagctgaggataagatgacacacagaattcttcgggccgcccaggagggggacctgccggagctacgccggctccttgagccgcacgaagctgggggagcaggtgggaacatcaatgcgagagatgccttctggtggaccccactgatgtgcgcagccagagccggccagggcgccgcagtgtcttacttgctgggacggggcgccgcttgggtcggtgtttgcgagttatcaggccgagacgctgcccaactcgctgaagaggctggatttcctgaagttgcacgcatggtccgcgagagccatggggaaactaggagccctgagaaccgctctccaacacctagccttcagtactgtgaaaattgcgatacacattttcaagactccaatcaccgaacaagtacagcccacctgctttctttgagtcagggccctcaaccacccaatctacccctgggggtccctatttcatccccaggcttcaaacttttgttgcgccgcgggtgggagccaggtatgggactggggccacgaggagaaggacgggcgaatccgatccccaccgtccttaagcgcgaccaggaaggcctcgggtatagatccgccccacagcctcgcgtcactcattttcccgcttgggacacccgagctgtcgctggcagggagagaccgcccagggtggccaccttgtcttggagagaagagcggcggcgggaggaaaaggaccgcgcctgggagagggacctcaggacttacatgaacctggagttctag

SEQ ID NO: 296990 - DNA, 1071 bp, Artificial Sequence
  derived and/or modified sequence
atgagtcgacctttgctcatcacttttactcctgccacagacccgagcgacctgtggaaagatggccagcagcagccccagccagagaagcctgaatcaacgctggatggggcggctgccagagctttttacgaggcgctgatcggcgacgagagcagcgcccctgacagccagaggtctcagaccgaaccggcgcgggagcgcaagcgtaagaagcgtagaattatgaaggctccagcggcagaagcagtcgcagagggcgcgtccggccgccacggacagggccggtcgctcgaggccgaagacaaaatgacacaccgcattctcagggcagcccaggagggggatcttccggagcttagacgcctcttggaaccccatgaagccggcggtgctggaggcaatattaacgcacgggacgccttctggtggacccccctgatgtgcgctgccagggcaggccaaggagccgcagtatcatatctccttggccgaggcgccgcgtgggtgggcgtttgtgagctgagtgggcgagatgctgcccagttagcagaggaagctggtttccctgaagtggctagaatggttcgcgagagtcacggggaaactcgctcccccgaaaacagatccccaacaccaagtctgcagtattgtgagaattgcgacacgcattttcaagattctaaccaccgtactagcacagcccacctcttatcacttagccagggccctcagcctcctaatcttccattgggggtgccgattagcagtccaggcttcaagctgttgttacgccgcggatgggagccaggaatggggctcggtccccggggagagggacgagctaatcctatacccaccgtgctgaagcgggaccaggaagggctgggctaccgatctgcaccacaacctagagtcacccacttccctgcttgggacaccagggccgtggcggggcgcgaacgacctccaagagtggcgaccctctcctggcgggaggagagaaggcgagaggagaaagacagggcgtgggagcgcgacctccgtacatacatgaatctggaattctag

SEQ ID NO: 296991 - DNA, 1071 bp, Artificial Sequence
  derived and/or modified sequence
atgtcacgtcctcttctgatcaccttcaccccggcgacggacccctccgacctttggaaagatgggcagcagcagccccaacctgagaaacccgagtcaaccctggatggcgccgccgcaagagcgttttacgaagccctgattggcgacgagtcctcagctcccgattcacagcggtcccagacggagccagcgcgggagagaaaaaggaaaaaacgtcggatcatgaaggcccccgccgcagaggcggtcgccgagggagcctccggcaggcacgggcagggaagaagtctggaagctgaagacaagatgacacaccgcatcctgcgcgctgcacaggaaggggatcttcctgagctgcgcagactgctggaaccccacgaagctgggggggctgggggcaacatcaatgccagggatgctttctggtggacaccactcatgtgtgcggcccgagctggacaaggggcagccgtgtcgtacttgctgggacgcggagctgcctgggttggagtctgcgaactgagcggaagagatgccgctcagcttgccgaggaggccggattcccagaggtcgcgagaatggtgagagagtcccatggcgagacccgctcacccgaaaatagatcgccaactccctctcttcagtattgtgagaattgcgacacccatttccaggacagcaatcacagaactagtacagcccatctgctgtctttatcccaggggccgcagcctccaaacctgcccctgggcgttccaattagttcccctggttttaagttgctcctgaggcgggggtgggaaccaggcatgggcttgggaccgcggggggagggcagggcaaacccaatacccacagttctgaagcgagatcaagaggggttgggctaccggtccgctcctcagccccgagttactcacttccctgcctgggacacccgggcggttgctggaagggaacgaccaccgcgtgtggccacactctcatggcgggaagagcgacgacgtgaggagaaggacagggcctgggaacgggacttgaggacgtatatgaatctggagttttag

SEQ ID NO: 296992 - DNA, 1071 bp, Artificial Sequence
  derived and/or modified sequence
atgtcaaggcctctgctgattactttcaccccagcaaccgacccgtccgacctgtggaaggacggccaacagcaaccacagcccgaaaagcccgagagtacactcgatggggccgctgcaagggccttctatgaggcgctcatcggagatgaaagctccgcccccgatagtcagcgttctcaaacggagcctgcacgagagagaaagaggaagaagaggaggattatgaaagcacctgctgctgaggccgtggccgagggagcaagtggaaggcatgggcagggacggagcttggaagccgaagacaagatgacacaccggatcctccgggccgcgcaagagggagatctgccagagcttaggcggctgctcgaaccccatgaggctggtggggccgggggcaacatcaacgctcgggatgcattttggtggacaccattaatgtgtgcagctcgagcaggccagggcgcagccgtatcctacttactcggtcgaggcgctgcatgggttggagtatgcgaactctctggccgggacgccgcacagctggcggaggaggcgggattcccagaggtcgctagaatggttcgggagagtcacggcgagaccaggtcacccgagaataggtcgcccactccctcactacagtactgtgaaaactgcgatacacactttcaggatagcaatcaccggacatcgaccgcacatctcctctccctgtcccagggtccacaaccgcctaatctccccttaggggtccctatctccagtcccgggtttaagttgctcctgaggcggggctgggagcccgggatgggactcggcccaagaggcgagggtagggcaaatccgatccctaccgtcttgaaacgggatcaggaggggctaggatacaggagcgctcctcagcccagagtcacacacttccccgcttgggacactcgcgccgtcgcaggtagggagaggccccctagagtggcaacattgtcctggcgggaagagaggcgccgggaggaaaaagatagggcatgggaacgagatctgagaacgtacatgaatctggaattctag

SEQ ID NO: 296993 - DNA, 1071 bp, Artificial Sequence
  derived and/or modified sequence
atgagccggcccctgctgatcaccttcaccccagccacagaccccagcgacctgtggaaggatggccagcagcagccccagcctgagaagccagagagcaccctggatggagctgctgcccgggccttctatgaggccctgattggagatgagagcagcgccccagacagccagaggagccagacagagcccgcccgggagaggaagaggaagaagaggcgcatcatgaaggccccagctgctgaggccgtggccgagggcgccagcggccgccacggccagggccgcagcctggaggccgaggacaagatgacccaccgcatcctgcgggccgcccaggagggggacctgcctgagctgcggcggctgctggagccccatgaagctggaggagctgggggcaacatcaatgccagagatgccttctggtggacccccctgatgtgtgccgcccgggccggccagggcgctgctgtgtcctacctgctgggcagaggagctgcctgggtgggcgtgtgtgagctgagcggcagagatgctgcccagctggccgaggaggccggcttccctgaggtggccaggatggtgcgggagagccacggggagaccaggagcccagaaaatagaagccccacccccagcctgcagtactgtgagaactgtgacacccacttccaggacagcaaccacaggaccagcacagcccacctgctgagcctgagccagggcccccagccccccaacctgcccctgggcgtgcccatcagcagccctggcttcaagctgctgctgcggcggggctgggagcccggcatgggcctgggccccagaggagagggccgggccaaccccatccccaccgtgctgaagagggaccaggagggcctgggctaccgcagcgccccccagccccgggtgacccacttccctgcctgggacaccagggctgtggccggccgggagaggcctccccgggtggccaccctgtcctggagggaggagcggcggcgggaggagaaggaccgggcctgggagcgggacctgcggacctacatgaacctggagttctag

SEQ ID NO: 296994 - DNA, 1071 bp, Artificial Sequence
  derived and/or modified sequence
atgagccggcccctgctgatcaccttcacccccgccaccgaccccagcgacctgtggaaggacggacaacagcagccacagcctgagaagccagaatctacgctcgacggtgctgcagcccgggctttctacgaggctctcattggggatgaatcctctgctccagattcccaaaggagccagacggagccagctcgtgaacgaaaacgtaagaaaaggagaattatgaaggcccctgccgcagaggccgttgcggagggcgcttctggtcggcacgggcaaggtagaagcctcgaagccgaggacaagatgacacaccgcatcctacgggccgcccaagagggcgacttgcctgagctgagacgcttgctcgaaccccatgaagccggaggcgctgggggcaacatcaacgcacgggacgccttctggtggaccccactcatgtgtgccgcccgggccgggcagggagcggccgtttcttacctgcttgggcgaggagcagcttgggtgggggtctgcgaactgagcgggagggacgcagcccaactcgcagaagaggcgggattccccgaagtggctcggatggtgcgagagagccatggagagacccgaagtccagagaaccggagccccacaccttcacttcaatactgtgagaactgtgacacacacttccaggactcgaaccataggacgtccacagcacaccttctatctctgtcccagggcccccagccccctaacctgcccctgggagtacccatctcctccccgggatttaaactgctgctgagacgggggtgggagccagggatgggcctgggccccagaggcgagggacgggcgaaccctattccaaccgtgctcaagcgagatcaggagggtttaggctatagaagtgcgcctcagccaagggtgacccacttccctgcatgggacacgcgcgcggtggctgggagagagaggcctccgagagtcgcgaccctctcatggagggaggagcgacgaagggaggaaaaggaccgcgcatgggaacgcgatctcaggacatacatgaatctggagttctag

SEQ ID NO: 296995 - DNA, 1071 bp, Artificial Sequence
  derived and/or modified sequence
atgagccggcccctgctgatcaccttcacccccgccaccgacccctcagacctgtggaaggacggacaacagcagccccagccagaaaagccagagagcacactggatggagctgctgcaagggccttctacgaagctcttattggggacgaatcaagcgcacctgactctcaaagatctcaaacagagccagccagagagcggaagaggaaaaagcgaaggattatgaaagcacccgctgctgaggcggtggcagagggagcttcagggcggcatggccagggacgatccctggaggccgaggacaaaatgacacatagaattctgcgggcggcccaggaaggtgatctcccagagctccgtcgcctgctagagccgcatgaagcgggcggggcaggaggtaacattaacgctagggacgccttttggtggactccccttatgtgcgccgcgcgcgccggccaaggtgctgctgtgagctacctgctaggcaggggcgcggcgtgggtcggggtgtgtgagctgtcggggcgggatgctgcccagctcgcagaggaagcaggcttccctgaggtagccagaatggtgcgtgagtcacatggtgagacgaggtccccagaaaatcgctctcccaccccttctctgcagtattgcgaaaactgcgacacacacttccaggattctaatcacaggaccagcacggcccacctactgtcgttgtcgcagggcccgcagccaccaaatctgccccttggagtgcccatcagcagcccaggattcaagcttctgctgagaagggggtgggaacccgggatgggattaggcccgcgcggtgaagggcgcgccaatccgatacctacggtgttgaaacgggatcaggagggccttgggtaccgaagcgccccccagcctagagtgactcacttcccggcatgggacacccgcgccgtagctggtcgagagcgcccgcctcgggttgcaacgctttcttggagggaagagagaagaagggaggagaaggaccgggcttgggagcgcgatctacgcacttacatgaatctggaattctag

SEQ ID NO: 296996 - DNA, 1071 bp, Artificial Sequence
  derived and/or modified sequence
atgagccggcccctgctgatcaccttcacccccgccaccgaccccagtgacctgtggaaagacggccagcagcagccacagccagagaagcccgaatcaactctggatggagcagctgccagagccttctacgaagcactgatcggagacgagtcttctgccccggatagccagcgatcccagacagagcccgcccgcgaaaggaaaaggaagaaaagaaggatcatgaaggctccagcagccgaagctgttgccgagggagcctctggaagacacgggcaaggacgctcgctggaggccgaggacaagatgacgcatagaatccttagagccgcacaggagggcgatttgcccgagctgagacggctactggagccgcacgaagccgggggtgctgggggcaatatcaatgccagggacgcattttggtggaccccgcttatgtgtgctgctagagctggccagggcgccgccgtcagttacctgctcggccgtggcgcggcgtgggtcggcgtctgtgagctgtctggtcgggatgctgcccagctcgccgaggaggcgggctttcctgaagttgccaggatggtccgcgaatcacatggcgaaactcggtcacccgagaatcggagccctaccccctctctgcagtattgcgagaactgcgacacccacttccaggattctaaccatagaacgtccacggcgcacctgctgagcctaagccaaggcccccagccccctaacttaccccttggcgtgcccataagcagccccggattcaagcttctgttgagaaggggctgggagccaggcatgggtttggggcctagaggagaaggcagggccaaccccattccaaccgtactcaaaagggaccaggaaggcctgggatataggtcagctcctcagcctcgtgtgactcatttccctgcctgggataccagggccgtggctggaagagagcggcctccacgcgtcgcaaccctgagctggagagaggagagacgaagggaagaaaaggatagggcatgggagcgagatttacggacgtatatgaacctcgaattctag

SEQ ID NO: 296997 - DNA, 1071 bp, Artificial Sequence
  derived and/or modified sequence
atgagccggcccctgctgatcaccttcacccccgccaccgaccccagcgacctttggaaagacggacagcagcagcctcagccagaaaagccagagagtacccttgatggggctgctgcccgagctttctacgaagcgttaatcggcgatgagtcttccgctccagactcgcagcggtctcaaacggagccagccagagaacggaagcggaagaaaaggagaattatgaaggctcctgccgccgaggccgttgctgagggggccagcgggaggcacggccagggcaggtctctggaagccgaggacaaaatgacgcatcggatcttgagggcagcacaagagggggacctgcctgaactgaggagattactggaaccccatgaggccgggggcgcaggcggaaacattaacgctagagacgcattttggtggactcctttaatgtgcgccgccagggcagggcagggagccgctgtaagctatttattggggcggggcgcagcctgggtgggtgtctgcgagctgtctggtcgtgatgctgctcagttagccgaagaagccggctttcctgaggtagctaggatggtccgagagagccacggcgagacgcggtccccagaaaatcgttcacccactcccagcctacaatattgcgagaattgcgacacccactttcaggattcaaatcaccggacttctactgctcacctgctctccttgtcccaggggcctcagccacccaacttacctcttggagtgccgattagttctcccggatttaaactcttgctgcggaggggttgggagcccgggatggggctcggcccccggggggagggcagggccaaccctatccctaccgtgctgaaacgggaccaggagggactcggctaccgctcagccccacagcctcgggtgacccactttcctgcctgggacacgagagcagtggctggcagagagcggcctcctagggtcgccacgttaagctggcgggaggaaagaagaagagaagagaaggatcgggcatgggaacgagacctgcgcacctacatgaatctggagttctag

SEQ ID NO: 296998 - DNA, 1071 bp, Artificial Sequence
  derived and/or modified sequence
atgagccggcccctgctgatcaccttcacccccgccaccgacccctctgacctgtggaaagatggccagcaacagccacagccagaaaaacctgagtctacacttgacggggcagccgccagggcgttctacgaagccctgatcggggacgagagctcagcccctgattcgcagcggagccaaaccgaacctgcccgcgaacgcaagcgcaaaaaaagacgtattatgaaagcacctgcggcagaagctgtagctgagggggcctcaggcaggcacgggcaggggcgctcgctcgaggctgaggacaagatgacgcacagaattttgcgcgccgcccaggagggggatctccctgagttacgcagactgctcgagccacatgaagcaggcggagctggcgggaatattaatgcaagggacgctttttggtggacacctctgatgtgcgctgcccgggctgggcaaggcgctgccgtttcttatctgctggggaggggcgctgcgtgggtgggggtgtgtgaactgtctggcagagatgcagcccagctcgccgaggaggctggcttccccgaagtagccagaatggttagagaaagtcacggggagacccgatccccggaaaacagatcacctactccttctctgcagtactgtgaaaattgcgacacacactttcaggatagtaaccatcgaacgagcaccgcccacctgctgtccctgtcacaaggccctcagccacctaatctgcccctgggagtgccgatttctagtcctggattcaaacttctcctcaggcgtggatgggagcccgggatgggcctaggaccaaggggcgaaggccgcgctaaccctattcccacggtgctgaaacgcgaccaggagggcctgggatacaggtctgctccccagccacgcgtgacacatttccctgcttgggacacgcgcgccgtggccggccgcgagagacccccccgggtggctacgttgagttggcgggaagagagacgccgagaggaaaaagatcgtgcctgggagcgggatctgaggacgtatatgaatttagaattctag

SEQ ID NO: 296999 - DNA, 1071 bp, Artificial Sequence
  derived and/or modified sequence
atgtccagaccgctcctgataacatttacaccggcaaccgatccatccgacctgtggaaggatggtcagcaacagccccagcccgagaagccagagtcgacgcttgatggagcggctgccagagccttttacgaggctttaatcggagacgagtctagcgccccagactcacagcgttcccagaccgagcccgcacgggaaaggaagaggaagaaaaggagaatcatgaaggcacccgctgcagaggctgttgcggaaggcgcaagtggcagacatgggcagggccgttcactggaggccgaagacaagatgacacataggatattgcgggctgctcaggagggtgacctgccagaactgcggaggctgctcgaaccgcacgaagcgggtggcgctggcggtaacatcaatgctagggatgccttttggtggacccctctgatgtgtgccgctcgcgctggccagggtgccgcagtgtcctacctactgggcagaggagctgcatgggtcggtgtgtgcgagctaagtggtagggacgcggctcagctggcggaggaggctggcttcccagaggtagccaggatggtgcgagagagccacggggagacacgtagcccggaaaacagaagcccgacaccctcacttcagtactgcgagaactgcgatactcattttcaagactcaaaccatcggacgagcacggcccacttactgtcattatctcagggtccacagcccccaaatttgcctctgggagtacccattagtagtcctggtttcaagctgttactccggaggggatgggaacccggaatgggcttgggccctcgaggggaaggaagggctaacccaattcctaccgtcctaaagagagaccaagagggactgggataccgaagcgccccacagcctagggttacccactttcccgcatgggacacccgcgctgttgccggaagggagaggccgcctagagtggccactctttcctggcgcgaggaacggaggcgtgaggaaaaggaccgcgcttgggagcgggatctaaggacgtacatgaatctggaattctag

SEQ ID NO: 297000 - DNA, 1071 bp, Artificial Sequence
  derived and/or modified sequence
atgtctcgacctttgctgatcactttcacccccgcaaccgacccctcagatctttggaaggacggccagcagcagccacagcccgagaagcctgaaagtacccttgatggcgctgccgcacgcgctttctatgaagctctgattggggatgagtcaagcgccccagattcacagaggtcacaaacggaaccggcacgcgagcgaaaacgaaagaagagacggatcatgaaggctcctgcagccgaagcagtggccgagggggctagcgggaggcacgggcagggaagaagtctggaagccgaagataagatgactcatcgaattctgcgcgctgctcaggagggagacctgcccgaattgcggaggttactagaaccccatgaagccggaggcgcaggaggtaatattaatgcaagggacgctttttggtggacccctcttatgtgtgccgctcgcgctggacagggcgctgcggtgtcgtacctgcttggaagaggcgctgcttgggttggagtgtgcgaactgtccggtcgggacgcagcacagctggctgaagaagcgggttttcctgaggtggctcgtatggtgcgggagtcccacggagagacacggtctccggagaatcggtcacccactccatcattgcagtattgcgagaactgcgatacccactttcaggactctaatcatcgcactagcactgctcatctccttagcttgtcccaggggccacagcccccaaacctgcctttaggagtgccaatatcttctcccggattcaagttgctgttgcgcagaggttgggaaccaggtatgggccttggcccacgcggtgagggcagggcgaacccaattcctaccgtcctgaagagggaccaggagggcctggggtatcgctcagctccacagccccgagttacgcactttcccgcatgggacacacgcgctgttgccggtcgagagcggcctccacgggtagctactctgagttggcgtgaagagcgccgacgagaagagaaggaccgcgcttgggagcgcgatttaaggacctatatgaatctggaattctag

SEQ ID NO: 297001 - DNA, 1071 bp, Artificial Sequence
  derived and/or modified sequence
atgagccggcctctccttatcacatttacacccgcaacggacccctcagatctatggaaggatggacaacagcagccccagcctgaaaagcccgagagtacgcttgatggtgctgccgcaagggccttctacgaggctctgataggagacgaatcttctgccccagacagtcaacggagtcagactgagccagctagggaacgcaaacgcaaaaaacggcgtatcatgaaggcacccgcagctgaagctgttgctgagggtgccagcggccgacacggccaggggaggtcgctggaggccgaggataagatgacacatagaatcctgcgtgcggctcaagaaggggacctgccagagctgcgtcggctgttagagcctcacgaagctggcggtgccggaggcaacattaacgcgagggacgcattctggtggacccctctgatgtgcgcggcaagagcgggacagggcgcagcagtatcttatctcctcgggcgaggggctgcttgggttggtgtgtgtgaactgagcggaagggatgccgcacagctggccgaagaagcagggtttcctgaggtggctagaatggtgagagagtctcatggagagactagaagccccgagaatcggtcgcctacacctagcctgcagtactgtgaaaattgcgacactcacttccaggactccaaccatcggacatcaacggcacacctcctgtcgctgagccagggccctcagcccccaaatcttcctctgggcgtgcccatttccagcccaggtttcaagctgctcctgaggcgcggttgggaaccagggatggggctcggtccacggggagaagggcgtgctaatccaattcctacagttctgaagcgggatcaggagggcttagggtaccggtcagcgccacagcccagagtaacgcattttcctgcatgggacacccgcgcagtcgcgggtcgggaacgtcctcccagggtggctacgctgagttggcgggaagaacgacggcgagaggaaaaggatcgagcctgggagcgggatctacgaacttacatgaacctggaattctag

SEQ ID NO: 297002 - DNA, 1071 bp, Artificial Sequence
  derived and/or modified sequence
atgtcccgcccactcctcatcacttttacccccgctaccgaccctagtgatctctggaaagatgggcagcaacagccccaaccagagaagccggagtctactctcgatggcgcagccgctcgggcattttacgaagcgctgattggtgacgagagctcggccccagattcgcagcgaagtcagactgagcctgccagggagaggaagagaaaaaagaggagaatcatgaaggcacccgcagctgaggccgtagctgaaggcgcttcaggtcgtcacggacagggacggtcactggaagcggaggacaagatgacacacagaattctcagagcagcccaggagggagacttgcccgagctgcgtaggcttctcgagccacacgaagccggtggtgctggcggtaacattaacgcacgagatgccttttggtggacacccctgatgtgcgcagctcgtgccggacagggggctgcagtcagctacctgttgggcagaggagccgcatgggtgggagtgtgtgaactaagcggcagggatgcagcccagcttgctgaagaggccggttttccagaagtcgcacgcatggtgagggagtctcatggagaaaccagatctccggaaaaccggagccctactccctccctgcagtactgtgaaaactgcgacacgcatttccaagactctaatcacagaacctcgacagcccatctgctgtccctcagtcaggggcctcaaccccctaaccttcccctaggagtcccgatcagctctcccggatttaagctgctcctgaggcgcggttgggagcccggaatgggtctaggacctcgaggcgaggggcgtgccaatccaatccccactgtcctcaagcgggaccaggagggactgggttataggagcgccccacagcctagagttactcactttcctgcatgggacaccagagcagtggctgggagagagcggccaccccgtgtagctactcttagctggcgggaggagagaaggcgagaggaaaaggatcgtgcctgggagcgagatctccggacgtatatgaacctggagttctag

SEQ ID NO: 297003 - DNA, 1071 bp, Artificial Sequence
  derived and/or modified sequence
atgagtaggcccctattgatcacattcaccccggctaccgatccatcggatctctggaaagatggccagcagcaacctcagccagaaaagccagagtcgaccctggatggcgctgcggctcgggcattttacgaagctctcatcggggatgaatcctctgctcccgatagccagcgctctcagacggagcctgctcgagaaagaaagcggaaaaagaggcggattatgaaggcacccgctgcagaagccgtcgccgagggcgcatctggccgacatggccaaggacggagtctggaggcagaggataagatgacccaccgcatcttgcgggcagcccaggaaggagacctgcccgagctccgacgcctattagaacctcacgaagccggaggagcaggaggtaatattaacgcaagagacgctttttggtggacacctctaatgtgtgccgcaagggcaggccaaggggcagcagtttcatacttgctgggacgtggcgctgcttgggtgggcgtgtgtgaacttagcggacgcgacgctgcccagctggcggaagaagcagggttccccgaagtggctaggatggttagagagagtcatggtgagactcggtcacccgaaaatagatctcccacgccgagtctgcagtattgcgagaattgtgatactcatttccaggactccaaccaccgtactagcacggcccacctgctttcgctctctcagggaccgcagccacccaaccttcctctcggtgttcctatctcctcgccagggttcaagctacttctcagaaggggatgggaaccaggcatgggcctcggccctagaggcgaagggagagccaaccccatcccgaccgtcctgaaacgcgaccaggaaggactcgggtatcggtcagcaccgcagccaagggtgacccatttcccagcatgggatactagagctgtggcagggagagagaggcctccacgtgtggctactctgagttggcgggaagagagacgcagggaagaaaaagaccgggcatgggagagggacctacggacgtacatgaatctggagttctag

SEQ ID NO: 297004 - DNA, 1071 bp, Artificial Sequence
  derived and/or modified sequence
atgagcagacccctgctgatcaccttcacccccgccaccgaccccagcgacctgtggaaggacggccagcagcagccccagcccgagaagcccgagagcaccctggacggcgccgccgccagagccttctacgaggccctgatcggcgacgagagcagcgcccccgacagccagagaagccagaccgagcccgccagagagagaaagagaaagaagagaagaatcatgaaggcccccgccgccgaggccgtggccgagggcgccagcggcagacacggccagggcagaagcctggaggccgaggacaagatgacccacagaatcctgagagccgcccaggagggcgacctgcccgagctgagaagactgctggagccccacgaggccggcggcgccggcggcaacatcaacgccagagacgccttctggtggacccccctgatgtgcgccgccagagccggccagggcgccgccgtgagctacctgctgggcagaggcgccgcctgggtgggcgtgtgcgagctgagcggcagagacgccgcccagctggccgaggaggccggcttccccgaggtggccagaatggtgagagagagccacggcgagaccagaagccccgagaacagaagccccacccccagcctgcagtactgcgagaactgcgacacccacttccaggacagcaaccacagaaccagcaccgcccacctgctgagcctgagccagggcccccagccccccaacctgcccctgggcgtgcccatcagcagccccggcttcaagctgctgctgagaagaggctgggagcccggcatgggcctgggccccagaggcgagggcagagccaaccccatccccaccgtgctgaagagagaccaggagggcctgggctacagaagcgccccccagcccagagtgacccacttccccgcctgggacaccagagccgtggccggcagagagagaccccccagagtggccaccctgagctggagagaggagagaagaagagaggagaaggacagagcctgggagagagacctgagaacctacatgaacctggagttctag

SEQ ID NO: 297005 - protein, 304 aa, Artificial Sequence
  derived and/or modified sequence
MSLMVVSMACVGFFLLQGAWPHEGVHRKPSLLAHPGPLVKSEETVILQCWSDVRFEHFLLHREGKYKDTLHLIGEHHDGVSKANFSIGPMMQDLAGTYRCYGSVTHSPYQLSAPSDPLDIVITGLYEKPSLSAQPGPTVLAGESVTLSCSSRSSYDMYHLSREGEAHERRFSAGPKVNGTFQADFPLGPATHGGTYRCFGSFRDSPYEWSNSSDPLLVSVTGNPSNSWPSPTEPSSKTGNPRHLHVLIGTSVVKIPFTILLFFLLHRWCSNKKNAAVMDQEPAGNRTVNSEDSDEQDHQEVSYA

SEQ ID NO: 297006 - DNA, 915 bp, Artificial Sequence
  derived and/or modified sequence
atgagcctgatggtggtgagcatggcctgcgtgggcttcttcctgctgcagggcgcctggccccacgagggcgtgcacagaaagcccagcctgctggcccaccccggccccctggtgaagagcgaggagaccgtgatcctgcagtgctggagcgacgtgagattcgagcacttcctgctgcacagagagggcaagtacaaggacaccctgcacctgatcggcgagcaccacgacggcgtgagcaaggccaacttcagcatcggccccatgatgcaggacctggccggcacctacagatgctacggcagcgtgacccacagcccctaccagctgagcgcccccagcgaccccctggacatcgtgatcaccggcctgtacgagaagcccagcctgagcgcccagcccggccccaccgtgctggccggcgagagcgtgaccctgagctgcagcagcagaagcagctacgacatgtaccacctgagcagagagggcgaggcccacgagagaagattcagcgccggccccaaggtgaacggcaccttccaggccgacttccccctgggccccgccacccacggcggcacctacagatgcttcggcagcttcagagacagcccctacgagtggagcaacagcagcgaccccctgctggtgagcgtgaccggcaaccccagcaacagctggcccagccccaccgagcccagcagcaagaccggcaaccccagacacctgcacgtgctgatcggcaccagcgtggtgaagatccccttcaccatcctgctgttcttcctgctgcacagatggtgcagcaacaagaagaacgccgccgtgatggaccaggagcccgccggcaacagaaccgtgaacagcgaggacagcgacgagcaggaccaccaggaggtgagctacgcctag

SEQ ID NO: 297007 - DNA, 915 bp, Artificial Sequence
  derived and/or modified sequence
atgtctttaatggtcgtgagcatggcgtgcgtgggcttcttcctgctgcagggcgcatggccccacgagggcgtgcacagaaagcctagtctgctcgcccaccctggaccactggttaagtccgaggaaactgtcatactccaatgctggtcagatgttcgttttgagcactttcttctccaccgcgaaggcaagtacaaagatactctccatctgatcggagaacaccacgatggcgtatccaaagctaacttctctataggacctatgatgcaggacctcgccgggacctaccgctgttatggcagcgtgactcacagtccttaccagctcagtgctccctctgatccgctggatattgtgatcacaggactctacgaaaaacccagcctgtccgctcagcccggacccaccgttcttgcaggggagagtgtgactctcagctgctccagccgctcttcgtacgatatgtaccacttaagccgagagggagaggctcatgagcggcgtttctctgcggggcctaaggtcaacgggacttttcaggcagattttcccttgggtccagctactcacggaggcacatatcggtgctttggctcttttcgtgactccccatatgagtggtccaactcgagcgacccgcttttggtcagcgttacaggcaaccctagcaatagctggccaagccccactgaaccgtcctcaaaaaccggtaatcccagacacttacacgtgctgatcgggacatccgtggtaaagattccttttacaattctcctattctttcttttgcataggtggtgtagcaacaagaagaacgccgccgtgatggatcaggagcccgcaggaaatagaacagtaaactcggaggactcggacgaacaggatcaccaggaagtgagctacgcttag

SEQ ID NO: 297008 - DNA, 915 bp, Artificial Sequence
  derived and/or modified sequence
atgtcactgatggttgtatccatggcctgtgtgggctttttcctgttacagggtgcgtggccccatgagggcgtgcaccgtaaacccagtctgctggcgcatccgggccccctggtgaagtctgaagagacagtgatcctgcagtgctggtctgatgtgaggtttgagcattttctgctgcaccgtgaggggaagtataaggataccctgcacctgataggggaacatcatgacggagtatccaaggctaactttagcattggtcctatgatgcaagacctggccgggacctacaggtgttacggctccgtgacccattccccctaccagctaagtgctccaagcgatccacttgacattgtgatcacaggattgtacgagaaaccctcgctcagcgcccagcccggccccaccgtgctcgccggagagtcagtgacactaagctgctcatctcgcagcagttacgacatgtaccacctctctagagagggagaagcgcatgagcggaggttcagcgcaggccctaaggtgaatgggacgttccaggccgacttccccctcggtcctgctacccacgggggcacatatcgctgcttcggctcattcagggacagcccttatgagtggtccaatagcagtgacccgctcctggtgagcgttaccgggaatccatcaaactcctggccatctcctacggaacccagctcaaagacaggcaatccacggcacctgcacgtgttgataggcacctcagtagtgaaaatccctttcaccatcctgctgttttttctactgcacagatggtgctccaataagaaaaatgccgcggtcatggaccaggaacctgccggaaataggacagttaacagcgaagattctgacgagcaggaccaccaagaggtgtcgtatgcttag

SEQ ID NO: 297009 - DNA, 915 bp, Artificial Sequence
  derived and/or modified sequence
atgagcctgatggtggtgtccatggcctgtgtgggcttcttcctgctgcagggcgcctggccccatgagggcgtgcacaggaagcccagcctgctggcccaccctggccccctggtgaagtctgaggagaccgtcatcctgcagtgctggagcgatgtgcgctttgagcacttcctgctgcaccgggagggcaagtacaaggacaccctgcacctgattggagagcaccatgatggagtgtccaaggccaacttcagcatcggccccatgatgcaggacctggccggcacctaccgctgctacggctctgtgacccacagcccctaccagctgagcgcccccagcgaccccctggacatcgtcatcaccggcctgtatgagaagcccagcctgagcgcccagcccggccccaccgtgctggccggggagagcgtgaccctgagctgcagcagccgcagcagctatgacatgtaccacctgagccgggagggggaggcccatgaaagacgcttctctgctggccccaaggtgaatggcaccttccaggccgacttccccctgggccctgccacccacggcggcacctaccgctgcttcggcagcttccgggacagcccctatgagtggagcaacagcagtgaccccctgctggtgtctgtgactggaaaccccagcaacagctggcccagccccacagagcccagcagcaagacaggcaaccccaggcacctgcacgtgctgattggcacctctgtggtgaagatccccttcaccatcctgctcttcttcctgctgcaccgctggtgcagcaacaagaagaatgctgctgtgatggaccaggagcctgctggcaacagaacagtgaacagtgaagattctgatgagcaggaccaccaggaggtgtcctatgcctag

SEQ ID NO: 297010 - DNA, 915 bp, Artificial Sequence
  derived and/or modified sequence
atgagcctgatggtggtgagcatggcctgcgtgggcttcttcctgctgcagggcgcgtggccccacgagggcgtacatcggaagccaagcttactggcccatcccgggcccctggtgaagtccgaggaaaccgttattctccagtgctggtctgacgttagatttgaacattttctgttgcaccgagagggaaagtataaagacacgcttcacctaataggagagcaccatgatggcgtgtccaaggctaactttagtatcggaccgatgatgcaggatcttgccgggacataccgttgttacggtagtgttacccatagtccctatcaattatcagcccccagtgaccccctagacatcgtgatcaccgggctgtacgaaaagccatctctgtctgctcagcccggccctaccgtgttagcgggcgagtcagtcacacttagctgctctagcaggtccagttatgacatgtatcacttatcaagagaaggagaggcccacgagcggcgtttcagcgcagggccaaaggtgaatggtactttccaggcagattttcccctgggcccagcgactcatggtggaacatataggtgttttgggtcgttccgggactctccgtatgaatggagcaactcatccgaccccttactcgtttccgtcaccgggaatccttcaaattcctggccctctcccacggagccctcttctaagacaggaaatccccggcacttacatgttctcattggaacatcagtggtgaaaatccccttcactatcctgcttttctttctgctgcaccgctggtgctccaacaagaaaaacgctgcggtgatggaccaggagcctgcagggaatcgcacagtgaactcagaggatagtgatgagcaggatcaccaggaagtaagttatgcatag

SEQ ID NO: 297011 - DNA, 915 bp, Artificial Sequence
  derived and/or modified sequence
atgagcctgatggtggtgagcatggcctgcgtgggcttcttcctgctgcagggggcatggccccatgagggcgtgcatcgcaaaccttccctgttagcccacccgggaccgctcgtgaaaagcgaggagaccgttattctgcagtgctggagtgatgtccggttcgagcattttctcctgcatagggaagggaaatacaaggacaccctgcatctaatcggtgagcaccacgacggcgtaagtaaggccaacttttctatcggaccaatgatgcaggacctggcggggacatataggtgctacgggagcgtgactcattctccttatcagctgtccgccccttccgatcccctggatatcgtcatcacaggcctgtacgagaagccttctttatccgcccaacctgggcctacagtgctcgcaggagaatctgttaccctcagctgctctagtaggtctagttacgacatgtaccacctgagccgggaaggggaggctcatgagcgcagattcagcgctggacctaaggtcaatggcaccttccaggccgactttcccctgggaccagccacacatggggggacctaccgatgtttcgggtcattccgggattccccctacgagtggagtaattcaagcgatcctttgttagtgtccgtgaccggtaacccctctaattcctggccaagtccaacagagccatctagcaagactggaaacccccgccacctacacgttctaatcggaacaagtgtggttaagattccctttactatcctgctcttttttctgctccacagatggtgcagcaacaaaaaaaatgcagcagtcatggaccaagagcctgccggcaaccggacagtgaactcggaggactccgacgagcaggaccaccaagaggtgtcctacgcttag

SEQ ID NO: 297012 - DNA, 915 bp, Artificial Sequence
  derived and/or modified sequence
atgtctctgatggtagtatcaatggcatgcgtaggcttctttctacttcagggcgcttggccacatgagggagtgcacaggaaaccctcactgctggcccacccaggacctttagttaaatctgaggaaacggtcattcttcagtgctggtccgacgtaaggtttgagcactttctcctccacagggaaggcaagtacaaagacacccttcatttgatcggggagcaccatgatggagtcagtaaagctaatttttctatcgggccaatgatgcaggacctggccggtacgtaccgttgctatgggtccgtaacacactccccatatcagctttcggcaccgagcgatcccctcgacattgtgattacaggtctgtacgagaagccaagcctgtccgcacagccaggtcccactgtcttagctggcgaaagtgtaacgctctcttgcagttcacgttctagctatgacatgtatcacttgtctcgagaaggggaagcccatgagagacggttttccgccggacctaaggtcaacggcacatttcaggcagatttcccactgggcccagctactcacggcggtacgtatagatgtttcggatcattccgtgatagtccttatgagtggagcaactctagtgaccccctgttggtatcagttaccggcaatccctcaaactcatggccatcgccgacagagcctagctcaaaaacaggcaatcctaggcatctgcacgtgctaataggcacgagcgtggtgaagataccttttacgatcttactcttttttctgctgcaccggtggtgctccaataagaagaacgcagctgttatggaccaggagccagcgggtaaccggacagtcaattctgaagactctgatgagcaggatcatcaggaagtgtcttatgcttag

SEQ ID NO: 297013 - DNA, 915 bp, Artificial Sequence
  derived and/or modified sequence
atgtccctcatggtcgttagcatggcatgcgtgggcttcttcttattgcagggtgcttggccacacgagggggtgcaccggaagccctctcttctggcacatcctggtcccctggtgaagtcagaggagacggtgatattgcagtgttggtctgatgtgaggttcgaacacttcctgctgcaccgcgaaggaaaatacaaggacactcttcacctaattggcgagcaccacgacggagtctcaaaggcgaatttttcaatcggtcctatgatgcaagatctggctggcacatacagatgctatgggagtgtaacccacagcccataccagctgtctgctccttctgatccactggatatcgtgatcactgggctctatgaaaaaccctctctgtctgcacagccgggtcccaccgtgctggccggtgagagcgtgacgctgtcctgctcctccagaagtagctacgatatgtaccacctctccagagagggggaagcgcacgagaggcgcttctcggctggccctaaagtcaatggcacgttccaagcagacttccctctggggcctgctacccacggtggcacttatcgttgcttcggaagttttcgggactccccctatgaatggtccaactcttccgatcccctgctcgtgtcagtgaccggcaacccctccaattcttggcccagtcccacagagccctcaagcaagacggggaatccacggcaccttcacgtgcttatcggcactagcgtggtgaagattccttttactatcctcttatttttcctcctgcaccggtggtgctctaacaagaagaatgcagccgtcatggatcaggaacccgctggcaacaggaccgtcaattctgaggactctgatgagcaggaccatcaggaagtctcctatgcatag

SEQ ID NO: 297014 - DNA, 2700 bp, Artificial Sequence
  derived and/or modified sequence
atgctgctgctgctgctgctggcccccctgttcctgagaccccccggcgccggcggcgtgcagacccccaacgccaccagcgagggctgccagatcatccaccccccctgggagggcggcatcagatacagaggcctgaccagagaccaggtgaaggccatcaacttcctgcccgtggactacgagatcgagtacgtgtgcagaggcgagagagaggtggtgggccccaaggtgagaaagtgcctggccaacggcagctggaccgacatggacacccccagcagatgcgtgaacagaaccccccacagcgagagaagagccgtgtacatcggcgccctgttccccatgagcggcggctggcccggcggccaggcctgccagcccgccgtggagatggccctggaggacgtgaacagcagaagagacatcctgcccgactacgagctgaagctgatccaccacgacagcaagtgcgaccccggccaggccaccaagtacctgtacgagctgctgtacaacgaccccatcaagatcatcctgatgcccggctgcagcagcgtgagcaccctggtggccgaggccgccagaatgtggaacctgatcgtgctgagctacggcagcagcagccccgccctgagcaacagacagagattccccaccttcttcagaacccaccccagcgccaccctgcacaaccccaccagagtgaagctgttcgagaagtggggctggaagaagatcgccaccatccagcagaccaccgaggtgttcaccagcaccctggacgacctggaggagagagtgaaggaggccggcatcgagatcaccttcagacagagcttcttcagcgaccccgccgtgcccgtgaagaacctgaagagacaggacgccagaatcatcgtgggcctgttctacgagaccgaggccagaaaggtgttctgcgaggtgtacaaggagagactgttcggcaagaagtacgtgtggttcctgatcggctggtacgccgacaactggttcaagatctacgaccccagcatcaactgcaccgtggacgagatgaccgaggccgtggagggccacatcaccaccgagatcgtgatgctgaaccccgccaacaccagaagcatcagcaacatgaccagccaggagttcgtggagaagctgaccaagagactgaagagacaccccgaggagaccggcggcttccaggaggcccccctggcctacgacgccatctgggccctggccctggccctgaacaagaccagcggcggcggcggcagaagcggcgtgagactggaggacttcaactacaacaaccagaccatcaccgaccagatctacagagccatgaacagcagcagcttcgagggcgtgagcggccacgtggtgttcgacgccagcggcagcagaatggcctggaccctgatcgagcagctgcagggcggcagctacaagaagatcggctactacgacagcaccaaggacgacctgagctggagcaagaccgacaagtggatcggcggcagcccccccgccgaccagaccctggtgatcaagaccttcagattcctgagccagaagctgttcatcagcgtgagcgtgctgagcagcctgggcatcgtgctggccgtggtgtgcctgagcttcaacatctacaacagccacgtgagatacatccagaacagccagcccaacctgaacaacctgaccgccgtgggctgcagcctggccctggccgccgtgttccccctgggcctggacggctaccacatcggcagaaaccagttccccttcgtgtgccaggccagactgtggctgctgggcctgggcttcagcctgggctacggcagcatgttcaccaagatctggtgggtgcacaccgtgttcaccaagaaggaggagaagaaggagtggagaaagaccctggagccctggaagctgtacgccaccgtgggcctgctggtgggcatggacgtgctgaccctggccatctggcagatcgtggaccccctgcacagaaccatcgagaccttcgccaaggaggagcccaaggaggacatcgacgtgagcatcctgccccagctggagcactgcagcagcagaaagatgaacacctggctgggcatcttctacggctacaagggcctgctgctgctgctgggcatcttcctggcctacgagaccaagagcgtgagcaccgagaagatcaacgaccacagagccgtgggcatggccatctacaacgtggccgtgctgtgcctgatcaccgcccccgtgaccatgatcctgagcagccagcaggacgccgccttcgccttcgccagcctggccatcgtgttcagcagctacatcaccctggtggtgctgttcgtgcccaagatgagaagactgatcaccagaggcgagtggcagagcgaggcccaggacaccatgaagaccggcagcagcaccaacaacaacgaggaggagaagagcagactgctggagaaggagaacagagagctggagaagatcatcgccgagaaggaggagagagtgagcgagctgagacaccagctgcagagcagacagcagctgagaagcagaagacacccccccaccccccccgagcccagcggcggcctgcccagaggcccccccgagccccccgacagactgagctgcgacggcagcagagtgcacctgctgtacaagtag

SEQ ID NO: 297015 - DNA, 4299 bp, Artificial Sequence
  derived and/or modified sequence
gcccgggagctctccctggtccccggcgccgcctccttccctcccggctccccgctccccgctcccgtggctgccgccgccccggggaagaagagacaggggtggggtttgggggaagcgagagaggaggggagagaccctggccaggctggagcctggattcgaggggaggagggacgggaggaggagaaaggtggaggagaagggaggggggagcggggaggagcggccgggcctggggccttgaggcccggggagagccggggagccgggcccgcgcgccgagatgttgctgctgctgctactggcgccactcttcctccgccccccgggcgcgggcggggtgcagacccccaacgccacctcagaaggttgccagatcatacacccgccctgggaagggggcatcaggtaccggggcctgactcgggaccaggtgaaggctatcaacttcctgccagtggactatgagattgagtatgtgtgccggggggagcgcgaggtggtggggcccaaggtccgcaagtgcctggccaacggctcctggacagatatggacacacccagccgctgtgtgaatcgaacgccacactcagaacggcgcgcagtgtacatcggggcactgtttcccatgagcgggggctggccagggggccaggcctgccagcccgcggtggagatggcgctggaggacgtgaatagccgcagggacatcctgccggactatgagctcaagctcatccaccacgacagcaagtgtgatccaggccaagccaccaagtacctatatgagctgctctacaacgaccctatcaagatcatccttatgcctggctgcagctctgtctccacgctggtggctgaggctgctaggatgtggaacctcattgtgctttcctatggctccagctcaccagccctgtcaaaccggcagcgtttccccactttcttccgaacgcacccatcagccacactccacaaccctacccgcgtgaaactctttgaaaagtggggctggaagaagattgctaccatccagcagaccactgaggtcttcacttcgactctggacgacctggaggaacgagtgaaggaggctggaattgagattactttccgccagagtttcttctcagatccagctgtgcccgtcaaaaacctgaagcgccaggatgcccgaatcatcgtgggacttttctatgagactgaagcccggaaagttttttgtgaggtgtacaaggagcgtctctttgggaagaagtacgtctggttcctcattgggtggtatgctgacaattggttcaagatctacgacccttctatcaactgcacagtggatgagatgactgaggcggtggagggccacatcacaactgagattgtcatgctgaatcctgccaatacccgcagcatttccaacatgacatcccaggaatttgtggagaaactaaccaagcgactgaaaagacaccctgaggagacaggaggcttccaggaggcaccgctggcctatgatgccatctgggccttggcactggccctgaacaagacatctggaggaggcggccgttccggcgtgcgcctggaggacttcaactacaacaaccagaccattaccgaccaaatctaccgggcaatgaactcctcgtcctttgagggtgtctctggccatgtggtgtttgatgccagcggctctcggatggcatggacgcttatcgagcagcttcagggtggcagctacaagaagattggctactatgacagcaccaaggatgatctttcctggtccaaaacagataaatggattggagggtcccccccagctgaccagaccctggtcatcaagacattccgcttcctgtcacagaaactctttatctccgtctcagttctctccagcctgggcattgtcctagctgttgtctgtctgtcctttaacatctacaactcacatgtccgttatatccagaactcacagcccaacctgaacaacctgactgctgtgggctgctcactggctttagctgctgtcttccccctggggctcgatggttaccacattgggaggaaccagttccctttcgtctgccaggcccgcctctggctcctgggcctgggctttagtctgggctacggttccatgttcaccaagatttggtgggtccacacggtcttcacaaagaaggaagaaaagaaggagtggaggaagactctggaaccctggaagctgtatgccacagtgggcctgctggtgggcatggatgtcctcactctcgccatctggcagatcgtggaccctctgcaccggaccattgagacatttgccaaggaggaacctaaggaagatattgacgtctctattctgccccagctggagcattgcagctccaggaagatgaatacatggcttggcattttctatggttacaaggggctgctgctgctgctgggaatcttccttgcttatgagaccaagagtgtgtccactgagaagatcaatgatcaccgggctgtgggcatggctatctacaatgtggcagtcctgtgcctcatcactgctcctgtcaccatgattctgtccagccagcaggatgcagcctttgcctttgcctctcttgccatagttttctcctcctatatcactcttgttgtgctctttgtgcccaagatgcgcaggctgatcacccgaggggaatggcagtcggaggcgcaggacaccatgaagacagggtcatcgaccaacaacaacgaggaggagaagtcccggctgttggagaaggagaaccgtgaactggaaaagatcattgctgagaaagaggagcgtgtctctgaactgcgccatcaactccagtctcggcagcagctccgctcccggcgccacccaccgacacccccagaaccctctgggggcctgcccaggggaccccctgagccccccgaccggcttagctgtgatgggagtcgagtgcatttgctttataagtgagggtagggtgagggaggacaggccagtagggggagggaaagggagaggggaagggcaggggactcaggaagcagggggtccccatccccagctgggaagaacatgctatccaatctcatctcttgtaaatacatgtccccctgtgagttctgggctgatttgggtctctcatacctctgggaaacagacctttttctctcttactgcttcatgtaattttgtatcacctcttcacaatttagttcgtacctggcttgaagctgctcactgctcacacgctgcctcctcagcagcctcactgcatctttctcttcccatgcaacaccctcttctagttaccacggcaacccctgcagctcctctgcctttgtgctctgttcctgtccagcaggggtctcccaacaagtgctctttccaccccaaaggggcctctccttttctccactgtcataatctctttccatcttacttgcccttctatactttctcacatgtggctccccctgaattttgcttcctttgggagctcattcttttcgccaaggctcacatgctccttgcctctgctctgtgcactcacgctcagcacacatgcatcctcccctctcctgcgtgtgcccactgaacatgctcatgtgtacacacgcttttcccatatgctttcttcatgttcagtcacatgtgctctcgggtgccctgcattcacagctacgtgtgcccctctcatggtcatgggtctgcccttgagcgtgtttgggtaggcatgtgcaatttgtctagcatgctgagtcatgtctttcctatttgcacacgtccatgtttatccatgtactttccctgtgtaccctccatgtaccttgtgtactttcttcccttaaatcatggtattcttctgacagagccatatgtaccctaccctgcacattgttatgcacttttccccaattcatgtttggtggggccatccacaccctctccttgtcacagaatctccatttctgctcagattccccccatctccattgcattcatgtactaccctcagtctacactcacaatcatcttctcccaagactgctcccttttgttttgtgtttttttgaggggaattaaggaaaaataagtgggggcaggtttggagagctgcttccagtggatagttgatgagaatcctgaccaaaggaaggcacccttgactgttgggatagacagatggacctatggggtgggaggtggtgtccctttcacactgtggtgtctcttggggaaggatctccccgaatctcaataaaccagtgaacagtgtgactcgg

SEQ ID NO: 297016 - DNA, 2700 bp, Artificial Sequence
  derived and/or modified sequence
atgctgttattgctactactagcccctctctttctacgacctccgggagctggcggagtgcaaacaccaaatgcgacctctgagggttgccagatcatccaccctccctgggagggcggaatacgctatcgcgggctcactcgcgatcaggtaaaggctatcaactttttaccggtagattatgagattgaatatgtatgcagaggtgagagggaggtagttggccccaaggtgcgaaagtgccttgctaacgggagttggacggatatggataccccatcacgctgtgtaaaccggaccccccattccgagcgaagagctgtgtacatcggggcactcttcccaatgtcagggggttggcctggcggccaggcctgccagccggctgtggaaatggcactcgaggatgttaatagcagacgcgatatcttgcctgactacgaactcaagcttatccatcatgattctaagtgcgacccagggcaggccacaaagtatctgtacgagcttttgtacaatgatcccatcaagatcattctgatgcctggctgctccagtgtgtcaactctagtggcagaggcagcaagaatgtggaacctgatcgttctatcatacggttcctcctcaccagccttgtctaaccgccaaagattccctaccttcttcagaacccaccccagcgcaaccctgcacaaccccacccgcgtcaagctcttcgagaaatggggatggaagaagattgccacaatacagcagacaaccgaagttttcaccagcacactagacgacttagaagagcgggtcaaggaggcgggaattgagattacctttcgacaatcatttttcagcgatccggctgtgcctgtgaagaatctgaaaagacaagatgcccgtatcattgtggggctgttctatgaaacagaggccagaaaggtgttctgtgaagtgtacaaggagcgccttttcgggaagaagtacgtgtggttcctgatcggttggtatgcggacaactggttcaagatatatgatcccagtatcaactgcacagtcgatgaaatgactgaggccgtagagggtcacatcaccactgagatcgtcatgctgaatcccgccaacacaaggtccatcagcaacatgacttcacaagagttcgtggaaaaacttacaaaacggctgaaaaggcacccagaggaaacgggcggcttccaagaagcccccctagcatacgatgccatatgggcactggccctggcactcaacaaaacgtccggaggggggggcagatccggagtcaggttggaggatttcaattataacaatcagactatcaccgatcagatatatcgtgcaatgaattcgagcagtttcgaaggagtgtccggtcacgtggtgtttgacgcttcaggatcccgaatggcctggactttgatagaacagctgcaaggaggttcgtataaaaagattggctactacgactcaaccaaagatgatttaagttggagcaagaccgacaagtggatcgggggatccccgcccgcagaccagactctggtcatcaagacctttaggttcctttcccagaagctttttataagcgttagtgtcttgtccagcctaggaatcgtgctggccgtcgtgtgcctgagctttaacatatataacagccacgtgaggtacatccagaattctcagcctaatctgaacaaccttaccgccgtcggctgcagcttggcgctggccgctgtgtttccacttggcctggatggctatcatatcggacggaatcagttccccttcgtgtgtcaggcacgcctttggctactgggccttggattcagcctgggctatggatccatgtttaccaaaatctggtgggttcatacagtttttactaagaaggaagaaaagaaagaatggaggaaaacccttgaaccatggaagctgtacgcaaccgtcggcctgctggtggggatggacgtactaactttagcaatctggcagatcgtggatccactccataggaccatagagaccttcgccaaggaggagccgaaagaggacattgatgtgtctattctaccgcaactcgaacactgctccagcagaaaaatgaacacttggctcggcatattttatggttacaaggggctcctgctgctattggggatttttttggcctacgaaaccaagtcagtgtctactgagaagataaatgatcaccgggctgtgggtatggcaatctacaatgtggccgtactctgcctgatcacggcaccagtgaccatgattctgagtagtcagcaggacgccgctttcgcattcgcctctctggcgattgtgttctccagttacattacgctggtcgtgctttttgtgcctaagatgcggcggctgattacccgaggggaatggcagagcgaagcacaagacacgatgaaaaccggaagcagtacaaataataacgaggaagaaaagagccgattgctggaaaaagaaaaccgggaactcgagaagattattgctgagaaagaagagagggtgagcgagctgcggcaccagctacagtctaggcagcagttacgttcaagaagacatcccccaactcctccagagccgtctggtggactcccgcgaggtccacccgaaccccccgacaggttgtcttgcgatgggtccagagtccacctactgtataagtag

SEQ ID NO: 297017 - DNA, 2700 bp, Artificial Sequence
  derived and/or modified sequence
atgctgctgctgctgctgctggcccccctcttcctgcggcccccaggagctggaggagtgcagaccccaaatgccaccagcgagggctgccagatcatccaccccccctgggagggcggcatccgctaccggggcctgacccgggaccaggtgaaggccatcaacttcctgcctgtggactatgaaattgaatatgtgtgccgcggggagcgggaggtggtgggccccaaggtgaggaagtgcctggccaacggctcctggacagacatggacacccccagccgctgtgtgaacagaacaccccacagcgagaggagagctgtgtacatcggggccctcttccccatgtctgggggctggccaggcggccaggcctgccagcctgctgtggagatggccctggaggatgtgaacagccggcgggacatcctgcctgactatgagctgaagctgatccaccacgacagcaaatgtgaccccggccaggccaccaagtacctgtatgagctgctgtacaatgaccccatcaagatcatcctgatgcctggctgcagctctgtgtccaccctggtggccgaggccgccaggatgtggaacctgattgtgctgtcctatggcagcagcagccctgccctgagcaaccggcagcgcttccccaccttcttccgcacccaccccagcgccaccctgcacaaccccaccagggtgaagctgtttgagaagtggggctggaagaagatcgccaccatccagcagaccacagaggtgttcaccagcaccctggatgacctggaggagcgggtgaaggaggccggcatcgagatcaccttccggcagagcttcttcagtgaccctgctgtgcctgtgaagaacctgaagaggcaggatgcccgcatcatcgtgggcctcttctatgaaacagaggccaggaaggtgttctgtgaggtgtacaaggagcggctgtttgggaagaagtatgtgtggttcctgattggctggtatgctgacaactggttcaagatctatgaccccagcatcaactgcaccgtggatgagatgacagaggccgtggagggccacatcaccacagaaattgtgatgctgaacccagccaacaccaggagcatcagcaacatgaccagccaggagtttgtggagaagctgaccaagaggctgaagaggcaccctgaggagactggaggcttccaggaggcccccctggcctatgatgccatctgggccctggccctggccctgaacaagaccagcggcggcggcggccgctctggagtgcggctggaggacttcaactacaacaaccagaccatcacagaccagatctaccgggccatgaacagcagcagctttgagggcgtgtctggccacgtggtgtttgatgccagcggcagcaggatggcctggaccctgattgagcagctgcagggcggcagctacaagaagattggctactatgacagcaccaaggatgacctgtcctggagcaagacagacaagtggattggaggcagccccccagctgaccagaccctggtgatcaagaccttccgcttcctgagccagaagctgttcatctctgtgtctgtgctgagcagcctgggcatcgtgctggccgtggtgtgcctgtccttcaacatctacaacagccacgtgcgctacatccagaacagccagcccaacctgaacaacctgacagctgtgggctgcagcctggccctggccgctgtgttccccctgggcctggatggctaccacatcggcaggaaccagttcccctttgtgtgccaggcccggctgtggctgctgggcctgggcttcagcctgggctacggctccatgttcaccaagatctggtgggtgcacacagtgttcaccaagaaggaggagaagaaggagtggaggaagaccctggagccctggaagctgtatgccaccgtgggcctgctggtgggcatggatgtgctgaccctggccatctggcagatcgtggaccccctgcacaggaccatcgagacctttgccaaggaggagcccaaggaggacattgatgtgtccatcctgccccagctggagcactgcagcagcaggaagatgaacacctggctgggcatcttctacggctacaagggcctgctgctgctgctgggcatcttcctggcctatgagaccaagtctgtgtccacagagaagatcaatgaccacagagctgtgggcatggccatctacaacgtggccgtgctgtgcctgatcacagcccctgtgaccatgatcctgagcagccagcaggatgctgcctttgcctttgccagcctggccatcgtgttcagcagctacatcaccctggtggtgctgtttgtgcccaagatgaggaggctcatcaccagaggagagtggcagagcgaggcccaggacaccatgaagacaggcagcagcaccaacaacaatgaggaggagaagagccggctgctggagaaggagaaccgggagctggagaagatcatcgccgagaaggaggagcgggtgtctgagctgcggcaccagctgcagagccggcagcagctgcggagcagaagacacccccccaccccacctgagcccagcggcggcctgccccggggccccccagagcccccagaccggctgagctgtgatggcagccgggtgcacctgctgtacaagtag

SEQ ID NO: 297018 - DNA, 2700 bp, Artificial Sequence
  derived and/or modified sequence
atgctgctgctgctgctgctggcccccctgttcctgcggccccccggagcaggtggcgtgcagacacctaacgccaccagcgagggatgccagataatccaccccccctgggaggggggcatcagataccggggactcacgcgggaccaggtgaaagctatcaattttctacccgtggactacgagattgagtatgtttgccgaggagaaagggaagtggtcggtcccaaagtccgaaaatgtcttgcaaacgggtcttggactgacatggataccccttcacggtgcgttaatcggacccctcacagcgaacgaagagcggtgtacattggagctttgttcccgatgagtggcggttggccgggtggtcaggcgtgccaacccgccgtggaaatggctttagaagacgtgaactctcggcgagacatcctgcccgattatgagctgaagctcattcatcacgacagcaagtgtgatccgggtcaggcgacaaagtatttgtacgaactgctctataatgatcctatcaaaattattttgatgcctggatgctccagtgtttctacgctggtggccgaggcagcacgcatgtggaatttgatagtattgagttatggctcctcctcccccgccctatctaaccggcagcggtttccgacctttttccggactcatccatccgctaccctccataatccaacccgcgtgaaactatttgagaagtggggatggaaaaagattgccacgattcaacagacaacagaggtttttacgtcaaccttggatgatcttgaagaacgggtcaaggaggctggcatcgaaatcacttttcggcagtccttcttttctgaccctgccgttcctgtgaagaacctaaagcgccaggatgcccgaattattgtaggcttattttatgagactgaagcaagaaaagtgttttgcgaggtttacaaggagaggctctttggaaagaagtacgtctggtttcttatcggatggtatgccgataattggttcaagatatacgaccccagcatcaactgcaccgtggatgagatgactgaagccgttgagggccacataaccacggaaatcgtcatgctcaaccctgccaacactcgatctataagtaatatgacgtcacaagagtttgtggagaagcttacaaaaagactgaagcgccacccagaggaaacaggcggattccaagaagctcccctggcttatgatgccatttgggctttggctctggcactgaacaagacaagtggggggggaggccgctctggggttagactggaggacttcaactataataaccagacaatcactgaccagatctatcgcgcgatgaactcttctagcttcgagggggtctccgggcatgtagtattcgacgcgtccgggtcacgtatggcatggacattaattgagcagcttcaggggggctcttacaagaaaattggatattatgacagcacaaaggacgacctgtcttggagtaaaaccgataagtggatcggagggtcgcctccggcagatcaaacccttgttatcaagacctttaggtttctgtcccagaagttgttcatctccgtgtcagtcctgtccagtcttggcatagtgcttgccgtggtgtgtctctcttttaacatatacaatagccacgtgcgatatattcagaactcccagcccaatttaaacaatttgaccgccgtaggttgttctctggctctggcagccgtatttccactcggcctggacggttaccacatcggcagaaaccagtttcccttcgtttgtcaggcacgtctctggctcctaggtctcggattcagtctgggatacgggagcatgttcaccaaaatctggtgggtacacacagtgtttaccaagaaggaagagaaaaaggaatggaggaagaccctcgagccgtggaaattatacgcaaccgtgggcctcctggtgggtatggatgttttgacgctggccatatggcagattgtcgaccctctgcatcgcactattgagacattcgcaaaggaggagcctaaggaagatattgacgtgtccatccttccacagctggagcactgtagctctagaaaaatgaatacgtggcttggaatcttttacggctataaaggcctgctcctgcttctgggtatatttttagcgtacgagaccaaaagcgtatcaaccgaaaagattaatgaccatcgtgcggtgggaatggctatatataatgtggctgtcctgtgcttaatcaccgctccagtcacgatgatcctttcttcccagcaggatgccgccttcgccttcgcctctctggccattgtcttttccagctacatcacacttgttgtgctgtttgttccaaagatgaggcggctgattacccgaggcgagtggcagtctgaagcgcaggataccatgaagacaggaagttccactaacaataatgaggaagagaaatcccgactgctggagaaagagaatagggaactcgagaaaatcatagcagaaaaagaggagcgagtctcagagcttcgccaccaactgcagtctcgacagcagctgagaagtcggcgccacccccccactccccccgagccctcaggaggcttgcccaggggtcctcccgaaccccccgaccggctgagctgcgatggatcacgtgtgcatctattgtataagtag

SEQ ID NO: 297019 - DNA, 2700 bp, Artificial Sequence
  derived and/or modified sequence
atgctgctcttgcttctgttagcacccctgtttctaagacctccaggcgctggtggggtccaaacaccaaatgctacaagcgaggggtgccaaatcattcatcccccatgggagggaggaatacgctatagaggcttgacaagagaccaggtgaaagccatcaacttcctcccagtggactatgagattgaatacgtgtgcaggggcgaaagagaggttgttgggcctaaagtccgaaaatgtctggccaatggatcttggacagatatggatacgccctcccgttgcgtgaatagaacccctcactcggaacgcagggctgtatatattggagctctgttcccgatgagcggcggttggcctggagggcaggcatgccagccagcagtcgagatggcactcgaggatgttaattccaggagggacatcttaccggactacgagctgaagcttattcaccacgactcaaaatgcgatcccggacaggctactaagtacctgtatgagctcctgtataacgaccctatcaaaattatcctgatgccgggttgtagctccgtgagtaccttggtggcggaggccgctcggatgtggaacctgatcgttctgtcttatgggagctcatcacctgctctttccaatagacagaggtttccgacattttttcgcactcatcccagcgctacactacacaatcctaccagagtgaaactatttgaaaagtgggggtggaagaagattgcaacaatccaacagaccactgaggtctttacgtcaacactcgatgacctggaagagcgggtgaaggaagctggaatcgaaataacatttcggcagtccttctttagtgatcccgcagtgcctgtcaagaatttaaagagacaggacgcaagaatcattgtgggcttgttctacgaaactgaggctagaaaagtcttctgtgaggtgtacaaagagaggctgtttgggaagaagtacgtctggtttttgatcggatggtatgccgacaattggttcaaaatatatgacccgtcaattaactgtacagttgatgaaatgactgaagctgtggaagggcacataactactgaaatcgtgatgttgaatcccgcaaatactagatcaatttctaatatgacatctcaggagtttgtggagaagctgaccaaacgcctgaagaggcacccagaagagacggggggattccaggaggctcctctcgcatacgatgcgatatgggcactcgctctggcgctgaataaaacttccggtggagggggtcgttccggggtacgacttgaggacttcaactataataaccagacgattaccgatcagatctaccgagccatgaactcaagctcttttgaaggtgtgagcgggcacgtggtgtttgacgcatccggctctaggatggcctggacactgatagaacagctacaagggggtagctataagaagattggctattatgactccacaaaagacgacctgtcatggagcaaaactgataagtggattggaggatctcctccagccgatcagacattagtcattaaaacctttagatttctttcccagaaactgtttatcagtgtgtctgttttgagttctttggggatagtgcttgctgtggtgtgcctcagtttcaacatatataattcacacgtacgatacatccagaacagccaacccaatctaaataatttaaccgcagtggggtgttcactggctctcgcagcggtgtttcccctaggcctggacggatatcacatcggcaggaatcagtttccctttgtatgtcaggcccgtctctggttactagggctcggattcagtctggggtatggcagcatgttcaccaaaatctggtgggtgcatacagtgttcacgaaaaaggaggaaaaaaaagaatggcgtaagacactggaaccttggaaactgtatgccacggtaggcctgctcgtggggatggacgtactgacactcgcaatctggcagatagtcgatccactacatcgtacaattgagacattcgccaaagaagagcccaaagaagatatagatgtctctattctgccacaacttgaacactgtagtagccgaaaaatgaacacgtggctcggcatcttctatggatacaagggtctactgctcctcctggggatcttcttggcctacgaaaccaaatccgttagcaccgaaaagatcaatgatcaccgggcagtcggtatggcaatatacaacgttgctgtgctttgcctgatcacagctcctgtgactatgatcctaagcagccagcaggacgcagccttcgccttcgcttctttggccatcgtgtttagttcttacattaccttggtcgtcctgtttgtgccaaaaatgagacgacttatcacacgaggcgaatggcagagtgaagcgcaggacacaatgaaaacaggctctagcacaaataataacgaggaagagaaaagtcgcctgctcgagaaagaaaatcgggagcttgaaaagataatcgctgagaaggaagagcgagttagcgagttaaggcaccagctccagtcgcgccagcagctgagatccagaaggcaccctcccactccccctgagccatccggcggactcccccgtggcccacccgagcctcctgataggctcagctgtgacggcagcagggtccacctgctctacaagtag

SEQ ID NO: 297020 - protein, 241 aa, Artificial Sequence
  derived and/or modified sequence
  misc_feature (1)..(1): Xaa can be any naturally occurring amino acid
XPDGRLLRGHDQSAYDGKDYIALNEDLSSWTAADTAAQITQRKWEAAREAEQWRAYLEGLCVEWLRRYLENGKETLQRADPPKTHVTHHPISDHEATLRCWALGFYPAEITLTWQRDGEDQTQDTELVETRPAGDRTFQKWAAVVVPSGEEQRYTCHVQHEGLPKPLTLRWEPSSQSTIPIVGIVAGLAVLAVVVIGAVVATVMCRRKSSGHFLPTGGKGGSYSQAASSDSAQGSDVSLTA

SEQ ID NO: 297021 - protein, 246 aa, Artificial Sequence
  derived and/or modified sequence
MASVGRSEGTAGGGAGPGEPRREEGRAGLSPSSPPGSHSMRYFYTAMSRPGRGEPRFIAVGYVDDTQFVRFDSDAASPRMAPRAPWIEQEGPEYWDRETQISKTNTQTYRESLRNLRGYYNQSEAGSHTLQRMYGCDVGPDGRLLRGHDQSAYDGKDYIALNEDLSSWTAADTAAQITQRKWEAAREAEQWRAYLEGLCVEWLRRYLENGKETLQRADPPKTHVTHHPISDHEATLRCWALGFYPA

SEQ ID NO: 297022 - protein, 362 aa, Artificial Sequence
  derived and/or modified sequence
MRVTAPRTVLLLLSGALALTETWAGSHSMRYFYTAMSRPGRGEPRFIAVGYVDDTQFVRFDSDAASPRMAPRAPWIEQEGPEYWDRETQISKTNTQTYRESLRNLRGYYNQSEAGSHTLQRMYGCDVGPDGRLLRGHDQSAYDGKDYIALNEDLSSWTAADTAAQITQRKWEAAREAEQWRAYLEGLCVEWLRRYLENGKETLQRADPPKTHVTHHPISDHEATLRCWALGFYPAEITLTWQRDGEDQTQDTELVETRPAGDRTFQKWAAVVVPSGEEQRYTCHVQHEGLPKPLTLRWEPSSQSTIPIVGIVAGLAVLAVVVIGAVVATVMCRRKSSGGKGGSYSQAASSDSAQGSDVSLTA

SEQ ID NO: 297023 - DNA, 726 bp, Artificial Sequence
  derived and/or modified sequence
tgacccgacggcagactgctgagaggccacgaccagagcgcctacgacggcaaggactacatcgccctgaacgaggacctgagcagctggaccgccgccgacaccgccgcccagatcacccagagaaagtgggaggccgccagagtggccgagcagctgagagcctacctggagggcacctgcgtggagtggctgagaagacacctggagaacggcaaggagaccctgcagagagccgacccccccaagacccacgtgacccaccaccccatcagcgaccacgaggccaccctgagatgctgggccctgggcttctaccccgccgagatcaccctgacctggcagagagacggcgaggaccagacccaggacaccgagctggtggagaccagacccgccggcgacagaaccttccagaagtgggccgccgtggtggtgcccagcggcgaggagcagagatacacctgccacgtgcagcacgagggcctgcccaagcccctgaccctgagatgggagcccagcagccagagcaccatccccatcgtgggcatcgtggccggcctggccgtgctggccgtggtggtgatcggcgccgtggtggccaccgtgatgtgcagaagaaagagcagcggccacttcctgcccaccggcggcaagggcggcagctacagccaggccgccagcagcgacagcgcccagggcagcgacgtgagcctgaccgcctag

SEQ ID NO: 297024 - DNA, 726 bp, Artificial Sequence
  derived and/or modified sequence
tgacccgacggcagactgctgagaggccacgaccagagcgcctacgacggcaaggactacatcgccctgaacgaggacctgagcagctggaccgccgccgacaccgccgcccagatcacccagagaaagtgggaggccgccagagaggccgagcagtggagagcctacctggagggcctgtgcgtggagtggctgagaagatacctggagaacggcaaggagaccctgcagagagccgacccccccaagacccacgtgacccaccaccccatcagcgaccacgaggccaccctgagatgctgggccctgggcttctaccccgccgagatcaccctgacctggcagagagacggcgaggaccagacccaggacaccgagctggtggagaccagacccgccggcgacagaaccttccagaagtgggccgccgtggtggtgcccagcggcgaggagcagagatacacctgccacgtgcagcacgagggcctgcccaagcccctgaccctgagatgggagcccagcagccagagcaccatccccatcgtgggcatcgtggccggcctggccgtgctggccgtggtggtgatcggcgccgtggtggccaccgtgatgtgcagaagaaagagcagcggccacttcctgcccaccggcggcaagggcggcagctacagccaggccgccagcagcgacagcgcccagggcagcgacgtgagcctgaccgcctag

SEQ ID NO: 297025 - DNA, 726 bp, Artificial Sequence
  derived and/or modified sequence
tgaccggacggaagattgctgcggggccacgatcagtctgcatacgatgggaaggattacattgcgttaaatgaggacctgagcagttggactgctgccgatactgcggcacagattacccagagaaagtgggaagccgcaagagtagccgaacagttgagagcatacctggagggaacatgtgtagagtggctcaggcgccaccttgaaaacggcaaggagaccctccaaagggccgatcccccaaagacgcacgtcacccaccaccccatttcagatcacgaagccacactcagatgctgggccctgggattttaccctgccgaaattactctgacctggcagcgggacggggaggatcagacgcaggataccgaactggtggaaacaaggcccgcgggcgatcgaacattccagaagtgggccgcggtagtggtgccatcgggcgaagagcagaggtacacatgtcacgtgcagcatgagggtctgcctaagcctttgacactgaggtgggagccttcttcacagtcaaccatcccaatcgttgggattgtcgctggcctggccgtgcttgccgtcgtggtgattggcgccgttgtagccacagtgatgtgccgtagaaaatcttccggccatttcctgcctacaggaggaaagggcggttcatactcacaggctgcttcaagcgattctgcccaaggtagtgatgtgtctttgaccgcctag

SEQ ID NO: 297026 - DNA, 726 bp, Artificial Sequence
  derived and/or modified sequence
tgaccagatggtagattactgaggggccacgatcagtcggcttacgacgggaaggattatatagcgttgaatgaggacctgtcctcctggacagctgcagacacggccgctcaaataacacagcgtaagtgggaggccgccagagaggccgagcagtggagggcatacctggagggtctgtgcgtggagtggttacgccggtacctcgaaaatggaaaagaaacccttcagagggctgatccaccaaaaactcacgttacccatcatccaatcagcgatcacgaggccacactgaggtgctgggccctgggcttctatccggcagagataacactaacctggcagcgcgacggggaggaccagacgcaagacaccgagctggttgaaacgcggcccgccggcgatcgcacgtttcagaagtgggctgctgttgtggtgcccagcggggaagagcagcgatatacctgtcacgtgcaacacgaaggactaccaaagcccctgacccttcgttgggaaccaagtagtcagagtactatacccatcgtaggaatcgtggccggccttgcggttttggcggtagtggttatcggggcggttgttgcgacagttatgtgcaggcggaagagctcaggccactttctgcccactggtggcaagggaggaagttactcccaggccgctagctcagactcagcacaaggttccgatgtgagcttgaccgcatag

SEQ ID NO: 297027 - DNA, 1154 bp, Artificial Sequence
  derived and/or modified sequence
ggccggacgggcgcctcctccgcgggcatgaccagtccgcctacgacggcaaggattacatcgccctgaacgaggacctgagctcctggaccgcggcggacaccgcggctcagatcacccagcgcaagtgggaggcggcccgtgtggcggagcagctgagagcctacctggagggcacgtgcgtggagtggctccgcagacacctggagaacgggaaggagacgctgcagcgcgcggaccccccaaagacacatgtgacccaccaccccatctctgaccatgaggccaccctgaggtgctgggccctgggcttctaccctgcggagatcacactgacctggcagcgggatggcgaggaccaaactcaggacaccgagcttgtggagaccagaccagcaggagatagaaccttccagaagtgggcagctgtggtggtgccttctggagaagagcagagatacacatgccatgtacagcatgaggggctgccgaagcccctcaccctgagatgggagccatcttcccagtccaccatccccatcgtgggcattgttgctggcctggctgtcctagcagttgtggtcatcggagctgtggtcgctactgtgatgtgtaggaggaagagctcaggacattttcttcccacaggtggaaaaggagggagctactctcaggctgcgtccagcgacagtgcccagggctctgatgtgtctctcacagcttgaaaagcctgagacagctgtcttgtgagggaccgagatgcaggatttcttcacgcctcccctttgtgacttcaagagcctctggcatctctttctgcaaaggcacctgaatgtgtctgcgtccctgttagcataatgtgaggaggtggagagacagctcacccccgtgtccaccgtgacccctgttcccatgctgacctgtgtttcctccccagtcatctttcttgttccagagaggtggggctggatgtctccatctctgtctcaactttatgtgcactgagctgcaacttcttacttccctactgaaaataagaatctgaatataaatttgttttctcaaatatttgctatgagaggttgatggattaattaaataagtcaattcctggaatttgagagagcaaataaagacctgagaaccttccagaa

SEQ ID NO: 297028 - DNA, 1154 bp, Artificial Sequence
  derived and/or modified sequence
ggccggacgggcgcctcctccgcgggcatgaccagtccgcctacgacggcaaggattacatcgccctgaacgaggacctgagctcctggaccgcggcggacacggcggctcagatcacccagcgcaagtgggaggcggcccgtgaggcggagcagtggagagcctacctggagggcctgtgcgtggagtggctccgcagatacctggagaacgggaaggagacgctgcagcgcgcggaccccccaaagacacatgtgacccaccaccccatctctgaccatgaggccaccctgaggtgctgggccctgggcttctaccctgcggagatcacactgacctggcagcgggatggcgaggaccaaactcaggacaccgagcttgtggagaccagaccagcaggagatagaaccttccagaagtgggcagctgtggtggtgccttctggagaagagcagagatacacatgccatgtacagcatgaggggctgccgaagcccctcaccctgagatgggagccatcttcccagtccaccatccccatcgtgggcattgttgctggcctggctgtcctagcagttgtggtcatcggagctgtggtcgctactgtgatgtgtaggaggaagagctcaggacattttcttcccacaggtggaaaaggagggagctactctcaggctgcgtccagcgacagtgcccagggctctgatgtgtctctcacagcttgaaaagcctgagacagctgtcttgtgagggaccgagatgcaggatttcttcacgcctcccctttgtgacttcaagagcctctggcatctctttctgcaaaggcacctgaatgtgtctgcgtccctgttagcataatgtgaggaggtggagagacagcccacccttgtgtccactgtgacccctgttcccatgctgatctgtgtttcctccccagtcatctttcttgttccagagaggtggggctggatgtctccatctctgtctcaactttatgtgcactgagctgcaacttcttacttccctactgaaaataagaatctgaatataaatttgttttctcaaatatttgctatgagaggttgatggattaattaaataagtcaattcctggaatttgaaagagcaaataaagacctgagaaccttccagaa

SEQ ID NO: 297029 - DNA, 864 bp, Artificial Sequence
  derived and/or modified sequence
cccggactcaaaatctcctcagacgccgagatgcgggtcacggcgccccgaaccgtcctcctgctgctctcgggagccctggccctgaccgagacctgggccggtgagtgcggggtcggcagggaaatggcctctgtggggaggagcgaggggaccgcaggcgggggcgcaggacccggggagccgcgccgggaggagggtcgggcgggtctcagcccctcctcgcccccaggctcccactccatgaggtatttctacaccgccatgtcccggcccggccgcggggagccccgcttcatcgcagtgggctacgtggacgacacccagttcgtgaggttcgacagcgacgccgcgagtccgaggatggcgccccgggcgccatggatagagcaggaggggccggagtattgggaccgggagacacagatctccaagaccaacacacagacttaccgagagagcctgcggaacctgcgcggctactacaaccagagcgaggccgggtctcacaccctccagaggatgtacggctgcgacgtggggccggacgggcgcctcctccgcgggcatgaccagtccgcctacgacggcaaggattacatcgccctgaacgaggacctgagctcctggaccgcggcggacacggcggctcagatcacccagcgcaagtgggaggcggcccgtgaggcggagcagtggagagcctacctggagggcctgtgcgtggagtggctccgcagatacctggagaacgggaaggagacgctgcagcgcgcggaccccccaaagacacatgtgacccaccaccccatctctgaccatgaggccaccctgaggtgctgggccctgggcttctaccctgcg

SEQ ID NO: 297030 - DNA, 1008 bp, Artificial Sequence
  derived and/or modified sequence
agatgcgggtcacggcgccccgaaccgtcctcctgctgctctcgggagccctggccctgaccgagacctgggccggctcccactccatgaggtatttctacaccgccatgtcccggcccggccgcggggagccccgcttcatcgcagtgggctacgtggacgacacccagttcgtgaggttcgacagcgacgccgcgagtccgaggatggcgccccgggcgccatggatagagcaggaggggccggagtattgggaccgggagacacagatctccaagaccaacacacagacttaccgagagagcctgcggaacctgcgcggctactacaaccagagcgaggccgggtctcacaccctccagaggatgtacggctgcgacgtggggccggacgggcgcctcctccgcgggcatgaccagtccgcctacgacggcaaggattacatcgccctgaacgaggacctgagctcctggaccgcggcggacacggcggctcagatcacccagcgcaagtgggaggcggcccgtgaggcggagcagtggagagcctacctggagggcctgtgcgtggagtggctccgcagatacctggagaacgggaaggagacgctgcagcgcgcggatcaggagcagaagtccctgttccccgctcagagactcgaactttccaatgaataggagattatcccagaccccccaaagacacatgtgacccaccaccccatctctgaccatgaggccaccctgaggtgctgggccctgggcttctaccctgcggagatcacactgacctggcagcgggatggcgaggaccaaactcaggacaccgagcttgtggagaccagaccagcaggagatagaaccttccagaagtgggcagctgtggtggtgccttctggagaagagcagagatacacatgccatgtacagcatgaggggctgccgaagcccctcaccctgagatgggagccatcttcccagtccaccatccccatcgtgggcattgttg

SEQ ID NO: 297031 - DNA, 726 bp, Artificial Sequence
  derived and/or modified sequence
tgaccagatggccgcctgctgcggggccatgaccagagcgcctatgatggcaaggactacatcgccctgaatgaagacctgagctcctggacagctgctgacacagctgcccagatcacccagaggaagtgggaggccgcccgggtggccgagcagctgcgggcctacctggagggcacctgtgtggagtggctgcggcggcacctggagaatggcaaggagaccctgcagagagctgacccccccaagacccacgtgacccaccaccccatcagtgaccacgaggccaccctgcgctgctgggccctgggcttctacccagctgagatcaccctgacctggcagagagatggagaggaccagacccaggacacagagctggtggagaccaggcctgctggggacaggaccttccagaagtgggccgctgtggtggtgcccagcggggaggagcagcgctacacctgccacgtgcagcacgagggcctgcccaagcccctgaccctgcgctgggagcccagcagccagagcaccatccccatcgtgggcatcgtggccggcctggccgtgctggccgtggtggtgattggagctgtggtggccaccgtgatgtgcaggaggaagagcagcggccacttcctgcccaccggcggcaaaggaggcagctacagccaggccgccagcagtgacagcgcccagggcagtgatgtgtccctgacagcctag

SEQ ID NO: 297032 - DNA, 726 bp, Artificial Sequence
  derived and/or modified sequence
tgaccagatggccgcctgctgcggggccatgaccagagcgcctatgatggcaaggactacatcgccctgaatgaagacctgagctcctggacagctgctgacacagctgcccagatcacccagaggaagtgggaggccgcccgggaggccgagcagtggagggcctacctggagggcctgtgtgtggagtggctgcggcgctacctggagaatggcaaggagaccctgcagagagctgacccccccaagacccacgtgacccaccaccccatcagtgaccacgaggccaccctgcgctgctgggccctgggcttctacccagctgagatcaccctgacctggcagagagatggagaggaccagacccaggacacagagctggtggagaccaggcctgctggggacaggaccttccagaagtgggccgctgtggtggtgcccagcggggaggagcagcgctacacctgccacgtgcagcacgagggcctgcccaagcccctgaccctgcgctgggagcccagcagccagagcaccatccccatcgtgggcatcgtggccggcctggccgtgctggccgtggtggtgattggagctgtggtggccaccgtgatgtgcaggaggaagagcagcggccacttcctgcccaccggcggcaaaggaggcagctacagccaggccgccagcagtgacagcgcccagggcagtgatgtgtccctgacagcctag

SEQ ID NO: 297033 - DNA, 726 bp, Artificial Sequence
  derived and/or modified sequence
tgacccgacggccggctgctgcggggccacgaccagagcgcctacgatggcaaagattacattgccttgaacgaggatctgtctagttggaccgcagcagatactgccgcccaaataacgcagagaaagtgggaggcagctcgcgtcgcagagcaactgcgggcttaccttgagggaacctgtgtggaatggctgaggaggcatttggagaacggcaaggaaactctgcagcgggccgatccacctaaaacccacgtcacgcaccacccaatctctgaccatgaggcaaccctccgatgctgggccttgggcttctacccggccgagataactctgacctggcagcgcgacggggaggatcagacccaagacacggaactggtggagacccgaccagctggggacagaacatttcagaagtgggccgctgtggttgtcccatcaggtgaggagcaacgctacacatgccacgttcaacacgagggattgcctaaaccattgacgttacgctgggagcccagttcacagagcaccatccccatagttggcattgttgccggactcgcagtgttggccgtggtcgtgatcggagccgtcgtagcaaccgtgatgtgtcgcaggaagagttccggacattttctgcccacaggaggtaaaggggggagttacagccaagcagcatccagcgattcagctcaaggcagtgacgtatccctgaccgcatag

SEQ ID NO: 297034 - DNA, 726 bp, Artificial Sequence
  derived and/or modified sequence
tgacccgacggccggctgctgcggggccacgaccagagcgcctacgatggaaaggactacattgccctgaatgaggacctgtctagctggactgctgccgacacagcagcccagattacacagcgcaagtgggaagcagcgcgtgaggccgagcagtggcgggcctacctggaggggctgtgtgttgagtggcttagacgttatctggaaaatggtaaggaaacactacagagggctgaccctccaaaaactcacgtcacacatcatccaattagtgaccatgaggcaaccttgcgctgttgggcgctgggtttttaccccgccgagattacacttacctggcagcgggacggtgaagaccagacccaggatacagaactggtcgaaactcggccagccggtgacagaacatttcagaagtgggccgccgtcgtggttccttccggggaggaacaaaggtacacctgccacgttcagcacgaaggacttccaaagccacttacattgcgttgggagccatcttcacagagcaccattcccatagtgggtatcgtagccggcctcgctgttttggcagtagttgtcattggagcagttgtagccacagtgatgtgtcgccggaagtctagtggccacttcctcccgacggggggcaaaggcggttcctattcccaggcagcaagcagcgacagtgcacagggtagcgatgttagcctgactgcttag

SEQ ID NO: 297035 - DNA, 726 bp, Artificial Sequence
  derived and/or modified sequence
tagccagatgggcgactgctaaggggccatgatcaaagcgcatacgatggaaaagactacatcgccctcaatgaagatctttcctcctggacggcagcggacaccgccgcacaaatcacgcagcggaagtgggaagcggcacgggtggctgagcaactccgcgcatacctggaagggacttgcgttgagtggttgcgcaggcacctcgaaaacgggaaggaaaccttgcaacgtgcagacccaccaaagacacatgtcacacatcatcctattagcgaccacgaggctacgctgcggtgctgggcgctcggtttctatccagcagagatcaccttgacttggcagcgtgatggcgaggaccaaacgcaggacactgaactagtggagacgagacctgctggtgatcgcaccttccagaaatgggctgccgtggtcgtgccttccggagaggaacagcgctatacatgccatgtccagcacgagggcctaccaaagccgctcacactgaggtgggaacccagcagccaaagtaccattccgatcgtgggtatagtagctggcctggccgtgctggctgtcgtggtaattggtgccgtggtcgctaccgttatgtgcagaaggaagagctctgggcactttttgcctactggcggtaaaggtgggagttactctcaagccgctagctctgatagcgctcaggggtccgatgtgtctctgacagcttag

SEQ ID NO: 297036 - DNA, 726 bp, Artificial Sequence
  derived and/or modified sequence
tagcccgatgggagactgctgcggggacatgaccagagcgcatatgacggaaaggattacattgcacttaatgaggatctttcgtcatggaccgccgctgacaccgccgcacagatcacccagagaaaatgggaagccgctagagaggcggagcagtggagagcttaccttgaagggctgtgcgtcgagtggctccggaggtacctcgagaatgggaaagagacattgcaacgtgctgacccgccaaaaactcacgtcacccatcatccgatttctgaccacgaggctactctgcggtgttgggctctggggttctaccccgctgaaattaccttaacttggcaacgggatggggaggaccagacccaggatactgaattggtagaaaccaggcccgctggtgatcgtacattccagaagtgggccgcagtggtagttccttccggtgaagaacagcggtacacctgtcacgtgcagcacgaggggctccccaaacccctgaccctgaggtgggaacccagtagccaaagcactatccctatcgtgggtatagtggccggactggcagtgctggctgtcgtcgttatcggagccgtcgtagccacggttatgtgcagacgcaagtctagtggccattttttgcctactggagggaagggtggcagttactcacaagctgcctcatcagactcagcccaggggtctgacgtatctttgaccgcctag

SEQ ID NO: 297037 - protein, 743 aa, Artificial Sequence [sequence omitted]

SEQ ID NO: 297038 - protein, 1162 aa, Artificial Sequence [sequence omitted]

SEQ ID NO: 297039 - protein, 194 aa, Artificial Sequence [sequence omitted]

SEQ ID NO: 297040 - protein, 139 aa, Artificial Sequence
  derived and/or modified sequence
MPVARSWVCRKTYVTPRRPFEKSRLDQELKLIGEYGLRNKREVWRVKFTLAKIRKAARELLTLDEKDPRRLFEGNALLRRLVRIGVLDEGKMKLDYILGLKIEDFLERRLQTQVFKLGLAKSIHHARVLIRQRHISPRR

SEQ ID NO: 297041 - protein, 156 aa, Artificial Sequence
  derived and/or modified sequence
MPVARSWVCRKTYVTPRRPFEKSRLDQELKLIGEYGLRNKREVWRVKFTLAKIRKAARELLTLDEKDPRRLFEGNALLRRLVRIGVLDEGKMKLDYILGLKIEDFLERRLQTQVFKLGLAKSIHHARVLIRQRHIRYHLGWAPESSSTCPSDGCPH

SEQ ID NO: 297042 - DNA, 585 bp, Artificial Sequence
  derived and/or modified sequence
atgcccgtggccagaagctgggtgtgcagaaagacctacgtgacccccagaagacccttcgagaagagcagactggaccaggagctgaagctgatcggcgagtacggcctgagaaacaagagagaggtgtggagagtgaagttcaccctggccaagatcagaaaggccgccagagagctgctgaccctggacgagaaggaccccagaagactgttcgagggcaacgccctgctgagaagactggtgagaatcggcgtgctggacgagggcaagatgaagctggactacatcctgggcctgaagatcgaggacttcctggagagaagactgcagacccaggtgttcaagctgggcctggccaagagcatccaccacgccagagtgctgatcagacagagacacatcagagtgagaaagcaggtggtgaacatccccagcttcatcgtgagactggacagccagaagcacatcgacttcagcctgagaagcccctacggcggcggcagacccggcagagtgaagagaaagaacgccaagaagggccagggcggcgccggcgccggcgacgacgaggaggaggactag

SEQ ID NO: 297043 - DNA, 585 bp, Artificial Sequence
  derived and/or modified sequence
atgccggtcgcaagatcctgggtgtgccgcaagacatatgtaacccccaggcgcccgttcgagaaatccagactcgatcaggagctgaagcttatcggtgaatacggactgcgaaataagagagaagtgtggcgcgtaaagtttactctggccaagatccgaaaagccgccagggaattgctgactctcgatgaaaaggaccctagacggctgttcgaaggtaatgcactgctacgacggctggttcgaatcggagtccttgatgagggaaagatgaagcttgactacattttaggactgaaaatcgaggatttcctcgagagacggcttcaaacccaggtttttaagctgggactcgccaagtcaatccatcacgccagagtgctaattcgacagcggcatattcgcgtacggaaacaggtggtgaacatccccagctttatcgtgcggttggattcccagaagcacatagacttttctctccgcagtccatatggtggaggtcgtcctggtcgtgtgaaaaggaaaaatgcgaaaaaggggcaaggtggggccggggccggcgatgatgaggaggaggattag

SEQ ID NO: 297044 - DNA, 585 bp, Artificial Sequence
  derived and/or modified sequence
atgcctgtggcccgctcctgggtgtgcaggaagacctacgtgaccccaagaagaccatttgagaagagccggctggaccaggagctgaagctgattggagaatatggcctgaggaacaagcgggaggtgtggagggtgaagttcaccctggccaagatcaggaaggccgcccgggagctgctgaccctggatgagaaggacccccggcggctgtttgagggcaatgccctgctgcggcggctggtgcgcatcggcgtgctggatgagggcaagatgaagctggactacatcctgggcctgaagattgaggacttcctggagcggcggctgcagacccaggtgttcaagctgggcctggccaagagcatccaccacgcccgggtgctgatccggcagaggcacatccgggtgaggaagcaggtggtgaacatccccagcttcatcgtgcggctggacagccagaagcacatcgacttcagcctgcggagcccctatggaggcggccggcccggccgggtgaagaggaagaatgccaagaagggccagggcggggccggggctggagatgatgaggaggaggactag

SEQ ID NO: 297045 - DNA, 585 bp, Artificial Sequence
  derived and/or modified sequence
atgcccgtggcccggagctgggtgtgccggaagacctacgtgaccccgagacggccctttgaaaagagccgcctggaccaggagttgaaactgatcggtgagtacgggcttcggaataagagggaagtgtggcgggtgaagtttactcttgccaagatccggaaggctgcgagggaactgctgactctcgatgagaaagacccgagacggttgttcgaaggaaatgcactgttgcggaggcttgtgaggatcggtgtgctggacgagggtaaaatgaagttagactacatccttggattgaaaatagaagatttcctggaacggagactacagacgcaggtgttcaagctagggctggccaagagtatccatcatgcaagggtactgatccggcagcgtcacataagagtgcgcaagcaagtggtcaatatccccagcttcatcgtgcggttggattcacagaagcacatcgacttttctctgcggagtccctacggtggagggaggccaggaagggttaagagaaagaacgccaagaaaggccagggaggagccggtgcgggggatgacgaggaagaagattag

SEQ ID NO: 297046 - DNA, 585 bp, Artificial Sequence
  derived and/or modified sequence
atgccagttgctcgatcctgggtttgtagaaaaacttacgtgacaccgagacgccctttcgagaagtcaaggctggatcaggagctgaaactgataggcgagtacggcctccggaacaagcgcgaagtatggagagtcaaattcaccctggccaagattagaaaggccgcaagagagctgctgacactggacgagaaagatccgcgtcggctgtttgagggcaatgctcttctgaggcgcctcgtcagaattggcgtgctggacgaaggcaaaatgaaactagactatatccttgggctcaagattgaagacttcctggaacgaaggctgcaaacccaggttttcaaactgggcctcgccaaatccatacatcatgcaagggtactgatccgacagcgccacatcagggtgcggaagcaggttgtcaacattcccagcttcatcgtgagattggattctcagaaacatatcgacttctccttgcgttcaccatacggcggtggccgtcccggacgcgttaagcggaaaaatgccaaaaaaggccagggcggagcgggagccggtgacgatgaggaagaggactag

SEQ ID NO: 297047 - DNA, 829 bp, Artificial Sequence
  derived and/or modified sequence
tccactgcttctcagccagccaacgcctcttctgattggctctgacgtgcgtggtgcgtgaaaacgtcacgagacgccggcgttactataagagcgcagccgtggcgcttgcgcgcctctttctcagtgaccgggtggtttgcttaggcgcagacggggaagcggagccaacatgccagtggcccggagctgggtttgtcgcaaaacttatgtgaccccgcggagacccttcgagaaatctcgtctcgaccaagagctgaagctgatcggcgagtatgggctccggaacaaacgtgaggtctggagggtcaaatttaccctggccaagatccgcaaggccgcccgggaactgctgacgcttgatgagaaggacccacggcgtctgttcgaaggcaacgccctgctgcggcggctggtccgcattggggtgctggatgagggcaagatgaagctggattacatcctgggcctgaagatagaggatttcttagagagacgcctgcagacccaggtcttcaagctgggcttggccaagtccatccaccacgctcgcgtgctgatccgccagcgccatatcagggtccgcaagcaggtggtgaacatcccgtccttcattgtccgcctggattcccagaagcacatcgacttctctctgcgctctccctacgggggtggccgcccgggccgcgtgaagaggaagaatgccaagaagggccagggtggggctggggctggagacgacgaggaggaggattaagtccacctgtccctcctgggctgctggattgtctcgttttcctgccaaataaacaggatcagcgctttacaa

SEQ ID NO: 297048 - DNA, 585 bp, Artificial Sequence
  derived and/or modified sequence
atgcctgtggccagatcttgggtctgcaggaagacatacgtcaccccccgtcggccattcgagaaatccaggttagaccaggaactaaaattaatcggagagtatggcctgcgtaataaacgggaggtatggagagtgaaattcacactggctaaaatacgtaaggccgcacgggagctgctcactctggacgagaaggatccacgaagactctttgagggaaatgccctactcagacgtttggtccggatcggagtcctggacgaaggcaagatgaaactggactatatcctcgggctgaaaatcgaggattttctggagcggcgcctgcagacccaggtgttcaaactaggtttggctaagtccatccaccacgccagggtcctgattagacagcgacatattcgagtcagaaagcaggtggtgaacatccctagttttattgtgaggttggattcacaaaagcatatcgacttctctttgcgttctccctatggcggtggccggccaggcagggttaaaagaaagaatgcaaaaaagggccagggcggagcaggggccggcgacgatgaagaggaagactag

SEQ ID NO: 297049 - DNA, 585 bp, Artificial Sequence
  derived and/or modified sequence
atgccggtggctcgttcatgggtgtgccggaaaacctacgtgactccaaggaggccttttgaaaaaagccggctggaccaggagctcaagctgattggagaatatggcctgcggaacaagagagaggtttggcgagtgaaatttactctggcaaaaatccgcaaagcggcccgagagctcctgaccctagacgaaaaggatccaaggcgccttttcgaaggtaatgctcttctccgacgactcgtgaggataggcgtgttagatgagggaaaaatgaaacttgattacatcctcggactgaagattgaggatttcttggagcggagacttcagacccaggtgtttaagctagggctagccaaaagtatacatcacgcaagagttctgatccgacagcggcacattagggtacgtaagcaggtcgtcaacatcccttcgttcattgtccggctagactctcagaagcatatcgacttcagtctgaggtccccatacggaggcgggcgtccaggaagggtgaagcgcaagaatgccaaaaagggccagggtggtgctggagccggcgacgacgaagaggaagactag

SEQ ID NO: 297050 - DNA, 585 bp, Artificial Sequence
  derived and/or modified sequence
atgcctgtggccagatcatgggtatgccgaaaaacctatgtgacacctaggagacctttcgagaaatcacggctcgatcaggagctgaagcttattggggagtatggactgagaaacaaaagagaggtttggcgtgtcaagttcacattagcaaagatccgaaaagctgcgcgcgagctactgaccctggatgagaaagacccacgacgtttgttcgagggaaacgctctcctgagacgacttgttcgcattggagtactggatgaagggaaaatgaaattagactacatactcgggctgaagatagaagattttctcgagagacgcttgcagactcaggtcttcaagttaggattggctaaatcaattcatcacgcccgagtccttatcaggcagcgacacattcgggtccgcaagcaagtggtgaatataccgtctttcatcgtgcggttggatagccaaaagcacatcgacttcagtttgagatccccgtatggcggagggcgacctggtcgggtcaagcgcaaaaacgcaaagaaaggccagggcggcgctggcgctggcgacgacgaagaggaggattag

SEQ ID NO: 297051 - DNA, 420 bp, Artificial Sequence
  derived and/or modified sequence
atgccggtcgcccggtcctgggtgtgtaggaaaacctatgtgacccctcgcaggcctttcgagaaatcccgcctcgatcaggaattgaaactgattggagaatacggcctccggaataaaagagaagtttggcgggttaaattcaccctggcgaaaatcaggaaagccgctcgagagctcctaacattggacgaaaaagatcctcgccggctttttgaagggaacgccctcctgcggagactcgtgcgtattggagttctcgacgagggaaagatgaaactagactacattctcggattgaaaatcgaggattttctcgaacggcgcttacagacacaggtctttaagctcggccttgccaaaagtattcatcacgcccgtgtgctgattcgccagcgacacatcagtccgagacgctag

SEQ ID NO: 297052 - DNA, 420 bp, Artificial Sequence
  derived and/or modified sequence
atgcctgtggcccggtcctgggtctgtcgaaagacatatgtgactccgagaaggccatttgagaaatctcgtctggaccaagagcttaaactcatcggagagtacggattaaggaataaacgcgaagtgtggcgagtcaagtttacattagctaagatccgaaaagccgcgagagaactcttgaccttggacgaaaaggaccctcggcgcctgtttgagggaaatgccctgttgcgtcggttagtgaggatcggggttctcgatgaggggaaaatgaagttagattacatattggggcttaagattgaagatttcctcgaacgtcgcctacagacccaagtctttaagctgggacttgctaagagcattcaccacgcccgcgtgctcatcaggcaacggcatatcagccctcggagatag

SEQ ID NO: 297053 - DNA, 471 bp, Artificial Sequence
  derived and/or modified sequence
atgcccgtcgctcggtcttgggtgtgtcggaagacttatgttacacctagaagacccttcgagaagtctagattggaccaggagctgaaattgatcggagaatacggactgcggaacaagagagaggtctggagagttaagtttactctggctaaaatcagaaaggccgctcgagagctccttacgctggatgagaaggatccacgacgactatttgagggaaatgcactactccgacggctcgtccgtatcggggttctcgatgagggtaagatgaaactcgattatatcttaggtttaaaaattgaagattttctggagagaagactgcaaacacaggtgtttaagctgggactcgccaagagcattcaccacgccagggtcttaatcaggcagcgtcatatacgttaccacctgggctgggccccagagagtagcagcacctgtccatctgatgggtgcccacactag

SEQ ID NO: 297054 - DNA, 420 bp, Artificial Sequence
  derived and/or modified sequence
atgccggtggcccggtcttgggtctgtaggaaaacatacgtgacgccacgtcgtccattcgaaaagtccaggcttgatcaagagcttaaactcatcggtgagtatggcttgagaaataagagggaggtgtggcgggtgaagtttaccttggctaagatccgtaaagccgccagggaactcctcacccttgatgaaaaagatcctaggcgactgttcgaaggcaacgctcttttgagacgtttagtcaggattggtgtgcttgatgaggggaagatgaaactcgactacatcctgggactgaagatcgaggacttcctagaaagaagactgcagactcaggtgtttaaactaggacttgctaaatccatacaccatgccagagtccttataagacagaggcatatcagtcccaggcgatag

SEQ ID NO: 297055 - DNA, 420 bp, Artificial Sequence
  derived and/or modified sequence
atgcctgtggcccgctcctgggtgtgcaggaagacctacgtgaccccaagaagaccatttgagaagagccggctggaccaggagctgaagctgattggagaatatggcctgaggaacaagcgggaggtgtggagggtgaagttcaccctggccaagatcaggaaggccgcccgggagctgctgaccctggatgagaaggacccccggcggctgtttgagggcaatgccctgctgcggcggctggtgcgcatcggcgtgctggatgagggcaagatgaagctggactacatcctgggcctgaagattgaggacttcctggagcggcggctgcagacccaggtgttcaagctgggcctggccaagagcatccaccacgcccgggtgctgatccggcagaggcacatcagccccaggaggtag

SEQ ID NO: 297056 - DNA, 471 bp, Artificial Sequence
  derived and/or modified sequence
atgcctgtggcccgctcctgggtgtgcaggaagacctacgtgaccccaagaagaccatttgagaagagccggctggaccaggagctgaagctgattggagaatatggcctgaggaacaagcgggaggtgtggagggtgaagttcaccctggccaagatcaggaaggccgcccgggagctgctgaccctggatgagaaggacccccggcggctgtttgagggcaatgccctgctgcggcggctggtgcgcatcggcgtgctggatgagggcaagatgaagctggactacatcctgggcctgaagattgaggacttcctggagcggcggctgcagacccaggtgttcaagctgggcctggccaagagcatccaccacgcccgggtgctgatccggcagaggcacatccgctaccacctgggctgggcccctgagagcagcagcacctgccccagtgatggctgcccccactag

SEQ ID NO: 297057 - DNA, 585 bp, Artificial Sequence
  derived and/or modified sequence
atgcccgtggcccggagctgggtgtgccggaagacctacgtgaccccacgccggccttttgagaagtccagactggaccaggaattaaagctcattggggaatatggactcaggaataaaagggaggtgtggcgggtgaagtttactcttgccaagattcggaaggcagcgcgggagctgctgactctagacgaaaaagaccctcgcaggctattcgagggtaatgcgctcctccgcaggctggtccgtatcggagtattagatgagggcaagatgaaactcgattatatattgggactcaaaatcgaggatttcctagagcgccgcctgcaaacacaggtgttcaaactcggactggccaagtccattcaccacgctagggtactcatccgtcagcgacatatcagggtgaggaaacaggtggtgaacatcccttcattcatagtccggcttgactcacagaagcacatcgatttttcgctccggtccccgtatgggggtggcaggcctggtagggtgaagcgaaaaaatgccaagaaaggacagggaggcgccggggctggagatgatgaggaggaagactag

SEQ ID NO: 297058 - DNA, 585 bp, Artificial Sequence
  derived and/or modified sequence
atgcccgtggcccggagctgggtgtgccggaagacctacgtgaccccacgacggccctttgagaagtcccgactggatcaggaattgaaactcataggtgagtatggcctgagaaacaagagggaggtctggagagtcaaattcacattggctaaaattcgcaaagcagcccgcgagttactgaccctggacgagaaagatcctcggcgcctgttcgagggaaatgcactcctgcgcagactggtgcggatcggagttctagatgaaggcaagatgaagctcgattacatcctcggcctcaagatcgaggactttttagagcggcgtctccaaacccaggtcttcaagctcggacttgctaaaagcatccatcatgcaagggtgctgatacgtcagagacacatcagagtgcgcaagcaagtcgtaaacatacccagtttcatagtccgcctcgactcgcagaagcatatcgattttagcttgaggtccccctacggaggaggcagaccgggaagagtcaagcggaaaaatgcgaagaagggtcagggaggagcaggcgccggtgatgacgaagaggaagactag

SEQ ID NO: 297059 - DNA, 585 bp, Artificial Sequence
  derived and/or modified sequence
atgcccgtggcccggagctgggtgtgccggaagacctacgtgaccccaagacgaccctttgaaaaatcacgcctggatcaggagcttaaactcatcggggaatacggtctccggaataagagggaagtttggagggtgaaattcacacttgctaaaatcagaaaagctgccagggaactactgaccctggatgagaaggatccccgccggctcttcgagggaaacgcactgttgagacgccttgtgcgaattggcgtcctggacgagggaaagatgaaacttgactacatcctaggcttgaagattgaggatttccttgaacggcgcctccagacccaggtattcaagctaggccttgcaaaatccattcatcatgctagagtcctgatacgccagcgacacataagagtacggaagcaggttgtcaacataccctcctttatcgtcagactggacagccagaagcacattgacttttctctccgctcaccctacggcgggggcagacctggtagggtgaagagaaaaaacgccaagaagggacaaggcggtgcaggggccggagacgacgaggaggaggattag

SEQ ID NO: 297060 - DNA, 420 bp, Artificial Sequence
  derived and/or modified sequence
atgcccgtggcccggagctgggtgtgccggaagacctacgtgacccctagacgaccctttgaaaagtctagactcgaccaggaactcaagctcattggggagtacgggctgaggaataagagagaggtttggcgcgttaaatttaccctggccaaaatcaggaaagccgctagggaacttctaacgttagacgagaaagatccacggcggctatttgaagggaatgccctcctgaggcgtcttgtgcggattggcgtccttgacgaggggaaaatgaaactggattacatactaggtctcaaaattgaagatttcctggaacggaggctgcagacacaggtgtttaagcttggtctggcaaagtccatacaccacgctagagttctcatccggcagcgacatattagccctcggagatag

SEQ ID NO: 297061 - DNA, 420 bp, Artificial Sequence
  derived and/or modified sequence
atgcccgtggcccggagctgggtgtgccggaagacctacgtgaccccacgtcgcccgttcgagaagtctagattggatcaggagctgaaactgatcggtgagtacgggttgagaaacaagagagaggtgtggcgcgtgaagtttaccctggcaaaaatcaggaaggctgccagggaattgctcacattagatgagaaggatccgaggaggctatttgaaggtaatgcactgctgaggagactcgttagaatcggagtgttagacgaaggcaagatgaaacttgactatattctggggcttaagatagaggattttcttgagcgacggttgcagacgcaagttttcaaactgggattggccaagtccatacaccatgctcgcgttttgatacgccagcgacacatctcccctcgtcggtag

SEQ ID NO: 297062 - DNA, 471 bp, Artificial Sequence
  derived and/or modified sequence
atgcccgtggcccggagctgggtgtgccggaagacctacgtgaccccccggaggccattcgagaagagcaggctagaccaggagctcaagttaatcggcgagtacgggttgcggaacaagcgtgaggtctggcgagtgaaattcaccctggccaagattaggaaggccgccagggaattactgaccctggatgagaaggaccctcgcaggttatttgagggtaacgccctcctgcgtagacttgtgaggatcggagtgctagatgagggtaaaatgaaattagactatattctcggcctgaagattgaggacttccttgagcgccgcctccagacgcaagtcttcaaactcggtctcgctaagagcatccaccatgccagggttctgatcagacagcgtcacattcggtaccacctcggttgggctccagaatccagtagcacatgcccaagtgatgggtgcccacactag

SEQ ID NO: 297063 - DNA, 420 bp, Artificial Sequence
  derived and/or modified sequence
atgcccgtggcccggagctgggtgtgccggaagacctacgtgaccccccggcgaccttttgagaaatcaaggctggatcaggagttgaagttgatcggtgagtatggcctcagaaacaaacgcgaggtttggcgtgtcaaatttacgctcgccaagataaggaaagccgcacgagaactgctcacattggatgaaaaggatccacggcgcctgttcgaggggaatgccttgctgcggcggctggtgcggatcggcgtgttagatgagggcaaaatgaagctggactatatactcggtctcaaaatagaagatttcctggagcgacgcctgcagacccaggtgttcaagctgggcttggcaaagtcaatccaccatgcacgcgttctgattcgccagcgccacatttccccacggaggtag

SEQ ID NO: 297064 - DNA, 585 bp, Artificial Sequence
  derived and/or modified sequence
atgccagtggccagatcctgggtgtgcagaaagacttacgtgaccccccgaaggccttttgagaaaagccggctggaccaggagctgaagttaatcggtgaatacggactccgaaataaacgagaagtgtggcgtgtcaagtttaccctggcgaagatccggaaggctgctagggagctgctgaccttggatgagaaggatcctaggagactgttcgagggaaatgctcttctgcggaggctcgtgcggattggtgtgttggacgagggtaaaatgaagttggactatatcctcggtctgaaaatcgaagatttcctagagagacgcttgcagacacaagtttttaagttgggccttgccaagtccatccatcatgccagagtgttgattcggcagcgtcacatccgagtcagaaagcaggtggtgaatatacccagctttatcgtgagactcgattctcagaagcacattgatttttcactgagaagcccgtacggaggtggtagacctggtcgggtgaagagaaagaatgctaagaagggacaaggaggggcaggtgcaggtgatgatgaagaggaagattag

SEQ ID NO: 297065 - DNA, 585 bp, Artificial Sequence
  derived and/or modified sequence
atgcctgtggccaggagctgggtttgcagaaagacgtacgttactccacggcgaccttttgagaagtcccgattggaccaagaactcaaactcatcggggaatacgggctccggaacaagcgcgaggtctggagggtgaagtttactctggctaagatccggaaggctgccagagagctcctgacattagacgagaaagatcccaggcgtctgttcgagggaaatgcactgctgagacggctggtccgcatcggtgtactggatgagggtaaaatgaagctggactacattctcggcttgaaaattgaggactttcttgagcgaagactgcagacccaagttttcaaattgggtctggctaagagcattcaccacgccagagtgcttatccgacagcgacatatccgtgtccggaaacaggtagtgaatatcccgagtttcattgtgagactcgacagccagaagcacatagatttttcccttagaagtccatacggcggaggccgaccagggagggtgaagaggaagaatgccaaaaagggtcagggaggagccggagccggagacgatgaagaggaagattag

SEQ ID NO: 297066 - DNA, 585 bp, Artificial Sequence
  derived and/or modified sequence
atgcctgtggcgcgtagctgggtgtgcaggaagacctatgtgacaccccgaagacccttcgaaaagagtcgcctggaccaggagcttaaactcattggggaatatgggctcagaaacaagcgcgaggtttggagggtgaagttcacactggctaaaatccgtaaagcggctcgcgagctgctgactctcgacgagaaggacccacgacgactgttcgaaggaaatgcattgctacggcgactggtccggatcggggtgcttgacgagggcaaaatgaaactcgattacatcctgggacttaagatcgaggacttcctggaacgcaggctccagacacaagtattcaaacttgggctcgcgaaatccattcaccacgctagagtactgatcaggcagcgtcatatccgcgtgcgaaaacaggtggttaacataccctcgtttattgtgaggctggatagccagaagcatatcgacttctctctaagatccccctatgggggaggtagacccggacgcgtcaagaggaaaaacgcgaagaagggccagggcggagcaggggcaggtgatgacgaagaggaagactag

SEQ ID NO: 297067 - DNA, 420 bp, Artificial Sequence
  derived and/or modified sequence
atgccagttgccagatcctgggtgtgccgaaagacctatgtgacacccagaaggccttttgaaaaatcgcggctcgatcaggaattaaaattaatcggcgagtatggactgcggaataagagggaggtctggagagtgaaattcacgctcgccaaaatacggaaggcagcacgggaattgctcaccctggacgaaaaggatcccaggcgactgtttgagggtaatgccctactgagacggttggtgcgaattggggttcttgatgaaggcaagatgaagctagactatattctgggcctgaaaatcgaagatttcctggagcgtcgtctccagacccaggtgtttaagctcggcttggccaaatctatacaccacgccagggtgctgatccgccagagacacatttcgcccaggcgctag

SEQ ID NO: 297068 - DNA, 420 bp, Artificial Sequence
  derived and/or modified sequence
atgcccgtcgctcggagctgggtctgtcgtaagacatatgtgacacctcggaggccattcgaaaagagtcgactagatcaggagttgaagctgattggggaatatggactacgaaataagcgcgaagtctggagggtcaagtttactctcgccaagattcgcaaagcggctagggagctgctgacccttgacgagaaggatcccagacggctgttcgaagggaacgctctgctccgcaggttggtgcgcattggcgttctggacgagggcaaaatgaagctggactacattctgggtttaaagattgaagatttcctggagcggcgattgcagacccaggtgtttaagctcgggctggccaagtccatccatcatgctcgggttttgatccgccagagacatataagtccaagacggtag

SEQ ID NO: 297069 - DNA, 471 bp, Artificial Sequence
  derived and/or modified sequence
atgccagtggcaagaagctgggtgtgtagaaagacctacgtgactccacgcaggccctttgagaagtcaaggctagatcaggaactgaagcttatcggtgaatacggtctgaggaataagcgcgaggtttggcgagtcaaattcaccctagcaaaaattagaaaagcagctagggagctgctgacccttgacgagaaagacccccgaaggctgtttgaaggaaatgcgttgctaagacgcctggtccgcataggggtcctagatgagggtaagatgaagctcgactatatcttgggcctgaagatcgaggactttttggagcggcgtctgcagacacaggtcttcaagttaggcctcgctaagtcaatccaccacgccagagtgttaattcgacagagacacataagatatcacctgggttgggctccagaaagtagcagcacttgcccaagtgacgggtgcccccactag

SEQ ID NO: 297070 - DNA, 420 bp, Artificial Sequence
  derived and/or modified sequence
atgcctgttgcccgatcctgggtgtgtaggaagacttacgtgacaccccgacggccattcgagaagagccggttggaccaagaattgaagctgattggggagtatgggctacgcaacaagagggaggtttggcgggtgaaattcacactggctaagatccgtaaagccgctagagaactgcttaccctggacgaaaaggaccccagacggctgttcgaggggaatgccctccttaggcgtcttgtgcggattggtgtgctcgacgagggaaagatgaagttagattacatcctcggactcaagattgaagatttcttggagcgaagacttcagactcaggtcttcaagctgggccttgccaaatcaatacaccatgctcgcgtactcattcgccaacgccacatctccccgagaaggtag

SEQ ID NO: 297071 - DNA, 772 bp, Artificial Sequence
  derived and/or modified sequence
ccgggtggtttgcttaggtgaggtgcggcggtgtgctttttctctagggtttgggttggatggtggcccgggccttccgagtttccatgagcgcagacggggaagcggagccaacatgccagtggcccggagctgggtttgtcgcaaaacttatgtgaccccgcggagacccttcgagaaatctcgtctcgaccaagagctgaagctgatcggcgagtatgggctccggaacaaacgtgaggtctggagggtcaaatttaccctggccaagatccgcaaggccgcccgggaactgctgacgcttgatgagaaggacccacggcgtctgttcgaaggcaacgccctgctgcggcggctggtccgcattggggtgctggatgagggcaagatgaagctggattacatcctgggcctgaagatagaggatttcttagagagacgcctgcagacccaggtcttcaagctgggcttggccaagtccatccaccacgctcgcgtgctgatccgccagcgccatatcagggtccgcaagcaggtggtgaacatcccgtccttcattgtccgcctggattcccagaagcacatcgacttctctctgcgctctccctacgggggtggccgcccgggccgcgtgaagaggaagaatgccaagaagggccagggtggggctggggctggagacgacgaggaggaggattaagtccacctgtccctcctgggctgctggattgtctcgttttcctgccaaataaacaggatcagcgctttacaa

SEQ ID NO: 297072 - DNA, 709 bp, Artificial Sequence
  derived and/or modified sequence
ttacgctcacacttctctcccgcgcaggcgcagacggggaagcggagccaacatgccagtggcccggagctgggtttgtcgcaaaacttatgtgaccccgcggagacccttcgagaaatctcgtctcgaccaagagctgaagctgatcggcgagtatgggctccggaacaaacgtgaggtctggagggtcaaatttaccctggccaagatccgcaaggccgcccgggaactgctgacgcttgatgagaaggacccacggcgtctgttcgaaggcaacgccctgctgcggcggctggtccgcattggggtgctggatgagggcaagatgaagctggattacatcctgggcctgaagatagaggatttcttagagagacgcctgcagacccaggtcttcaagctgggcttggccaagtccatccaccacgctcgcgtgctgatccgccagcgccatatcagggtccgcaagcaggtggtgaacatcccgtccttcattgtccgcctggattcccagaagcacatcgacttctctctgcgctctccctacgggggtggccgcccgggccgcgtgaagaggaagaatgccaagaagggccagggtggggctggggctggagacgacgaggaggaggattaagtccacctgtccctcctgggctgctggattgtctcgttttcctgccaaataaacaggatcagcgctttacaa

SEQ ID NO: 297073 - DNA, 1617 bp, Artificial Sequence
  derived and/or modified sequence
ccgggtggtttgcttaggtgaggtgcggcggtgtgctttttctctagggtttgggttggatggtggcccgggccttccgagtttccatgagcgcagacggggaagcggagccaacatgccagtggcccggagctgggtttgtcgcaaaacttatgtgaccccgcggagacccttcgagaaatctcgtctcgaccaagagctgaagctgatcggcgagtatgggctccggaacaaacgtgaggtctggagggtcaaatttaccctggccaagatccgcaaggccgcccgggaactgctgacgcttgatgagaaggacccacggcgtctgttcgaaggcaacgccctgctgcggcggctggtccgcattggggtgctggatgagggcaagatgaagctggattacatcctgggcctgaagatagaggatttcttagagagacgcctgcagacccaggtcttcaagctgggcttggccaagtccatccaccacgctcgcgtgctgatccgccagcgccatatcagccctcggaggtgatgggtgtgaactcacccagagggtacagattcacccttgcacacagctcaccagggagctggggcagcctcttgccccaatagcccagcgcaagggtcactgcggctctagccgtacaccttgtgaaggcctctgccaggcatgtgggcagctggacaggtaacagctcttggtgtccccagtggagggagagaaccagcctcacctcgcttgggtggtgggttcagctgtctcctggctcgcttgtgaagttgattccagaccccgatccatgactgcgttctgggtactcagtgtgccctttctgtaatgtggcaccattgagggggaggagctgtacagaaagagggcaagatgtttgcgtttagaatcttcgccccagcccttcactaaccctgtgagccgtaggcagagccttgtgtgtcaatgctttcgtcggagacgtagcctcgggttgctgtgttattgtgggcattgctgctgcacgtggtaatacagctcagtgtcaggtgtggggttcacgatatttcagactcggaacttgggggctctcacatggccatctcatttgctttgtggtcttaggtgggatactttcagatttctcctataaaatggggttgagaaagtcatctgaagcatttttggggattaaggtgataccctaaaaccccggagggcgcacgtaggatcaggtgcacccttcctgcagcgccttggtgtctgcagccgtggcggcctcacggggtgggtggagaggaaagagtggtgcggtagctggggttagcgtccgtttctcctccagtccacctcaccttgtcgcttcttccagggtccgcaagcaggtggtgaacatcccgtccttcattgtccgcctggattcccagaagcacatcgacttctctctgcgctctccctacgggggtggccgcccgggccgcgtgaagaggaagaatgccaagaagggccagggtggggctggggctggagacgacgaggaggaggattaagtccacctgtccctcctgggctgctggattgtctcgttttcctgccaaataaacaggatcagcgctttacaa

SEQ ID NO: 297074 - DNA, 752 bp, Artificial Sequence
  derived and/or modified sequence
accgggtggtttgcttaggtgaggcgcagacggggaagcggagccaacatgccagtggcccggagctgggtttgtcgcaaaacttatgtgaccccgcggagacccttcgagaaatctcgtctcgaccaagagctgaagctgatcggcgagtatgggctccggaacaaacgtgaggtctggagggtcaaatttaccctggccaagatccgcaaggccgcccgggaactgctgacgcttgatgagaaggacccacggcgtctgttcgaaggcaacgccctgctgcggcggctggtccgcattggggtgctggatgagggcaagatgaagctggattacatcctgggcctgaagatagaggatttcttagagagacgcctgcagacccaggtcttcaagctgggcttggccaagtccatccaccacgctcgcgtgctgatccgccagcgccatatcagccctcggaggtgatgggtgtgaactcacccagagggtacagattcacccttgcacacagctcaccagggagctggggcagcctcttgccccaatagcccagcgcaagggtcactgcggctctagccgtacaccttgtgaaggcctctgccaggcatgtgggcagctggacagggtccgcaagcaggtggtgaacatcccgtccttcattgtccgcctggattcccagaagcacatcgacttctctctgcgctctccctacgggggtggccgcccgggccgcgtgaagaggaagaatg

SEQ ID NO: 297075 - DNA, 1600 bp, Artificial Sequence
  derived and/or modified sequence
gcgcagacggggaagcggagccaacatgccagtggcccggagctgggtttgtcgcaaaacttatgtgaccccgcggagacccttcgagaaatctcgtctcgaccaagagctgaagctgatcggcgagtatgggctccggaacaaacgtgaggtctggagggtcaaatttaccctggccaagatccgcaaggccgcccgggaactgctgacgcttgatgagaaggacccacggcgtctgttcgaaggcaacgccctgctgcggcggctggtccgcattggggtgctggatgagggcaagatgaagctggattacatcctgggcctgaagatagaggatttcttagagagacgcctgcagacccaggtcttcaagctgggcttggccaagtccatccaccacgctcgcgtgctgatccgccagcgccatatcaggtaccacctcggatgggcacctgaatcttcctccacctgcccctctgatggttgccctcactaagcctgctgtccctatctcctatgcagccctcggaggtgatgggtgtgaactcacccagagggtacagattcacccttgcacacagctcaccagggagctggggcagcctcttgccccaatagcccagcgcaagggtcactgcggctctagccgtacaccttgtgaaggcctctgccaggcatgtgggcagctggacaggtaacagctcttggtgtccccagtggagggagagaaccagcctcacctcgcttgggtggtgggttcagctgtctcctggctcgcttgtgaagttgattccagaccccgatccatgactgcgttctgggtactcagtgtgccctttctgtaatgtggcaccattgagggggaggagctgtacagaaagagggcaagatgtttgcgtttagaatcttcgccccagcccttcactaaccctgtgagccgtaggcagagccttgtgtgtcaatgctttcgtcggagacgtagcctcgggttgctgtgttattgtgggcattgctgctgcacgtggtaatacagctcagtgtcaggtgtggggttcacgatatttcagactcggaacttgggggctctcacatggccatctcatttgctttgtggtcttaggtgggatactttcagatttctcctataaaatggggttgagaaagtcatctgaagcatttttggggattaaggtgataccctaaaaccccggagggcgcacgtaggatcaggtgcacccttcctgcagcgccttggtgtctgcagccgtggcggcctcacggggtgggtggagaggaaagagtggtgcggtagctggggttagcgtccgtttctcctccagtccacctcaccttgtcgcttcttccagggtccgcaagcaggtggtgaacatcccgtccttcattgtccgcctggattcccagaagcacatcgacttctctctgcgctctccctacgggggtggccgcccgggccgcgtgaagaggaagaatgccaagaagggccagggtggggctggggctggagacgacgaggaggaggattaagtccacctgtccctcctgggctgctggattgtctcgttttcctgccaaataaaca

SEQ ID NO: 297076 - DNA, 944 bp, Artificial Sequence
  derived and/or modified sequence
ccgggtggtttgcttaggtgaggtgcggcggtgtgctttttctctagggtttgggttggatggtggcccgggccttccgagtttccatgagcgcagacggggaagcggagccaacatgccagtggcccggagctgggtttgtcgcaaaacttatgtgaccccgcggagacccttcgagaaatctcgtctcgaccaagagctgaagctgatcggcgagtatgggctccggaacaaacgtgaggtctggagggtcaaatttaccctggccaagatccgcaaggccgcccgggaactgctgacgcttgatgagaaggacccacggcgtctgttcgaaggcaacgccctgctgcggcggctggtccgcattggggtgctggatgagggcaagatgaagctggattacatcctgggcctgaagatagaggatttcttagagagacgcctgcagacccaggtcttcaagctgggcttggccaagtccatccaccacgctcgcgtgctgatccgccagcgccatatcagccctcggaggtgatgggtgtgaactcacccagagggtacagattcacccttgcacacagctcaccagggagctggggcagcctcttgccccaatagcccagcgcaagggtcactgcggctctagccgtacaccttgtgaaggcctctgccaggcatgtgggcagctggacagggtccgcaagcaggtggtgaacatcccgtccttcattgtccgcctggattcccagaagcacatcgacttctctctgcgctctccctacgggggtggccgcccgggccgcgtgaagaggaagaatgccaagaagggccagggtggggctggggctggagacgacgaggaggaggattaagtccacctgtccctcctgggctgctggattgtctcgttttcctgccaaataaacaggatcagcgctttacaa

SEQ ID NO: 297077 - DNA, 420 bp, Artificial Sequence
  derived and/or modified sequence
atgcccgtggccagaagctgggtgtgcagaaagacctacgtgacccccagaagacccttcgagaagagcagactggaccaggagctgaagctgatcggcgagtacggcctgagaaacaagagagaggtgtggagagtgaagttcaccctggccaagatcagaaaggccgccagagagctgctgaccctggacgagaaggaccccagaagactgttcgagggcaacgccctgctgagaagactggtgagaatcggcgtgctggacgagggcaagatgaagctggactacatcctgggcctgaagatcgaggacttcctggagagaagactgcagacccaggtgttcaagctgggcctggccaagagcatccaccacgccagagtgctgatcagacagagacacatcagccccagaagatag

SEQ ID NO: 297078 - DNA, 471 bp, Artificial Sequence
  derived and/or modified sequence
atgcccgtggccagaagctgggtgtgcagaaagacctacgtgacccccagaagacccttcgagaagagcagactggaccaggagctgaagctgatcggcgagtacggcctgagaaacaagagagaggtgtggagagtgaagttcaccctggccaagatcagaaaggccgccagagagctgctgaccctggacgagaaggaccccagaagactgttcgagggcaacgccctgctgagaagactggtgagaatcggcgtgctggacgagggcaagatgaagctggactacatcctgggcctgaagatcgaggacttcctggagagaagactgcagacccaggtgttcaagctgggcctggccaagagcatccaccacgccagagtgctgatcagacagagacacatcagataccacctgggctgggcccccgagagcagcagcacctgccccagcgacggctgcccccactag

SEQ ID NO: 297079 - protein, 364 aa, Artificial Sequence
  derived and/or modified sequence
MSLADELLADLEEAAEEEEGGSYGEEEEEPAIEDVQEETQLDLSGDSVKTIAKLWDSKMFAEIMMKIEEYISKQAKASEVMGPVEAAPEYRVIVDANNLTVEIENELNIIHKFIRDKYSKRFPELESLVPNALDYIRTVKELGNSLDKCKNNENLQQILTNATIMVVSVTASTTQGQQLSEEELERLEEACDMALELNASKHRIYEYVESRMSFIAPNLSIIIGASTAAKIMGVAGGLTNLSKMPACNIMLLGAQRKTLSGFSSTSVLPHTGYIYHSDIVQSLPPDLRRKAARLVAAKCTLAARVDSFHESTEGKVGYELKDEIERKFDKWQRRRWLRPTRSISPAWLSSSRSRARRVALCPPE

SEQ ID NO: 297080 - protein, 499 aa, Artificial Sequence
  derived and/or modified sequence
MSLADELLADLEEAAEEEEGGSYGEEEEEPAIEDVQEETQLDLSGDSVKTIAKLWDSKMFAEIMMKIEEYISKQAKASEVMGPVEAAPEYRVIVDANNLTVEIENELNIIHKFIRDKYSKRFPELESLVPNALDYIRTVKELGNSLDKCKNNENLQQILTNATIMVVSVTASTTQGQQLSEEELERLEEACDMALELNASKHRIYEYVESRMSFIAPNLSIIIGASTAAKIMGVAGGLTNLSKMPACNIMLLGAQRKTLSGFSSTSVLPHTGYIYHSDIVQSLPPDLRRKAARLVAAKCTLAARVDSFHESTEGKVGYELKDEIERKFDKWQEPPPVKQVKPLPAPLDGQRKKRGGRRYRKMKERLGLTEIRKQANRMSFGEIEEDAYQEDLGFSLGHLGKSGSGRVRQTQVNEATKARISKTLQRTLQKQSVVYGGKSTIRDRSSGTASSVAFTPLQGLEIVNPQAAEKKVAEANQKYFSSMAEFLKVKGEKSGLMST

SEQ ID NO: 297081 - protein, 450 aa, Artificial Sequence
  derived and/or modified sequence
MSLADELLADLEEAAEEEEGGSYGEEEEEPAIEDVQEETQLDLSGDSVKTIAKLWDSKMFAEIMMKIEEYISKQAKASEVMGPVEAAPEYRVIVDANNLTVEIENELNIIHKFIRDKYSKRFPELESLVPNALDYIRTVKELGNSLDKCKNNENLQQILTNATIMVVSVTASTTQGQQLSEEELERLEEACDMALELNASKHRIYEYVESRMSFIAPNLSIIIGASTAAKIMGVAGGLTNLSKMPACNIMLLGAQRKTLSGFSSTSVLPHTGYIYHSDIVQSLPPDLRRKAARLVAAKCTLAARVDSFHESTEGKVGYELKDEIERKFDKWQEPPPVKQVKPLPAPLDGQRKKRGGRRYRKMKERLGLTEIRKQANRMSFGEIEEDAYQEDLGFSLGHLDAAADPAEAERRIWREVHHPRPLLGHGLQRGLHPTPGPGDCEPTGGREEGG

SEQ ID NO: 297082 - protein, 276 aa, Artificial Sequence
  derived and/or modified sequence
MSLADELLADLEEAAEEEEGGSYGEEEEEPAIEDVQEETQLDLSGDSVKTIAKLWDSKMFAEIMMKIEEYISKQAKASEVMGPVEAAPEYRVIVDANNLTVEIENELNIIHKFIRDKYSKRFPELESLVPNALDYIRTVKELGNSLDKCKNNENLQQILTNATIMVVSVTASTTQGQQLSEEELERLEEACDMALELNASKHRIYEYVESRMSFIAPNLSIIIGASTAAKIMGVAGGLTNLSKMPACNIMLLGAQRKTLSGFSSTSVLPHTGYIYH

SEQ ID NO: 297083 - protein, 284 aa, Artificial Sequence
  derived and/or modified sequence
MSLADELLADLEEAAEEEEGGSYGEEEEEPAIEDVQEETQLDLSGDSVKTIAKLWDSKMFAEIMMKIEEYISKQAKASEVMGPVEAAPEYRVIVDANNLTVEIENELNIIHKFIRDKYSKRFPELESLVPNALDYIRTVKELGNSLDKCKNNENLQQILTNATIMVVSVTASTTQGQQLSEEELERLEEACDMALELNASKHRIYEYVESRMSFIAPNLSIIIGASTAAKIMGVAGGLTNLSKMPACNIMLLGAQRKTLSGFSSTSVLPHTGYIYHSDIVQSLP

SEQ ID NO: 297084 - protein, 261 aa, Artificial Sequence
  derived and/or modified sequence
MSLADELLADLEEAAEEEEGGSYGEEEEEPAIEDVQEETQLDLSGDSVKTIAKLWDSKMFAEIMMKIEEYISKQAKASEVMGPVEAAPEYRVIVDANNLTVEIENELNIIHKFIRDKYSKRFPELESLVPNALDYIRTVKELGNSLDKCKNNENLQQILTNATIMVVSVTASTTQGQQLSEEELERLEEACDMALELNASKHRIYEYVESRMSFIAPNLSIIIGASTAAKIMGVAGGLTNLSKMPACNIMLLGAQRKTLSG

SEQ ID NO: 297085 - DNA, 1095 bp, Artificial Sequence
  derived and/or modified sequence
atgagtctggctgatgagctgctcgccgacctggaagaagctgccgaggaggaagaaggaggtagctacggcgaggaagaggaggaacctgccatagaagacgtccaagaagaaacacagctggacctgtcaggagatagcgttaaaacaattgccaaactctgggactcaaaaatgttcgctgagattatgatgaaaatcgaggagtacatttcaaagcaagccaaagcctcagaggtcatgggcccagtggaagcggccccagagtaccgcgttatcgtcgacgctaataatctcaccgtcgaaatcgagaacgagctgaacatcatccacaaattcatccgagacaagtacagtaagaggttcccggagttagagtccctggtaccaaacgccctcgactatattcgaacagtcaaggagctgggcaacagcctcgataagtgtaagaacaacgagaacttgcagcaaatccttaccaacgccaccatcatggtggtgagcgtgacagcaagtactactcagggacagcagctgagcgaggaggagctggagcggttggaggaagcctgcgacatggcacttgagctgaacgcatctaaacaccgcatttacgaatacgtggagtctcggatgtcatttattgcaccgaacttgtcaatcatcattggagctagcactgctgctaagataatgggggtggcagggggcctgaccaatctctcaaaaatgccagcttgcaatatcatgctcctgggcgctcagcgaaagacgctgtcgggcttcagctcaacctctgtcctccctcatacaggttacatttaccattcagacatcgttcagtctttgccacccgacctgcgcagaaaagccgcgcgcctcgtggctgctaagtgcaccctggcggctagagtagactcatttcatgagagcacagaaggtaaggttgggtacgagctgaaggacgagatagaacggaagttcgacaagtggcaacgacgcagatggctacggcctactagaagcatttcacctgcctggctgtcctcatctagatccagggcccggcgagttgctctatgccctcctgaatag

SEQ ID NO: 297086 - DNA, 1500 bp, Artificial Sequence
  derived and/or modified sequence
atgtctctcgcagatgaacttctcgccgacttagaggaagctgctgaggaagaggagggtggctcttacggagaggaggaagaggagcctgcgattgaagacgtgcaggaggaaacacaacttgacctcagcggcgactctgtgaagaccattgcaaaactgtgggactccaaaatgttcgcagaaataatgatgaagatagaagaatatatcagtaagcaagcaaaggccagcgaagttatgggtcctgtggaggcagcccctgaatatcgagtcatcgtggacgccaacaatctgacggttgagattgagaacgagcttaatatcatccacaagtttatacgagacaagtacagcaaacggttccctgagttagagagcttggtgccaaatgccctggactacatcaggaccgtgaaggagttgggaaactccctagacaagtgcaaaaacaacgagaacctacaacagattttgacaaatgctaccattatggtcgtctccgtaaccgctagcaccacacaaggccagcaactatcagaagaggagctggagcgtctggaagaggcttgtgatatggctctagaacttaatgctagcaaacatcgtatatatgagtatgtcgagtccaggatgtctttcatagcgcccaatctttcaataattatcggcgcatcaactgctgctaagatcatgggcgtcgcgggtggattaacaaacctatctaaaatgcccgcttgcaatatcatgctactcggggcccaaagaaaaaccctgtcagggttctcttccacgtcagtgctcccccacactggttacatctaccatagcgatatcgtgcagagcctgcctccggatctgaggagaaaggccgcccggctggtggcggctaaatgtacactcgccgctcgggtagactctttccatgagagtactgagggaaaggtgggctatgagctgaaggatgaaatagaacgaaaatttgataagtggcaggagccgccacccgtgaaacaggtgaaaccattaccagccccattggacgggcaaagaaagaagcgggggggcaggaggtaccgtaaaatgaaggagcgcctcggcctgactgaaattcggaaacaggccaatagaatgagcttcggcgagatcgaggaggatgcctaccaagaggacctcggattttccctcggtcatctgggcaaatcaggcagcggcagagtgcggcagacacaagtaaatgaggccaccaaggcccggatttcgaaaactttgcagagaaccttgcagaagcagtctgtggtttatgggggaaagagcacgataagggataggtcttcgggcaccgcttcaagcgtagccttcacgccactgcagggcttggaaattgttaaccctcaagccgccgagaaaaaagtggccgaggctaatcagaagtatttcagttcaatggcggagtttctcaaagtgaaaggagaaaagagcggcctgatgtccacttag

SEQ ID NO: 297087 - DNA, 1353 bp, Artificial Sequence
  derived and/or modified sequence
atgagtctggccgacgaactactcgctgatcttgaggaagctgccgaggaagaggagggaggatcctacggtgaagaggaggaggagcctgccatcgaggacgtgcaggaggaaacacagcttgatcttagtggtgattccgtaaagacgatcgcaaagctgtgggattcgaagatgttcgccgaaatcatgatgaagattgaagaatacattagcaaacaggcaaaagcttctgaagtgatggggcccgtggaagccgctccagaatacagagtgatagtggacgcaaacaaccttaccgtggaaattgaaaacgaactgaatataattcacaaatttataagggataaatacagcaagcgttttccggagctggaaagcctggttccaaatgctctcgactatattcgcaccgtcaaagaattgggtaacagtctggataagtgcaagaacaacgagaatctgcagcagatcctcaccaatgctactattatggttgtctcagtgactgcctctactactcagggacagcagctgtccgaggaagaactggaaaggttggaggaagcatgcgatatggctctggaactgaatgcatctaaacacaggatttatgagtatgtggaaagccgcatgtccttcattgcacccaacctgtctatcattattggtgcgtcaaccgccgctaagatcatgggagtggccggcggactcacaaacctgagtaagatgcccgcttgcaatatcatgctgttgggggcccagagaaaaaccctgtcaggcttttcaagcaccagtgtcctcccccatactggttatatttatcatagcgatatagttcagtccctacctccagacctgagaaggaaggccgccaggctggtcgcggctaagtgtacattggcagcccgcgtagattcattccatgagtcaactgaaggcaaagttgggtacgagctaaaagacgagattgaacgcaagttcgacaaatggcaggaaccaccccccgtcaagcaagtgaaaccactgcctgctccattagatggccagcggaaaaaacgcggggggcgccgctaccggaaaatgaaagagcgccttgggctgacggagattaggaaacaagccaacagaatgtcattcggcgagatagaagaggacgcatatcaagaggatttaggcttcagcctcggccacctggatgcagcagccgatccagcggaggctgagcgtcgcatatggcgggaagtccaccatccccgccccttgctaggccacggtctccaacgtggcctacatccgacacctggccccggagactgtgagcctaccggtgggcgggaagaaggtggatag

SEQ ID NO: 297088 - DNA, 831 bp, Artificial Sequence
  derived and/or modified sequence
atgtctctcgcggatgaacttttagccgacttggaagaggctgccgaggaggaggaaggcggttcctacggggaggaagaagaagaacctgctattgaggacgtgcaagaagagactcagctggatctctcaggcgactcagtgaagaccatcgccaaattgtgggatagtaaaatgttcgcagaaatcatgatgaaaattgaggaatacatctccaagcaggccaaggcctctgaggtgatgggccccgtcgaggccgccccagagtacagagtcattgtagacgccaataacctgaccgtagaaattgaaaatgagctcaatataatccacaaattcattagggataaatactcgaaaaggtttcctgagctggaatcactggtccccaacgctctcgactatattcgcacagttaaagagttgggcaacagcttggataagtgtaaaaacaatgagaatttgcagcagattctcacaaatgctacaattatggtggttagcgttacagcctccaccactcaagggcaacagctgagcgaggaagagctagagagactggaagaggcctgcgatatggctctggagttaaacgcttctaagcatagaatttatgagtatgttgaatccagaatgtcctttatagcaccgaacctgtctattatcatcggtgcatccacggcagctaaaatcatgggagtcgctggcggtctgactaatttgagcaagatgcctgcatgcaatataatgttgctgggcgcccagcgcaagacactgtccggcttttcttcaactagtgtcctcccacacactggatatatatatcactag

SEQ ID NO: 297089 - DNA, 855 bp, Artificial Sequence
  derived and/or modified sequence
atgtctctcgccgacgaactactcgccgacttggaggaggccgcggaggaggaagaaggaggaagctacggagaggaggaggaggagccagcaatcgaagacgtgcaggaggaaacacaactggacctgtctggggattcagtgaagacaattgcgaagctttgggactctaaaatgttcgctgagatcatgatgaaaatcgaagagtatattagcaaacaggcgaaggcctctgaggtgatggggcctgttgaggcagccccagagtatagagttattgtggacgccaacaacctgaccgtggaaattgagaacgagttaaatattatacacaaattcatcagagataagtattcaaagaggtttccagagcttgagagcctggtgcctaatgcactggactatattaggaccgtaaaggagctaggtaatagcctggataaatgcaagaacaatgaaaacttacagcagatcctgacaaacgcaacaattatggtggtgtccgtgaccgcctcgactacgcagggacagcagctgtccgaagaggaattggagaggttagaagaggcctgtgacatggctcttgaactgaatgccagcaaacaccgtatttacgagtacgtcgagagcagaatgagtttcatcgcccccaatttgagcatcataatcggagcctcaacagcggccaaaattatgggcgtagccggcgggctgacaaatctgagcaagatgcccgcctgtaatataatgttgctaggggcccaacggaagactctaagcggattttcatccacttcagtcttaccacataccgggtacatctaccatagcgacatcgtacagagcctgccgtag

SEQ ID NO: 297090 - DNA, 786 bp, Artificial Sequence
  derived and/or modified sequence
atgagtctggccgacgaactgctagccgatctggaagaagccgctgaggaggaggaaggaggatcatatggcgaggaggaggaagagcccgcaatcgaggacgttcaggaggagacacagctcgatttgagcggcgattccgtaaaaacgatcgccaaactctgggactctaaaatgtttgcagaaatcatgatgaaaatagaagaatacatctccaagcaggctaaggcttccgaggtgatgggcccagtcgaagccgctcccgaatatagggttatagtggacgcaaacaatctcacagtggagattgagaacgagctaaacatcatccacaagtttatacgggacaaatattcgaagaggttccctgagctcgaatccctcgttcctaatgccctcgactacatacgcacagtgaaggagctgggaaattctctggataagtgcaagaataacgaaaacctgcagcagattctgaccaacgctactatcatggtggtctctgtgacagcaagcaccacccaggggcagcagcttagcgaagaggagcttgagcgactcgaggaggcctgcgacatggcccttgagctcaacgcatctaagcaccgtatctacgagtacgtcgagtctagaatgtcgttcatcgcccccaatctatcgatcattattggggcttccacagcagcaaagataatgggagtcgccggcggcctgactaatctgagcaaaatgcctgcgtgtaacattatgctgctgggtgcccagcggaagacactttcaggatag

SEQ ID NO: 297091 - DNA, 1095 bp, Artificial Sequence
  derived and/or modified sequence
atgagcctggctgatgagctgctggccgacctggaggaggccgctgaggaggaggagggcggcagctatggagaggaggaggaggagcccgccattgaagatgtgcaggaggagacccagctggacctgagcggggacagcgtgaagaccatcgccaagctgtgggacagcaagatgtttgctgagatcatgatgaagattgaggagtacatcagcaagcaggccaaggccagcgaggtgatgggccctgtggaggccgcccctgagtacagagtgattgtggatgccaacaacctgactgtggagattgaaaatgagctgaacatcatccacaagttcatccgggacaagtacagcaagcgcttccctgagctggagagcctggtgcccaatgccctggactacatcagaacagtgaaggagctgggcaacagcctggacaagtgcaagaacaatgaaaacctgcagcagatcctgaccaatgccaccatcatggtggtgtctgtgacagccagcaccacccagggccagcagctgtctgaggaggagctggagcggctggaggaggcctgtgacatggccctggagctgaatgccagcaagcaccgcatctatgaatatgtggagagcaggatgtccttcatcgcccccaacctgagcatcatcattggagccagcacagctgccaagatcatgggcgtggccggcggcctgaccaacctgagcaagatgcctgcctgcaacatcatgctgctgggcgcccagaggaagaccctgagcggcttcagcagcacctctgtgctgccccacacaggctacatctaccacagcgacatcgtgcagagcctgcccccagacctgcggaggaaggccgcccggctggtggccgccaagtgcaccctggccgcccgggtggacagcttccacgagagcacagagggcaaggtgggctatgagctgaaggatgaaattgaaaggaagtttgacaagtggcagaggcggcgctggctgcggcccaccaggagcatcagccctgcctggctgagcagcagccgcagccgggcccggcgggtggccctgtgccccccagagtag

SEQ ID NO: 297092 - DNA, 1500 bp, Artificial Sequence
  derived and/or modified sequence
atgagcctggctgatgagctgctggccgacctggaggaggccgctgaggaggaggagggcggcagctatggagaggaggaggaggagcccgccattgaagatgtgcaggaggagacccagctggacctgagcggggacagcgtgaagaccatcgccaagctgtgggacagcaagatgtttgctgagatcatgatgaagattgaggagtacatcagcaagcaggccaaggccagcgaggtgatgggccctgtggaggccgcccctgagtacagagtgattgtggatgccaacaacctgactgtggagattgaaaatgagctgaacatcatccacaagttcatccgggacaagtacagcaagcgcttccctgagctggagagcctggtgcccaatgccctggactacatcagaacagtgaaggagctgggcaacagcctggacaagtgcaagaacaatgaaaacctgcagcagatcctgaccaatgccaccatcatggtggtgtctgtgacagccagcaccacccagggccagcagctgtctgaggaggagctggagcggctggaggaggcctgtgacatggccctggagctgaatgccagcaagcaccgcatctatgaatatgtggagagcaggatgtccttcatcgcccccaacctgagcatcatcattggagccagcacagctgccaagatcatgggcgtggccggcggcctgaccaacctgagcaagatgcctgcctgcaacatcatgctgctgggcgcccagaggaagaccctgagcggcttcagcagcacctctgtgctgccccacacaggctacatctaccacagcgacatcgtgcagagcctgcccccagacctgcggaggaaggccgcccggctggtggccgccaagtgcaccctggccgcccgggtggacagcttccacgagagcacagagggcaaggtgggctatgagctgaaggatgaaattgaaaggaagtttgacaagtggcaggagcccccacctgtgaagcaggtgaagcccctgcctgcccccctggatggccagaggaagaagagaggaggaagacgctacaggaagatgaaggagcggctgggcctgacagagatcaggaagcaggccaacaggatgagctttggagaaattgaagaagatgcctaccaggaggacctgggcttcagcctgggccacctgggcaagagcggcagcggccgggtgcggcagacccaggtgaatgaggccaccaaggcccgcatcagcaagaccctgcagaggaccctgcagaagcagagcgtggtgtatggaggcaagagcaccatccgggacaggagcagcggcacagccagctctgtggccttcacccccctgcagggcctggagatcgtgaacccccaggccgctgagaagaaggtggccgaggccaaccagaagtacttcagctccatggccgagttcctgaaggtgaagggggagaagagcggcctgatgagcacctag

SEQ ID NO: 297093 - DNA, 1353 bp, Artificial Sequence
  derived and/or modified sequence
atgagcctggctgatgagctgctggccgacctggaggaggccgctgaggaggaggagggcggcagctatggagaggaggaggaggagcccgccattgaagatgtgcaggaggagacccagctggacctgagcggggacagcgtgaagaccatcgccaagctgtgggacagcaagatgtttgctgagatcatgatgaagattgaggagtacatcagcaagcaggccaaggccagcgaggtgatgggccctgtggaggccgcccctgagtacagagtgattgtggatgccaacaacctgactgtggagattgaaaatgagctgaacatcatccacaagttcatccgggacaagtacagcaagcgcttccctgagctggagagcctggtgcccaatgccctggactacatcagaacagtgaaggagctgggcaacagcctggacaagtgcaagaacaatgaaaacctgcagcagatcctgaccaatgccaccatcatggtggtgtctgtgacagccagcaccacccagggccagcagctgtctgaggaggagctggagcggctggaggaggcctgtgacatggccctggagctgaatgccagcaagcaccgcatctatgaatatgtggagagcaggatgtccttcatcgcccccaacctgagcatcatcattggagccagcacagctgccaagatcatgggcgtggccggcggcctgaccaacctgagcaagatgcctgcctgcaacatcatgctgctgggcgcccagaggaagaccctgagcggcttcagcagcacctctgtgctgccccacacaggctacatctaccacagcgacatcgtgcagagcctgcccccagacctgcggaggaaggccgcccggctggtggccgccaagtgcaccctggccgcccgggtggacagcttccacgagagcacagagggcaaggtgggctatgagctgaaggatgaaattgaaaggaagtttgacaagtggcaggagcccccacctgtgaagcaggtgaagcccctgcctgcccccctggatggccagaggaagaagagaggaggaagacgctacaggaagatgaaggagcggctgggcctgacagagatcaggaagcaggccaacaggatgagctttggagaaattgaagaagatgcctaccaggaggacctgggcttcagcctgggccacctggatgctgctgctgaccctgctgaggccgagcggcgcatctggagggaggtgcaccacccccggcccctgctgggccacggcctgcagaggggcctgcaccccaccccaggccctggggactgtgagcccactggaggccgggaggagggcggctag

SEQ ID NO: 297094 - DNA, 831 bp, Artificial Sequence
  derived and/or modified sequence
atgagcctggctgatgagctgctggccgacctggaggaggccgctgaggaggaggagggcggcagctatggagaggaggaggaggagcccgccattgaagatgtgcaggaggagacccagctggacctgagcggggacagcgtgaagaccatcgccaagctgtgggacagcaagatgtttgctgagatcatgatgaagattgaggagtacatcagcaagcaggccaaggccagcgaggtgatgggccctgtggaggccgcccctgagtacagagtgattgtggatgccaacaacctgactgtggagattgaaaatgagctgaacatcatccacaagttcatccgggacaagtacagcaagcgcttccctgagctggagagcctggtgcccaatgccctggactacatcagaacagtgaaggagctgggcaacagcctggacaagtgcaagaacaatgaaaacctgcagcagatcctgaccaatgccaccatcatggtggtgtctgtgacagccagcaccacccagggccagcagctgtctgaggaggagctggagcggctggaggaggcctgtgacatggccctggagctgaatgccagcaagcaccgcatctatgaatatgtggagagcaggatgtccttcatcgcccccaacctgagcatcatcattggagccagcacagctgccaagatcatgggcgtggccggcggcctgaccaacctgagcaagatgcctgcctgcaacatcatgctgctgggcgcccagaggaagaccctgagcggcttcagcagcacctctgtgctgccccacacaggctacatctaccactag

SEQ ID NO: 297095 - DNA, 855 bp, Artificial Sequence
  derived and/or modified sequence
atgagcctggctgatgagctgctggccgacctggaggaggccgctgaggaggaggagggcggcagctatggagaggaggaggaggagcccgccattgaagatgtgcaggaggagacccagctggacctgagcggggacagcgtgaagaccatcgccaagctgtgggacagcaagatgtttgctgagatcatgatgaagattgaggagtacatcagcaagcaggccaaggccagcgaggtgatgggccctgtggaggccgcccctgagtacagagtgattgtggatgccaacaacctgactgtggagattgaaaatgagctgaacatcatccacaagttcatccgggacaagtacagcaagcgcttccctgagctggagagcctggtgcccaatgccctggactacatcagaacagtgaaggagctgggcaacagcctggacaagtgcaagaacaatgaaaacctgcagcagatcctgaccaatgccaccatcatggtggtgtctgtgacagccagcaccacccagggccagcagctgtctgaggaggagctggagcggctggaggaggcctgtgacatggccctggagctgaatgccagcaagcaccgcatctatgaatatgtggagagcaggatgtccttcatcgcccccaacctgagcatcatcattggagccagcacagctgccaagatcatgggcgtggccggcggcctgaccaacctgagcaagatgcctgcctgcaacatcatgctgctgggcgcccagaggaagaccctgagcggcttcagcagcacctctgtgctgccccacacaggctacatctaccacagcgacatcgtgcagagcctgccctag

SEQ ID NO: 297096 - DNA, 786 bp, Artificial Sequence
  derived and/or modified sequence
atgagcctggctgatgagctgctggccgacctggaggaggccgctgaggaggaggagggcggcagctatggagaggaggaggaggagcccgccattgaagatgtgcaggaggagacccagctggacctgagcggggacagcgtgaagaccatcgccaagctgtgggacagcaagatgtttgctgagatcatgatgaagattgaggagtacatcagcaagcaggccaaggccagcgaggtgatgggccctgtggaggccgcccctgagtacagagtgattgtggatgccaacaacctgactgtggagattgaaaatgagctgaacatcatccacaagttcatccgggacaagtacagcaagcgcttccctgagctggagagcctggtgcccaatgccctggactacatcagaacagtgaaggagctgggcaacagcctggacaagtgcaagaacaatgaaaacctgcagcagatcctgaccaatgccaccatcatggtggtgtctgtgacagccagcaccacccagggccagcagctgtctgaggaggagctggagcggctggaggaggcctgtgacatggccctggagctgaatgccagcaagcaccgcatctatgaatatgtggagagcaggatgtccttcatcgcccccaacctgagcatcatcattggagccagcacagctgccaagatcatgggcgtggccggcggcctgaccaacctgagcaagatgcctgcctgcaacatcatgctgctgggcgcccagaggaagaccctgagcggctag

SEQ ID NO: 297097 - DNA, 1095 bp, Artificial Sequence
  derived and/or modified sequence
atgagcctggccgacgagctgctggccgacctggaggaggccgccgaggaggaagagggcggctcatacggcgaagaagaagaagagcctgccattgaagatgtccaagaagaaacacagctcgatttgagcggcgactccgtgaagaccatcgctaaattatgggattctaaaatgttcgcagaaatcatgatgaagatcgaagagtatattagtaagcaggccaaagccagcgaggtgatggggccagttgaagccgcccccgagtaccgcgtgattgtggacgccaataatctcactgttgagattgagaacgagctcaatatcattcacaagttcattcgcgataaatactcgaagaggttcccggaattggaatcacttgtacccaatgctctggattatattaggaccgttaaagagttaggaaacagcctagacaaatgtaagaacaacgagaatcttcagcaaatccttaccaatgcgacaatcatggtggtttctgtcacagcctcaactacgcagggccaacaactgagcgaagaggagctggagcgcctggaagaagcttgtgatatggccctggaactgaatgcaagtaagcaccgtatttatgagtacgtggaatctaggatgtcattcatcgcacctaatctgagcattattatcggcgctagcaccgcagcaaaaattatgggcgttgcaggcggtctgactaatctcagcaaaatgcccgcgtgcaatataatgttgctgggtgcccagcgcaaaaccttatctggattctcttctacctcggttctgccccatactggctacatttaccattccgatatcgttcagagtcttccaccagatctcaggaggaaggcagcccgacttgtggcggccaagtgcaccctcgccgccagggtcgatagtttccacgaaagtactgaaggtaaagtgggctacgaactgaaggatgagatagagcgtaagttcgacaagtggcaacggagaaggtggttgcgccccaccaggtcaattagtccggcctggttaagctcatccagaagccgggccagaagggtcgcactatgtcctcctgaatag

SEQ ID NO: 297098 - DNA, 1500 bp, Artificial Sequence
  derived and/or modified sequence
atgagcctggccgacgagctgctggccgacctggaggaggccgccgaggaagaggagggggggtcatacggagaagaagaggaggagccagcaattgaggatgtgcaagaggagactcagctagatttgtccggggattcggtgaagacgattgcgaagctgtgggatagcaagatgttcgctgagatcatgatgaagattgaggagtacattagtaagcaggccaaagcttcagaggttatgggcccagtcgaagcagcgcccgaataccgagtcatcgtagatgccaataatttgacagtggaaatagagaatgaactgaatattattcacaagttcattagggacaagtattccaagcgcttccccgaactggagtctctcgtgccaaacgccttggattacatccgcaccgtgaaagagttagggaattcattggacaaatgcaaaaataacgagaatctccagcagatacttaccaacgcgactataatggtggtgtccgtcactgctagtaccacgcaggggcagcagttatccgaagaagagctggagcgactcgaggaggcatgcgatatggctctcgaacttaacgcaagcaagcaccggatttatgaatatgtagagagcagaatgtccttcattgcccctaatctgagtatcatcatcggggctagtaccgccgccaagatcatgggcgtggccgggggactgacaaacctttctaagatgccagcgtgcaacattatgttactcggggcacagaggaagaccttgtctggattctcatccacgtccgtactccctcatacaggctatatctaccatagcgacatagttcaaagtctgcccccagacctccgacgtaaggctgctcgccttgtcgccgcaaagtgtacactagcggcacgcgtcgattcattccatgagtcgacagaaggcaaagtaggctatgaactgaaggatgagatagaacggaagtttgataagtggcaggaacccccccccgtgaagcaggtgaagcctttgcccgctcccctcgatggacagagaaaaaagcgcggaggacgtaggtatcgcaaaatgaaagagcgccttggtctgactgaaatccgcaaacaggccaatagaatgtcgttcggggaaatcgaggaggatgcataccaagaagatttaggattttcgctaggccatctgggcaaatccggaagtgggagagtgcggcagacccaagtcaacgaggccaccaaagctcggatctcgaaaactctccaacggacactccagaagcaatctgttgtttacggaggaaagtcgacgattcgggaccggagtagtggcaccgctagtagcgtggcttttactcctctgcaaggtctggagatcgtcaacccccaggctgctgagaaaaaggtggcagaagccaaccaaaaatatttctctagcatggcggagttcttgaaggttaagggcgagaagtccggtctgatgtctacatag

SEQ ID NO: 297099 - DNA, 1353 bp, Artificial Sequence
  derived and/or modified sequence
atgagcctggccgacgagctgctggccgacctggaggaggccgccgaggaagaggagggtggaagttatggggaggaagaggaggagcctgccatcgaagatgttcaggaagaaacacaacttgatctgtccggggacagtgtcaagactatagccaagctctgggattctaagatgtttgcagagatcatgatgaaaatagaggagtatatcagtaagcaagctaaggcctccgaggtgatgggaccagtggaggcagcccccgaataccgtgttattgttgacgccaataatttgacagtggagattgagaacgaactgaatattattcataagttcatccgagacaaatatagcaaacgcttccctgagctggagtcactcgtgcccaacgcgctggactacattcggaccgtaaaagagctgggtaattccctcgacaaatgtaaaaataacgagaatctgcagcagattctgacaaatgccaccataatggtagtgtcagtgacggcctctaccactcaaggacagcaactgtcagaggaggagctggaacggttagaggaagcatgcgacatggctctcgagttgaatgcttctaagcatcgcatatacgaatacgtggagtccaggatgtcctttatagcgcccaacctgtctattattataggagcatccactgccgccaaaatcatgggagttgcgggcggcctcactaatttaagcaagatgccagcgtgcaacatcatgttgctcggagcccaacgtaagacactttccggtttctcttcaacctccgtcctccctcacactggctatatataccatagcgatatagtgcagagcctgccaccggatctccggcgaaaggctgcccgcctggtggctgccaaatgcactctggccgcacgcgtggattcattccatgagagcacagaggggaaagtgggctacgaacttaaagatgaaatcgagcgcaaattcgacaagtggcaggaaccgccgccagtcaaacaagtcaagcccctcccagccccccttgatggacaaagaaaaaaaagaggcggccgacgctacaggaagatgaaagagagactgggtctgacggaaattagaaagcaggcgaatagaatgagtttcggggagattgaggaggatgcttaccaggaggatcttggattttcacttggccacctcgacgctgccgcggatcccgccgaagcagagcgcaggatatggagagaagtacaccatcccaggcctctgcttggtcatggactccagcgaggactacatcctacacccggaccaggcgattgcgaaccaacgggtggccgagaggagggcgggtag

SEQ ID NO: 297100 - DNA, 831 bp, Artificial Sequence
  derived and/or modified sequence
atgagcctggccgacgagctgctggccgacctggaggaggccgccgaggaggaggagggaggcagttatggggaggaggaggaggagccagcaatcgaggacgtgcaggaagagactcagcttgatctgtcaggagacagcgtgaaaacaatcgccaaattatgggattcaaagatgtttgcagagattatgatgaagatcgaagaatatatctccaagcaggcgaaggcctctgaagtaatgggtcccgtggaggccgctccagagtaccgcgtcattgtcgatgccaataacctgaccgtggagatagagaacgagcttaatatcattcataaatttatccgcgataagtactctaaaagatttcccgaactggagagtctcgtcccgaacgctctggactacattcgcactgtgaaggaactcggtaattcattggataagtgcaagaacaacgaaaatctgcaacagattctgaccaacgcaactatcatggtcgtcagcgttacagcttctactacccagggccaacagctgagtgaggaggagctagagaggcttgaggaagcttgcgatatggccttagagctaaatgcttcaaagcatagaatttatgaatacgtggaatctcggatgtctttcatcgcacctaacctgtcgatcatcattggtgcatcaacagctgcaaagatcatgggggtggcaggtggattaacaaatctcagtaaaatgcctgcatgtaacataatgctgttaggcgctcaacggaagaccctctctggctttagctcaacatccgtacttcctcataccggatatatttaccactag

SEQ ID NO: 297101 - DNA, 855 bp, Artificial Sequence
  derived and/or modified sequence
atgagcctggccgacgagctgctggccgacctggaggaggccgccgaagaggaggagggggggtcatacggcgaggaggaagaggagccagccatcgaagatgtgcaagaagaaacacagttggacctatctggggattcagtgaaaacaatcgccaagctgtgggacagcaaaatgttcgccgagatcatgatgaagatcgaggagtacatatcaaagcaggcaaaggctagcgaagtaatggggcccgtagaggctgctccagagtatcgcgtgattgtggatgctaataacctgaccgttgagatcgaaaatgagctaaatattatccataagtttattcgggacaaatactccaagcggttccctgagttggaatccctcgtccccaatgctctcgactatatccgaactgtcaaagagttggggaactctctcgacaagtgtaaaaataatgagaacctccaacagattcttactaacgcaaccataatggtggtgagtgtgaccgcaagcaccacccaaggccagcagctgtccgaggaggagctggagagactggaagaagcctgcgacatggctctggagttaaacgcctccaaacaccggatctatgagtacgtggagtcccgtatgtcttttattgcccctaacctatccatcattatcggggcctccactgcagcaaaaattatgggggtcgctggaggcctcaccaatctgagcaaaatgccagcatgtaacatcatgctgcttggagcccagaggaagactctgtcaggatttagtagtacctcagtgcttccacatacaggatatatttaccattctgatatcgtgcagagccttccctag

SEQ ID NO: 297102 - DNA, 786 bp, Artificial Sequence
  derived and/or modified sequence
atgagcctggccgacgagctgctggccgacctggaggaggccgccgaagaggaggaaggcgggtcttatggggaagaggaggaggagccagccattgaagatgtgcaggaggagacccaactggatttatctggggattccgtcaagaccatcgcaaagctgtgggacagcaaaatgtttgccgagattatgatgaaaatcgaagagtatatctctaagcaggccaaagcctcagaggtgatgggccccgtggaggctgcaccagaataccgcgttatcgttgacgctaacaatctcaccgtagagattgagaacgaattgaacattatccataagttcattcgggataagtatagcaagcgcttccctgaactggagagcctggtccctaacgcgctggattacatccggaccgtgaaggaactggggaattcgctggacaagtgtaaaaataacgagaatctgcagcagatcttaacaaatgctacaatcatggtagtctctgtcaccgcctctactacacagggccagcaactaagtgaagaggaactagaaaggctcgaggaagcctgcgatatggcgctcgaattgaatgcgtccaagcacaggatctacgagtacgtggagagcagaatgtccttcatcgccccgaatctgtccattatcattggtgccagcacggctgcgaagatcatgggagtcgctggtggcctaactaatctgagtaaaatgcccgcatgcaatattatgctcttgggagcgcagcggaaaaccctcagcggatag

SEQ ID NO: 297103 - DNA, 1095 bp, Artificial Sequence
  derived and/or modified sequence
atgtcacttgctgacgaactgctggcagacttagaggaggcggcagaagaagaggagggcggttcctacggagaggaggaagaggagccagctattgaagacgttcaggaagagactcagctggacctgtcaggggattccgttaagaccatcgcaaagttatgggactctaaaatgttcgcagaaattatgatgaagatcgaggaatacataagcaaacaggctaaggctagcgaagtgatgggccctgtggaggctgcacccgaatatagagtgatcgttgacgctaacaacttaactgtggagatcgaaaatgaactgaacatcattcataagttcattagagataaatactctaaacgcttccctgagctggagagccttgtgcccaacgccctggattatatcagaactgttaaggaactgggaaattccctcgataagtgtaagaacaacgaaaaccttcaacagatcctcacgaacgctacgatcatggtagtgagtgtgaccgcttccacaacacaggggcagcagctgagcgaggaagagctggaacgactggaagaagcctgtgacatggccttagagctcaatgcatccaagcatcggatctacgaatatgtcgagagccgaatgagctttatagcgcctaacctctccataatcataggggctagcactgctgctaagatcatgggtgtagcaggagggctcacaaatctgtccaagatgccggcatgcaatatcatgcttctgggcgctcaacgaaagacactttctggcttttccagcacttctgtcctaccgcataccgggtatatctatcattccgatattgtgcagtctctgccccctgatctacgccgaaaagccgctagactggtagccgctaagtgtaccttggctgctagagtcgattcttttcatgagtccactgagggaaaagtgggctacgagttgaaggacgaaatcgagagaaagtttgataaatggcagaggcgcaggtggttgcgcccaaccagatcaatttcacccgcttggttgagtagctccaggtctcgggcaagaagagtcgctctatgcccacctgagtag

SEQ ID NO: 297104 - DNA, 1500 bp, Artificial Sequence
  derived and/or modified sequence
atgagtctcgctgacgaactgctcgctgacctcgaagaagcggctgaagaggaagaaggaggctcctacggcgaggaagaggaagagcctgccattgaagacgtccaggaggagacccagcttgacctgagcggagatagcgtcaaaaccattgcaaaactgtgggattctaagatgtttgccgaaattatgatgaaaatcgaggaatatatcagtaagcaagctaaggcgtctgaagtgatgggccctgtggaagccgcacccgagtaccgagtaatagttgacgctaacaacctgaccgtcgagattgaaaacgagctgaacataatccacaaatttattcgtgacaagtattcaaagagatttcccgagctggagagtctggtacctaacgcccttgattacattaggaccgtgaaggagctcggaaactctttagacaaatgcaagaacaacgaaaatctacagcaaatactgacgaacgcaaccataatggtggtgagcgttacagcctctaccactcaagggcagcagttaagcgaggaggagctggaaaggctggaggaggcatgcgacatggctctcgaactaaatgcctccaagcacagaatctatgagtatgtagagtccagaatgtcctttattgcccctaatctaagtattatcatcggcgctagtacggctgccaagattatgggggttgcaggcggtctaacaaacttgtctaaaatgcccgcatgtaatatcatgttgctgggtgcgcagaggaaaacccttagcggcttttcctctacttccgtgctgccccataccggatatatatatcacagcgacatagtccagtccctcccacctgacctaagaagaaaggcggcacgtctggtcgcagccaaatgcaccctggctgccagagtcgactccttccatgagagcaccgagggaaaagtgggctacgagctgaaggatgagatcgagaggaaattcgataagtggcaggagccccctcctgtgaagcaggtcaagcctctccctgcacccctggacggtcagcgaaagaaacgcggaggacgaagataccggaagatgaaagaacgattgggcttaaccgaaatcaggaagcaagcaaatcgaatgagctttggagaaattgaagaggacgcctaccaggaagatctcggcttttccctaggacacctgggaaagagcggttctgggagggtgaggcagacgcaggtgaacgaggccacgaaggcgagaatctctaagaccctccaacgtactctgcagaaacagtctgtcgtttacgggggaaaatccacgattcgggatcgctcctctggtaccgcgtcctctgtcgcctttacacctctgcaggggctcgagatcgtcaatcctcaggctgccgagaaaaaagttgctgaggcgaaccagaagtactttagcagcatggctgagtttctgaaggtgaaaggcgagaagtctggactgatgagtacctag

SEQ ID NO: 297105 - DNA, 1353 bp, Artificial Sequence
  derived and/or modified sequence
atgagcctcgcggacgagctgctagccgacctggaggaggccgctgaggaagaagaaggaggctcctacggagaggaggaggaggagcccgcaatcgaggatgttcaagaggaaacacagctggacctgagcggcgatagtgtaaagacaatcgccaagctgtgggactcaaaaatgttcgccgaaatcatgatgaagatcgaggagtatatctcaaaacaggcaaaggcctctgaggtgatgggcccagtggaggccgctcccgaatacagagtgatcgtggatgcaaacaacctgacggtcgagatcgaaaatgagctgaatatcatccacaaattcattcgagataagtactccaagaggtttccagaacttgagtctttggtgcccaacgcgctagattacatcagaacagtaaaggaactggggaattccctagacaaatgcaagaacaacgagaatctgcagcagattctgactaatgctactatcatggttgtcagcgtgaccgcaagtacaacacagggacaacagctgtccgaggaagaactggaaagactcgaggaggcatgtgatatggcgctagagctcaacgcctctaaacatcggatttatgagtacgtagagtctcgaatgagcttcatagcccctaatttgtctatcatcattggggcaagtaccgctgccaagattatgggagttgctggaggcctcactaatctgagcaagatgcccgcttgcaacattatgttgctgggcgcacagagaaagaccttgtctggatttagcagcacatctgtgctgccacacaccggatacatttatcactcagacattgtccagtcactgccacctgacctgcggcgaaaggcagcacgacttgtggccgcaaagtgcacgttggccgctcgggttgactccttccacgagtctaccgaaggaaaggtcggctatgagctaaaagatgagatcgagcgcaaatttgacaagtggcaagagccaccccctgtcaagcaggtgaagcccctgcccgcacccctggacggacaaaggaagaagcgcggtgggagacgctaccggaaaatgaaggaacggctggggctgacagagatcaggaaacaagccaatcgaatgagttttggagagattgaagaggatgcctaccaggaggatctgggtttctcactcgggcatctcgatgccgcagccgaccccgctgaagccgagcgccgtatatggagagaggtccaccatcccagacctctgctgggtcacggcctgcaacgaggcctccacccaaccccagggcctggggactgtgagcctactggtggcagggaggagggtgggtag

SEQ ID NO: 297106 - DNA, 831 bp, Artificial Sequence
  derived and/or modified sequence
atgagtctggctgatgagttgcttgctgacctcgaggaggcggcagaagaagaagagggcggttcctatggagaggaggaggaggaacccgcaatagaggatgtgcaggaagaaacgcagcttgacctaagtggtgacagcgtcaaaactattgccaaactttgggatagtaaaatgtttgccgagattatgatgaagattgaagaatacatttcaaaacaggctaaagcttccgaggtcatgggtcccgtggaggctgcaccagagtacagggtcatagtagacgccaacaacctaacagtcgagatcgagaatgagctcaacatcattcataagttcatcagggataagtacagtaagcgattcccggaactcgagtcacttgtacctaatgccctggactacatccggacggttaaagagcttggcaattcattggacaaatgtaaaaacaacgaaaatctgcagcagatccttactaatgctaccatcatggttgttagcgtgactgcctcaactacccaaggacaacagctgtccgaggaggagctcgagagacttgaggaagcatgtgacatggccctcgagctcaacgcatctaagcacaggatttatgaatatgtagaatctcgcatgagctttatagcccctaatctgtctatcatcattggagcaagcaccgctgcgaagatcatgggagtggccggaggactaaccaacctgtcaaagatgcccgcatgcaacattatgctgttaggggcacagcgcaaaaccctctccggattctctagtacctccgttcttccacacaccggatatatctatcattag

SEQ ID NO: 297107 - DNA, 855 bp, Artificial Sequence
  derived and/or modified sequence
atgtctctggccgatgaacttctggccgatctcgaggaagccgctgaggaagaagaaggtggctcttacggagaggaagaggaggagccggctatcgaggatgttcaagaggagactcaactcgatctgtccggggactccgtgaagaccattgctaaattgtgggatagcaagatgtttgccgagattatgatgaagatagaagaatatatcagtaagcaagcaaaggcctccgaggttatgggtccagttgaagcagcccctgagtaccgtgtcatcgtggatgcaaataatctcaccgttgagatcgaaaacgaacttaacatcatccacaaattcatcagagataaatattctaagcgattccctgagctggagtctctggtgcctaatgccctcgactacattaggactgttaaggaactcggaaattctctggacaagtgcaagaataacgagaacttgcagcagattctgaccaatgctaccattatggttgtttccgtcaccgcttcgactacccagggtcagcagctcagcgaagaggaactggagagattagaggaagcatgtgacatggccctggagttgaacgcctctaagcaccggatttatgagtacgtagaaagcagaatgagctttatagcaccaaacctgagcattataatcggcgctagcactgcagccaagatcatgggagtggcaggcggactgacgaacctctctaaaatgcccgcatgcaatatcatgttgcttggggctcagcgaaagaccctgtcaggcttttcttcaacaagcgtgctgccccacactgggtatatctaccactcggacatagtacagagtctgccttag

SEQ ID NO: 297108 - DNA, 786 bp, Artificial Sequence
  derived and/or modified sequence
atgtccctagccgacgaactgttggccgatctggaggaggctgcagaagaggaggaaggcggttcttatggcgaggaggaggaagaacccgcaatagaagacgtacaggaggagacccagttagatcttagtggcgacagcgttaagaccatcgcaaagctgtgggatagtaagatgtttgctgagatcatgatgaagattgaagaatatatctccaagcaggccaaggcatcagaggtcatgggaccggtagaagcagcccctgaatatcgggttatcgtagacgcgaataatttgacagtcgaaattgagaatgagctaaacattatccacaagttcattcgggataaatattccaaacggttccccgagctcgagagtctggtgccaaatgcccttgactacatccggaccgttaaagaattgggcaactccctcgataagtgcaagaacaacgagaatctccagcagattttgaccaacgctaccatcatggtggtgtcagtcaccgcgtccactacgcagggacagcagctttcagaggaggaactcgaacgcctggaggaagcatgcgacatggcgctggagctgaatgcaagcaagcaccggatttacgagtatgtggagtcacgaatgtccttcattgctccgaacctatcaatcattataggggcatccacggcagctaaaatcatgggtgtggccggaggactgacaaacctgtcgaaaatgcccgcatgcaatatcatgctcctcggggcacaacggaagactttatccgggtag

SEQ ID NO: 297109 - DNA, 1130 bp, Artificial Sequence
  derived and/or modified sequence
agaaacagtggtgcgcggagaggagaggcctcgggatgtctctggcagatgagctcttagctgatctcgaagaggcagcagaagaggaggaaggaggaagctatggggaggaagaagaggagccagcgatcgaggatgtgcaggaggagacacagctggatctttccggggattcagtcaagaccatcgccaagctatgggatagtaagatgtttgctgagattatgatgaagattgaggagtatatcagcaagcaagccaaagcttcagaagtgatgggaccagtggaggccgcgcctgaataccgcgtcatcgtggatgccaacaacctgaccgtggagatcgaaaacgagctgaacatcatccataagttcatccgggataagtactcaaagagattccctgaactggagtccttggtccccaatgcactggattacatccgcacggtcaaggagctgggcaacagcctggacaagtgcaagaacaatgagaacctgcagcagatcctcaccaatgccaccatcatggtcgtcagcgtcaccgcctccaccacccaggggcagcagctgtcggaggaggagctggagcggctggaggaggcctgcgacatggcgctggagctgaacgcctccaagcaccgcatctacgagtatgtggagtcccggatgtccttcatcgcacccaacctgtccatcattatcggggcatccacggccgccaagatcatgggtgtggccggcggcctgaccaacctctccaagatgcccgcctgcaacatcatgctgctcggggcccagcgcaagacgctgtcgggcttctcgtctacctcagtgctgccccacaccggctacatctaccacagtgacatcgtgcagtccctgccaccggatctgcggcggaaagcggcccggctggtggccgccaagtgcacactggcagcccgtgtggacagtttccacgagagcacagaagggaaggtgggctacgaactgaaggatgagatcgagcgcaaattcgacaagtggcagagaagaaggtggctgaggccaaccagaagtatttctccagcatggctgagttcctcaaggtcaagggcgagaagagtggccttatgtccacctgaatga

SEQ ID NO: 297110 - DNA, 2126 bp, Artificial Sequence
  derived and/or modified sequence
cgaatccctgcttaaaggccttgctttcttgtctaacgccgcaaccagtcctctgagttgccaacgtctttcttcttgtctcgacgccccgtcgtccggccacagcgattctctgcttagcaggatcggtccacagcgggacgtgagtccctttcctcctcgcggcttaccgcctctctccgcctagtgccaggtgctaataaagttgttgtttcaaatgcggccaggaacatcgcgagcggggaccaatcagagagtagctttgcctctataacggcgcgagagtgagacgtcatcggtgagcgactaacgctagaaacagtggtgcgcggagaggagaggcctcgggatgtctctggcagatgagctcttagctgatctcgaagaggcagcagaagaggaggaaggaggaagctatggggaggaagaagaggagccagcgatcgaggatgtgcaggaggagacacagctggatctttccggggattcagtcaagaccatcgccaagctatgggatagtaagatgtttgctgagattatgatgaagattgaggagtatatcagcaagcaagccaaagcttcagaagtgatgggaccagtggaggccgcgcctgaataccgcgtcatcgtggatgccaacaacctgaccgtggagatcgaaaacgagctgaacatcatccataagttcatccgggataagtactcaaagagattccctgaactggagtccttggtccccaatgcactggattacatccgcacggtcaaggagctgggcaacagcctggacaagtgcaagaacaatgagaacctgcagcagatcctcaccaatgccaccatcatggtcgtcagcgtcaccgcctccaccacccaggggcagcagctgtcggaggaggagctggagcggctggaggaggcctgcgacatggcgctggagctgaacgcctccaagcaccgcatctacgagtatgtggagtcccggatgtccttcatcgcacccaacctgtccatcattatcggggcatccacggccgccaagatcatgggtgtggccggcggcctgaccaacctctccaagatgcccgcctgcaacatcatgctgctcggggcccagcgcaagacgctgtcgggcttctcgtctacctcagtgctgccccacaccggctacatctaccacagtgacatcgtgcagtccctgccaccggatctgcggcggaaagcggcccggctggtggccgccaagtgcacactggcagcccgtgtggacagtttccacgagagcacagaagggaaggtgggctacgaactgaaggatgagatcgagcgcaaattcgacaagtggcaggagccgccgcctgtgaagcaggtgaagccgctgcctgcgcccctggatggacagcggaagaagcgaggcggccgcaggtaccgcaagatgaaggagcggctggggctgacggagatccggaagcaggccaaccgtatgagcttcggagagatcgaggaggacgcctaccaggaggacctgggattcagcctgggccacctgggcaagtcgggcagtgggcgtgtgcggcagacacaggtaaacgaggccaccaaggccaggatctccaagacgctgcagcggaccctgcagaagcagagcgtcgtatatggcgggaagtccaccatccgcgaccgctcctcgggcacggcctccagcgtggccttcaccccactccagggcctggagattgtgaacccacaggcggcagagaagaaggtggctgaggccaaccagaagtatttctccagcatggctgagttcctcaaggtcaagggcgagaagagtggccttatgtccacctgaatgactgcgtgtgtccaaggtggcttcccactgaagggacacagaggtccagtccttctgaagggctaggatcgggttctggcagggagaacctgccctgccactggccccattgctgggactgcccagggaggaggccttggaagagtccggcctggcctcccccaggaccgagatcaccgcccagtatgggctagagcaggtcttcatcatgccttgtcttttttaactgagaaaggagattttttgaaaagagtacaattaaaaggacattgtc

SEQ ID NO: 297111 - DNA, 1744 bp, Artificial Sequence
  derived and/or modified sequence
agaaacagtggtgcgcggagaggagaggcctcgggatgtctctggcagatgagctcttagctgatctcgaagaggcagcagaagaggaggaaggaggaagctatggggaggaagaagaggagccagcgatcgaggatgtgcaggaggagacacagctggatctttccggggattcagtcaagaccatcgccaagctatgggatagtaagatgtttgctgagattatgatgaagattgaggagtatatcagcaagcaagccaaagcttcagaagtgatgggaccagtggaggccgcgcctgaataccgcgtcatcgtggatgccaacaacctgaccgtggagatcgaaaacgagctgaacatcatccataagttcatccgggataagtactcaaagagattccctgaactggagtccttggtccccaatgcactggattacatccgcacggtcaaggagctgggcaacagcctggacaagtgcaagaacaatgagaacctgcagcagatcctcaccaatgccaccatcatggtcgtcagcgtcaccgcctccaccacccaggggcagcagctgtcggaggaggagctggagcggctggaggaggcctgcgacatggcgctggagctgaacgcctccaagcaccgcatctacgagtatgtggagtcccggatgtccttcatcgcacccaacctgtccatcattatcggggcatccacggccgccaagatcatgggtgtggccggcggcctgaccaacctctccaagatgcccgcctgcaacatcatgctgctcggggcccagcgcaagacgctgtcgggcttctcgtctacctcagtgctgccccacaccggctacatctaccacagtgacatcgtgcagtccctgccaccggatctgcggcggaaagcggcccggctggtggccgccaagtgcacactggcagcccgtgtggacagtttccacgagagcacagaagggaaggtgggctacgaactgaaggatgagatcgagcgcaaattcgacaagtggcaggagccgccgcctgtgaagcaggtgaagccgctgcctgcgcccctggatggacagcggaagaagcgaggcggccgcaggtaccgcaagatgaaggagcggctggggctgacggagatccggaagcaggccaaccgtatgagcttcggagagatcgaggaggacgcctaccaggaggacctgggattcagcctgggccacctggacgctgcagcggaccctgcagaagcagagcgtcgtatatggcgggaagtccaccatccgcgaccgctcctcgggcacggcctccagcgtggccttcaccccactccagggcctggagattgtgaacccacaggcggcagagaagaaggtggctgaggccaaccagaagtatttctccagcatggctgagttcctcaaggtcaagggcgagaagagtggccttatgtccacctgaatgactgcgtgtgtccaaggtggcttcccactgaagggacacagaggtccagtccttctgaagggctaggatcgggttctggcagggagaacctgccctgccactggccccattgctgggactgcccagggaggaggccttggaagagtccggcctggcctcccccaggaccgagatcaccgcccagtatgggctagagcaggtcttcatcatgccttgtcttttttaactgagaaaggagattttttgaaaagagtacaattaaaaggacattgtc

SEQ ID NO: 297112 - DNA, 886 bp, Artificial Sequence
  derived and/or modified sequence
tggtgcgcggagaggagagtttttagggaacgctgctgtccctccccaggcctcgggatgtctctggcagatgagctcttagctgatctcgaagaggcagcagaagaggaggaaggaggaagctatggggaggaagaagaggagccagcgatcgaggatgtgcaggaggagacacagctggatctttccggggattcagtcaagaccatcgccaagctatgggatagtaagatgtttgctgagattatgatgaagattgaggagtatatcagcaagcaagccaaagcttcagaagtgatgggaccagtggaggccgcgcctgaataccgcgtcatcgtggatgccaacaacctgaccgtggagatcgaaaacgagctgaacatcatccataagttcatccgggataagtactcaaagagattccctgaactggagtccttggtccccaatgcactggattacatccgcacggtcaaggagctgggcaacagcctggacaagtgcaagaacaatgagaacctgcagcagatcctcaccaatgccaccatcatggtcgtcagcgtcaccgcctccaccacccaggggcagcagctgtcggaggaggagctggagcggctggaggaggcctgcgacatggcgctggagctgaacgcctccaagcaccgcatctacgagtatgtggagtcccggatgtccttcatcgcacccaacctgtccatcattatcggggcatccacggccgccaagatcatgggtgtggccggcggcctgaccaacctctccaagatgcccgcctgcaacatcatgctgctcggggcccagcgcaagacgctgtcgggcttctcgtctacctcagtgctgccccacaccggctacatctaccaca

SEQ ID NO: 297113 - DNA, 928 bp, Artificial Sequence
  derived and/or modified sequence
ggtgagcgactaacgctagaaacagtggtgcgcggagaggagagggaacgctgctgtccctccccaggcctcgggatgtctctggcagatgagctcttagctgatctcgaagaggcagcagaagaggaggaaggaggaagctatggggaggaagaagaggagccagcgatcgaggatgtgcaggaggagacacagctggatctttccggggattcagtcaagaccatcgccaagctatgggatagtaagatgtttgctgagattatgatgaagattgaggagtatatcagcaagcaagccaaagcttcagaagtgatgggaccagtggaggccgcgcctgaataccgcgtcatcgtggatgccaacaacctgaccgtggagatcgaaaacgagctgaacatcatccataagttcatccgggataagtactcaaagagattccctgaactggagtccttggtccccaatgcactggattacatccgcacggtcaaggagctgggcaacagcctggacaagtgcaagaacaatgagaacctgcagcagatcctcaccaatgccaccatcatggtcgtcagcgtcaccgcctccaccacccaggggcagcagctgtcggaggaggagctggagcggctggaggaggcctgcgacatggcgctggagctgaacgcctccaagcaccgcatctacgagtatgtggagtcccggatgtccttcatcgcacccaacctgtccatcattatcggggcatccacggccgccaagatcatgggtgtggccggcggcctgaccaacctctccaagatgcccgcctgcaacatcatgctgctcggggcccagcgcaagacgctgtcgggcttctcgtctacctcagtgctgccccacaccggctacatctaccacagtgacatcgtgcagtccctgccac

SEQ ID NO: 297114 - DNA, 854 bp, Artificial Sequence
  derived and/or modified sequence
ggagaccacggggagcgggaggctgggctcctgggtctgggagaagaagtgtgtgaggaaaaaggcctcgggatgtctctggcagatgagctcttagctgatctcgaagaggcagcagaagaggaggaaggaggaagctatggggaggaagaagaggagccagcgatcgaggatgtgcaggaggagacacagctggatctttccggggattcagtcaagaccatcgccaagctatgggatagtaagatgtttgctgagattatgatgaagattgaggagtatatcagcaagcaagccaaagcttcagaagtgatgggaccagtggaggccgcgcctgaataccgcgtcatcgtggatgccaacaacctgaccgtggagatcgaaaacgagctgaacatcatccataagttcatccgggataagtactcaaagagattccctgaactggagtccttggtccccaatgcactggattacatccgcacggtcaaggagctgggcaacagcctggacaagtgcaagaacaatgagaacctgcagcagatcctcaccaatgccaccatcatggtcgtcagcgtcaccgcctccaccacccaggggcagcagctgtcggaggaggagctggagcggctggaggaggcctgcgacatggcgctggagctgaacgcctccaagcaccgcatctacgagtatgtggagtcccggatgtccttcatcgcacccaacctgtccatcattatcggggcatccacggccgccaagatcatgggtgtggccggcggcctgaccaacctctccaagatgcccgcctgcaacatcatgctgctcggggcccagcgcaagacgctgtcggg

SEQ ID NO: 297115 - DNA, 1095 bp, Artificial Sequence
  derived and/or modified sequence
atgagcctggccgacgagctgctggccgacctggaggaggccgccgaggaggaggagggcggcagctacggcgaggaggaggaggagcccgccatcgaggacgtgcaggaggagacccagctggacctgagcggcgacagcgtgaagaccatcgccaagctgtgggacagcaagatgttcgccgagatcatgatgaagatcgaggagtacatcagcaagcaggccaaggccagcgaggtgatgggccccgtggaggccgcccccgagtacagagtgatcgtggacgccaacaacctgaccgtggagatcgagaacgagctgaacatcatccacaagttcatcagagacaagtacagcaagagattccccgagctggagagcctggtgcccaacgccctggactacatcagaaccgtgaaggagctgggcaacagcctggacaagtgcaagaacaacgagaacctgcagcagatcctgaccaacgccaccatcatggtggtgagcgtgaccgccagcaccacccagggccagcagctgagcgaggaggagctggagagactggaggaggcctgcgacatggccctggagctgaacgccagcaagcacagaatctacgagtacgtggagagcagaatgagcttcatcgcccccaacctgagcatcatcatcggcgccagcaccgccgccaagatcatgggcgtggccggcggcctgaccaacctgagcaagatgcccgcctgcaacatcatgctgctgggcgcccagagaaagaccctgagcggcttcagcagcaccagcgtgctgccccacaccggctacatctaccacagcgacatcgtgcagagcctgccccccgacctgagaagaaaggccgccagactggtggccgccaagtgcaccctggccgccagagtggacagcttccacgagagcaccgagggcaaggtgggctacgagctgaaggacgagatcgagagaaagttcgacaagtggcagagaagaagatggctgagacccaccagaagcatcagccccgcctggctgagcagcagcagaagcagagccagaagagtggccctgtgcccccccgagtag

SEQ ID NO: 297116 - DNA, 1500 bp, Artificial Sequence
  derived and/or modified sequence
atgagcctggccgacgagctgctggccgacctggaggaggccgccgaggaggaggagggcggcagctacggcgaggaggaggaggagcccgccatcgaggacgtgcaggaggagacccagctggacctgagcggcgacagcgtgaagaccatcgccaagctgtgggacagcaagatgttcgccgagatcatgatgaagatcgaggagtacatcagcaagcaggccaaggccagcgaggtgatgggccccgtggaggccgcccccgagtacagagtgatcgtggacgccaacaacctgaccgtggagatcgagaacgagctgaacatcatccacaagttcatcagagacaagtacagcaagagattccccgagctggagagcctggtgcccaacgccctggactacatcagaaccgtgaaggagctgggcaacagcctggacaagtgcaagaacaacgagaacctgcagcagatcctgaccaacgccaccatcatggtggtgagcgtgaccgccagcaccacccagggccagcagctgagcgaggaggagctggagagactggaggaggcctgcgacatggccctggagctgaacgccagcaagcacagaatctacgagtacgtggagagcagaatgagcttcatcgcccccaacctgagcatcatcatcggcgccagcaccgccgccaagatcatgggcgtggccggcggcctgaccaacctgagcaagatgcccgcctgcaacatcatgctgctgggcgcccagagaaagaccctgagcggcttcagcagcaccagcgtgctgccccacaccggctacatctaccacagcgacatcgtgcagagcctgccccccgacctgagaagaaaggccgccagactggtggccgccaagtgcaccctggccgccagagtggacagcttccacgagagcaccgagggcaaggtgggctacgagctgaaggacgagatcgagagaaagttcgacaagtggcaggagcccccccccgtgaagcaggtgaagcccctgcccgcccccctggacggccagagaaagaagagaggcggcagaagatacagaaagatgaaggagagactgggcctgaccgagatcagaaagcaggccaacagaatgagcttcggcgagatcgaggaggacgcctaccaggaggacctgggcttcagcctgggccacctgggcaagagcggcagcggcagagtgagacagacccaggtgaacgaggccaccaaggccagaatcagcaagaccctgcagagaaccctgcagaagcagagcgtggtgtacggcggcaagagcaccatcagagacagaagcagcggcaccgccagcagcgtggccttcacccccctgcagggcctggagatcgtgaacccccaggccgccgagaagaaggtggccgaggccaaccagaagtacttcagcagcatggccgagttcctgaaggtgaagggcgagaagagcggcctgatgagcacctag

SEQ ID NO: 297117 - DNA, 1353 bp, Artificial Sequence
  derived and/or modified sequence
atgagcctggccgacgagctgctggccgacctggaggaggccgccgaggaggaggagggcggcagctacggcgaggaggaggaggagcccgccatcgaggacgtgcaggaggagacccagctggacctgagcggcgacagcgtgaagaccatcgccaagctgtgggacagcaagatgttcgccgagatcatgatgaagatcgaggagtacatcagcaagcaggccaaggccagcgaggtgatgggccccgtggaggccgcccccgagtacagagtgatcgtggacgccaacaacctgaccgtggagatcgagaacgagctgaacatcatccacaagttcatcagagacaagtacagcaagagattccccgagctggagagcctggtgcccaacgccctggactacatcagaaccgtgaaggagctgggcaacagcctggacaagtgcaagaacaacgagaacctgcagcagatcctgaccaacgccaccatcatggtggtgagcgtgaccgccagcaccacccagggccagcagctgagcgaggaggagctggagagactggaggaggcctgcgacatggccctggagctgaacgccagcaagcacagaatctacgagtacgtggagagcagaatgagcttcatcgcccccaacctgagcatcatcatcggcgccagcaccgccgccaagatcatgggcgtggccggcggcctgaccaacctgagcaagatgcccgcctgcaacatcatgctgctgggcgcccagagaaagaccctgagcggcttcagcagcaccagcgtgctgccccacaccggctacatctaccacagcgacatcgtgcagagcctgccccccgacctgagaagaaaggccgccagactggtggccgccaagtgcaccctggccgccagagtggacagcttccacgagagcaccgagggcaaggtgggctacgagctgaaggacgagatcgagagaaagttcgacaagtggcaggagcccccccccgtgaagcaggtgaagcccctgcccgcccccctggacggccagagaaagaagagaggcggcagaagatacagaaagatgaaggagagactgggcctgaccgagatcagaaagcaggccaacagaatgagcttcggcgagatcgaggaggacgcctaccaggaggacctgggcttcagcctgggccacctggacgccgccgccgaccccgccgaggccgagagaagaatctggagagaggtgcaccaccccagacccctgctgggccacggcctgcagagaggcctgcaccccacccccggccccggcgactgcgagcccaccggcggcagagaggagggcggctag

SEQ ID NO: 297118 - DNA, 831 bp, Artificial Sequence
  derived and/or modified sequence
atgagcctggccgacgagctgctggccgacctggaggaggccgccgaggaggaggagggcggcagctacggcgaggaggaggaggagcccgccatcgaggacgtgcaggaggagacccagctggacctgagcggcgacagcgtgaagaccatcgccaagctgtgggacagcaagatgttcgccgagatcatgatgaagatcgaggagtacatcagcaagcaggccaaggccagcgaggtgatgggccccgtggaggccgcccccgagtacagagtgatcgtggacgccaacaacctgaccgtggagatcgagaacgagctgaacatcatccacaagttcatcagagacaagtacagcaagagattccccgagctggagagcctggtgcccaacgccctggactacatcagaaccgtgaaggagctgggcaacagcctggacaagtgcaagaacaacgagaacctgcagcagatcctgaccaacgccaccatcatggtggtgagcgtgaccgccagcaccacccagggccagcagctgagcgaggaggagctggagagactggaggaggcctgcgacatggccctggagctgaacgccagcaagcacagaatctacgagtacgtggagagcagaatgagcttcatcgcccccaacctgagcatcatcatcggcgccagcaccgccgccaagatcatgggcgtggccggcggcctgaccaacctgagcaagatgcccgcctgcaacatcatgctgctgggcgcccagagaaagaccctgagcggcttcagcagcaccagcgtgctgccccacaccggctacatctaccactag

SEQ ID NO: 297119 - DNA, 855 bp, Artificial Sequence
  derived and/or modified sequence
atgagcctggccgacgagctgctggccgacctggaggaggccgccgaggaggaggagggcggcagctacggcgaggaggaggaggagcccgccatcgaggacgtgcaggaggagacccagctggacctgagcggcgacagcgtgaagaccatcgccaagctgtgggacagcaagatgttcgccgagatcatgatgaagatcgaggagtacatcagcaagcaggccaaggccagcgaggtgatgggccccgtggaggccgcccccgagtacagagtgatcgtggacgccaacaacctgaccgtggagatcgagaacgagctgaacatcatccacaagttcatcagagacaagtacagcaagagattccccgagctggagagcctggtgcccaacgccctggactacatcagaaccgtgaaggagctgggcaacagcctggacaagtgcaagaacaacgagaacctgcagcagatcctgaccaacgccaccatcatggtggtgagcgtgaccgccagcaccacccagggccagcagctgagcgaggaggagctggagagactggaggaggcctgcgacatggccctggagctgaacgccagcaagcacagaatctacgagtacgtggagagcagaatgagcttcatcgcccccaacctgagcatcatcatcggcgccagcaccgccgccaagatcatgggcgtggccggcggcctgaccaacctgagcaagatgcccgcctgcaacatcatgctgctgggcgcccagagaaagaccctgagcggcttcagcagcaccagcgtgctgccccacaccggctacatctaccacagcgacatcgtgcagagcctgccctag

SEQ ID NO: 297120 - DNA, 786 bp, Artificial Sequence
  derived and/or modified sequence
atgagcctggccgacgagctgctggccgacctggaggaggccgccgaggaggaggagggcggcagctacggcgaggaggaggaggagcccgccatcgaggacgtgcaggaggagacccagctggacctgagcggcgacagcgtgaagaccatcgccaagctgtgggacagcaagatgttcgccgagatcatgatgaagatcgaggagtacatcagcaagcaggccaaggccagcgaggtgatgggccccgtggaggccgcccccgagtacagagtgatcgtggacgccaacaacctgaccgtggagatcgagaacgagctgaacatcatccacaagttcatcagagacaagtacagcaagagattccccgagctggagagcctggtgcccaacgccctggactacatcagaaccgtgaaggagctgggcaacagcctggacaagtgcaagaacaacgagaacctgcagcagatcctgaccaacgccaccatcatggtggtgagcgtgaccgccagcaccacccagggccagcagctgagcgaggaggagctggagagactggaggaggcctgcgacatggccctggagctgaacgccagcaagcacagaatctacgagtacgtggagagcagaatgagcttcatcgcccccaacctgagcatcatcatcggcgccagcaccgccgccaagatcatgggcgtggccggcggcctgaccaacctgagcaagatgcccgcctgcaacatcatgctgctgggcgcccagagaaagaccctgagcggctag

SEQ ID NO: 297121 - DNA, 1725 bp, Artificial Sequence
  derived and/or modified sequence
atgctggagaactacggcaacatggtgagcctgggcttccccttccccaagccccccctgatcagccacctggagagagaggtggacccctgcgtgcaggacccccaggacagagagagcctgagctgcagctaccccgtgagcgccgacaagatgtggcccgagaacgagaaggccagcagccagcaggagatcttcgagaacggcgaggcctactggatgaagttcaacagcctgctgaaggtggacagcagagaccccaaggtgagagaggtgtgcgtgcaggacgtgaagctggagaaccagtgggagaccagcatcagagagaagctgagagaggagaaggagggcagcgaggaggtgacctgcaagaagggcaagaaccagaaggtgctgagcaagaacctgaaccccaacagcaagcacagccagtgcaacaaggtgctgatcgcccagaagctgcacgagtgcgccagatgcggcaagaacttcagctggcacagcgacctgatcctgcacgagcagatccacagcggcgagaagccccacgtgtgcaacgagtgcggcaaggccttcaagaccagaaaccagctgagcatgcacagaatcatccacaccggcgagaagcccttcaactgcacccagtgcggcaaggccttcaacagcagaagcgccctgtgcagacacaagaagacccacagcggcgagaagccccacgagtgcagagactgcggcaaggccttcaagaccagaaacagactgtgcatgcaccagctgatccacaccggcgagaagccctacaagtgcaactgctgcggcaaggccttccagttcaagcacagcctgaccatccacggcagaatccacaccggcgagaagccctacgagtgcgaggagtgcggcaaggccttcagcggcagcagcgacctgaccaagcacatcagaatccacaccggcgagagaccctacgagtgcagcaagtgcggcagagccttcagcagaagcagcgacctgagcaagcacaagagaatccacaccagagagaagcactacggctgcccccagtgcggcaaggacttcagcatcaaggccgagctgaccaagcacagaagaatccacaccgaggagaagagatacagatgcgaggagtgcggcaaggccttcagacacaactgcaagagaagagcccacgagagagagcacaccggcgagaagccctaccagtgcagagactgcggcaagaccttccaggaccagcactgcctgaccatccaccagagaatccacaccggcgagaagccctacaagtgcctggagtgcggcaaggccttcagcggcaagagcaacctgaccaaccacagaagaatccacaccggcgagaagccccacaagtgcgaggtgtgcggcatggccttccaccacagcagcgtgctgagacagcacaagagaatccacaccggcgagaagccctacacctgcagcgagtgcggcaccagcttcagacagggcagcgccctgatcggccacaagagagtgcacaccggcgagaagccctacgagtgcgaggagtgcggcaaggccttcagagtgagcagcaacctgaccggccacaagaagagaaagcaccaggtgtggagcacccacgagctggacggcagcagaaagagcctgagccccgtgaccgtgagccagaccagcgtggtgagcatcctgaccagcgcctag

SEQ ID NO: 297122 - DNA, 1725 bp, Artificial Sequence
  derived and/or modified sequence
atgctggagaactatggtaatatggtaagtttgggcttcccgttccccaagccgcccctgattagccacctcgagcgggaggtcgatccgtgcgtgcaagaccctcaggatcgcgaaagcctgagctgctcttatcctgtgagcgccgataagatgtggccggagaacgagaaagcaagcagtcagcaggagattttcgagaacggcgaggcttactggatgaagttcaattctctcctgaaagtcgacagtcgagatcccaaggttcgcgaagtgtgcgtgcaggacgtgaagctcgaaaatcaatgggagacatccatccgtgaaaaactgagggaagagaaagaaggctccgaagaggtgacctgtaagaagggcaaaaaccagaaagtactgtcgaaaaacctgaatcctaattcaaaacatagccagtgtaacaaagtgctgatcgcacaaaaattgcatgagtgtgctaggtgtgggaagaatttcagctggcactccgacttgattctccacgagcagattcatagtggagagaaacctcatgtctgtaatgagtgtgggaaggcctttaagaccagaaaccagctgtctatgcaccggattatccacacaggagaaaaaccttttaattgcacccaatgcgggaaggccttcaactctaggtccgctctttgccgccacaagaaaactcattcaggcgagaagccacacgaatgccgtgattgcggtaaggcctttaagactcgcaaccgcttatgcatgcatcagctcattcacacaggcgagaagccttataagtgtaactgttgcgggaaggcattccagttcaaacacagcctgaccattcacggacggattcatactggggagaagccttatgagtgtgaagagtgcggcaaagctttcagcggttcttcagatctcactaagcacatacggatccacaccggcgaaagaccatatgagtgctcaaaatgtgggcgagcgtttagtcgatctagcgatttgagcaaacacaagcggatccacaccagagagaagcactatggatgccctcagtgtggcaaagatttttcaatcaaagccgagctgaccaagcacaggcgaatccacacggaagaaaagaggtacaggtgcgaagaatgcggcaaggcatttcgtcataactgtaaacgccgtgcacatgagagggagcatacgggagagaagccctatcagtgccgcgactgtggtaagactttccaggaccaacactgtttgaccattcaccagcggatccatactggggagaaaccctataaatgtttagagtgtgggaaagcattttcaggtaaaagtaacctgaccaaccataggagaatccatacaggtgagaaacctcacaaatgtgaggtttgcggaatggcctttcatcattctagcgtcctgcgtcaacacaagcggatccataccggtgagaagccctatacctgtagtgaatgtggtacttcgttccgtcaggggtctgcactgattgggcataagcgtgtccacacgggtgaaaagccctatgagtgcgaggaatgtggcaaagccttccgggtgtcgagcaacctgacaggacacaagaagcgcaagcaccaagtgtggagcacccacgaactggacggcagccgcaaaagtttgtcaccagtcacagtaagtcaaacttcggtggtaagcatcttgacgtcagcatag

SEQ ID NO: 297123 - DNA, 1725 bp, Artificial Sequence
  derived and/or modified sequence
atgctggagaactacggcaacatggtgtccctgggcttccccttccccaagccacccctcatcagccacctggagcgggaggtggacccctgtgtgcaggacccccaggaccgggagagcctgagctgcagctaccctgtgtctgctgacaagatgtggccagaaaatgagaaggccagcagccagcaggagatctttgaaaatggagaggcctactggatgaagttcaacagcctgctgaaggtggacagccgggaccccaaggtgcgggaggtgtgtgtgcaggatgtgaagctggagaaccagtgggagaccagcatccgggagaagctgcgggaggagaaggagggcagcgaggaggtgacctgcaagaagggcaagaaccagaaggtgctgagcaagaacctgaaccccaacagcaagcacagccagtgcaacaaggtgctgattgcccagaagctgcatgaatgtgcccgctgtgggaagaacttctcctggcacagcgacctgatcctgcacgagcagatccacagcggggagaagccccacgtgtgcaatgaatgtgggaaggccttcaagaccaggaaccagctgtccatgcaccgcatcatccacactggagagaagcccttcaactgcacccagtgtgggaaggccttcaacagccgcagcgccctgtgccgccacaagaagacccacagcggggagaagccccatgagtgccgggactgtgggaaggccttcaagaccaggaaccggctgtgcatgcaccagctgatccacactggagagaagccctacaagtgcaactgctgcggcaaggccttccagttcaagcacagcctgaccatccacggccgcatccacactggagagaagccctatgaatgtgaagaatgtgggaaggccttcagcggcagcagtgacctgaccaagcacatccgcatccacactggagagcggccctatgagtgcagcaaatgtggccgggccttcagccgcagcagtgacctgagcaagcacaagaggatccacacccgggagaagcactacggctgcccccagtgtgggaaggacttcagcatcaaggccgagctgaccaagcaccggcgcatccacacagaggagaagcgctaccgctgtgaagaatgtgggaaggccttccgccacaactgcaagaggcgggcccacgagcgggagcacactggagagaagccctaccagtgccgggactgtgggaagaccttccaggaccagcactgcctgaccatccaccagaggatccacactggagagaagccctacaagtgcctggagtgtgggaaggccttcagcggcaagagcaacctgaccaaccaccggcgcatccacactggagagaagccccacaagtgtgaggtgtgtggcatggccttccaccacagctctgtgctgcggcagcacaagaggatccacactggagagaagccctacacctgcagtgaatgtggcaccagcttccggcagggcagcgccctgattggccacaagagggtgcacactggagagaagccctatgaatgtgaagaatgtgggaaggccttccgggtgagcagcaacctgaccggccacaagaagaggaagcaccaggtgtggagcacccatgagctggatggcagcaggaagagcctgagccctgtgacagtgtcccagacctctgtggtgtccatcctgaccagcgcctag

SEQ ID NO: 297124 - DNA, 1725 bp, Artificial Sequence
  derived and/or modified sequence
atgctggagaactacggcaacatggtgagcctgggcttccccttccccaagccccctctaatcagtcaccttgaaagagaggtggatccctgcgtgcaagatccacaggatcgtgagtcactgtcatgctcctaccctgtatccgccgataaaatgtggccagagaatgaaaaagcctcaagccaacaagaaatctttgaaaatggcgaggcgtactggatgaaatttaacagtctgctgaaagtcgactctcgggatcctaaagtcagagaagtttgcgtccaggacgtgaaactagagaatcagtgggagacaagcatcagagagaagcttagggaagaaaaggaagggagtgaggaggtaacgtgcaagaagggaaaaaaccagaaagtgctgtctaagaatctcaaccctaatagcaagcacagtcagtgtaataaagtgctgatcgctcagaagcttcacgaatgcgcgaggtgtgggaaaaactttagctggcactcagacctaattttacacgaacagattcatagcggggagaagccacacgtgtgtaatgaatgcggcaaagcttttaagacgagaaatcagctgagtatgcatcgtattattcataccggggaaaaaccatttaactgtactcaatgtggcaaagcattcaattcccggagcgcactatgtcggcataagaagacacactccggggaaaagccccacgaatgcagagactgcggcaaagcatttaagactcgcaatagactctgcatgcatcagctaatacacaccggcgaaaagccttataaatgtaattgttgcggaaaggcctttcaattcaaacactctttgaccattcatggcagaattcacaccggagaaaagccttatgaatgcgaggagtgcggcaaagctttcagcggcagctctgatcttacaaagcatatcaggatccataccggagagagaccctacgagtgcagcaagtgcggcagggctttcagccggtccagtgacttgtccaaacataagaggatccacactcgggagaaacactatggttgtccccagtgcgggaaagattttagtattaaggccgaactgacgaagcaccggcgaattcacactgaggaaaagcgctacagatgcgaagagtgcggcaaagctttccgccacaattgcaagaggagggcacacgagcgtgagcatactggcgagaagccctatcagtgtagggattgcgggaaaacgttccaggatcagcactgcttgaccattcaccagcggatacacaccggcgagaaaccttacaagtgtctggaatgcggcaaggccttttctggtaaaagcaaccttacaaaccacaggaggattcacactggagaaaagccccacaaatgtgaagtgtgtggcatggccttccaccattcctctgtgctccgccaacacaagcgtatacacaccggcgagaagccttatacctgctcggaatgcggtacctccttccgtcaaggaagcgcacttattggccataagagggtccacactggggagaagccatatgaatgcgaggaatgtggtaaagcgtttcgggtgagcagtaacctgaccggtcataagaagagaaaacaccaggtatggtcgacacacgaattagatggcagccggaagagtctctcacccgttactgtcagccaaaccagcgtagtgtccatattaacatcggcttag

SEQ ID NO: 297125 - DNA, 1725 bp, Artificial Sequence
  derived and/or modified sequence
atgctggagaattatggtaacatggtctcactggggtttccttttcccaaaccacccctaattagtcatctggagcgcgaagtggacccgtgcgtccaggacccacaggatagagaaagcctgtcatgcagttatccagtgagtgcagacaagatgtggcctgagaatgaaaaggcctcatcacaacaggagatctttgagaacggcgaggcctactggatgaagtttaattccctgctgaaagtggattcacgggaccccaaggtaagggaagtgtgcgtgcaagacgtgaagctggaaaatcagtgggaaacctctattcgggagaagctgcgagaggagaaggaaggaagtgaggaagtgacttgcaaaaaaggcaagaaccaaaaggtactaagcaagaacttaaatccaaatagcaaacattcccaatgcaataaagtcttgatcgcgcagaagctacatgagtgcgcacgatgcggaaaaaacttttcttggcactcagacctgatcctgcacgaacagattcattctggggaaaaaccacacgtttgtaacgaatgtgggaaggcgtttaagactagaaaccagctcagcatgcacaggattatccatacgggcgaaaaaccatttaactgtacacagtgtggaaaagcctttaacagccgatccgctctctgtcgccacaagaaaacacattctggagaaaaaccacacgaatgtagagactgcggcaaggctttcaagactcggaaccgtttatgtatgcaccagctgattcatactggcgagaaaccttataagtgcaactgttgtgggaaagcattccagttcaagcattcgctcactattcacggacgcatccacactggtgaaaagccatacgagtgcgaagagtgcggtaaggccttttcggggagctcagacctcaccaagcacatacggatccacaccggagagcgaccatacgagtgttctaaatgcggacgggcttttagccgctcatctgacctctcaaagcataagagaatccacactagagagaagcattacgggtgcccccagtgtgggaaagatttctccataaaggccgagttgaccaagcacagaagaatacacactgaggagaagcggtacagatgcgaggaatgtggtaaggccttccggcataattgcaagcgcagggctcatgaacgcgaacacacgggcgagaagccataccagtgtagagactgcggtaagacattccaagatcaacactgtctaacaatacatcaacgcatccataccggggaaaagccctacaagtgtttagagtgcggcaaggctttctctggcaaatcgaatttgacaaatcaccggaggatccacactggggaaaagccccataagtgtgaggtctgtggaatggcattccatcactcaagcgtgctcagacagcacaagcgcatacacacaggagaaaaaccttacacctgctctgagtgtggaacatctttcagacaggggagtgccctcatcggccacaagcgcgtgcacaccggcgagaagccatacgagtgcgaggagtgtggaaaagccttccgtgtgtcaagtaaccttactgggcacaagaaacggaagcatcaggtgtggtctactcatgagcttgacggctcccgcaagagtctgtcacctgtaacagtctctcagacgtccgtcgtgtctattttaaccagtgcatag

SEQ ID NO: 297126 - protein, 481 aa, Artificial Sequence
  derived and/or modified sequence
MTPALTALLCLGLSLGPRTRVQAGPFPKPTLWAEPGSVISWGSPVTIWCQGSLEAQEYQLDKEGSPEPLDRNNPLEPKNKARFSIPSMTQHHAGRYRCHYYSSAGWSEPSDPLELVMTGFYNKPTLSALPSPVVASGGNMTLRCGSQKGYHHFVLMKEGEHQLPRTLDSQQLHSGGFQALFPVGPVTPSHRWRFTCYYYYTNTPRVWSHPSDPLEILPSGVSRKPSLLTLQGPVLAPGQSLTLQCGSDVGYDRFVLYKEGERDFLQRPGQQPQAGLSQANFTLGPVSPSHGGQYRCYGAHNLSSEWSAPSDPLNILMAGQIYDTVSLSAQPGPTVASGENVTLLCQSRGYFDTFLLTKEGAAHPPLRLRSMYGAHKYQAEFPMSPVTSAHAGTYRCYGSYSSNPHLLSFPSEPLELMVSGHSGGSSLPPTGPPSTPASHAKDYTVENLIRMGMAGLVLVFLGILLFEAQHSQRNPQDAAGR

SEQ ID NO: 297127 - DNA, 1446 bp, Artificial Sequence
  derived and/or modified sequence
atgacccccgccctgaccgccctgctgtgcctgggcctgagcctgggccccagaaccagagtgcaggccggccccttccccaagcccaccctgtgggccgagcccggcagcgtgatcagctggggcagccccgtgaccatctggtgccagggcagcctggaggcccaggagtaccagctggacaaggagggcagccccgagcccctggacagaaacaaccccctggagcccaagaacaaggccagattcagcatccccagcatgacccagcaccacgccggcagatacagatgccactactacagcagcgccggctggagcgagcccagcgaccccctggagctggtgatgaccggcttctacaacaagcccaccctgagcgccctgcccagccccgtggtggccagcggcggcaacatgaccctgagatgcggcagccagaagggctaccaccacttcgtgctgatgaaggagggcgagcaccagctgcccagaaccctggacagccagcagctgcacagcggcggcttccaggccctgttccccgtgggccccgtgacccccagccacagatggagattcacctgctactactactacaccaacacccccagagtgtggagccaccccagcgaccccctggagatcctgcccagcggcgtgagcagaaagcccagcctgctgaccctgcagggccccgtgctggcccccggccagagcctgaccctgcagtgcggcagcgacgtgggctacgacagattcgtgctgtacaaggagggcgagagagacttcctgcagagacccggccagcagccccaggccggcctgagccaggccaacttcaccctgggccccgtgagccccagccacggcggccagtacagatgctacggcgcccacaacctgagcagcgagtggagcgcccccagcgaccccctgaacatcctgatggccggccagatctacgacaccgtgagcctgagcgcccagcccggccccaccgtggccagcggcgagaacgtgaccctgctgtgccagagcagaggctacttcgacaccttcctgctgaccaaggagggcgccgcccacccccccctgagactgagaagcatgtacggcgcccacaagtaccaggccgagttccccatgagccccgtgaccagcgcccacgccggcacctacagatgctacggcagctacagcagcaacccccacctgctgagcttccccagcgagcccctggagctgatggtgagcggccacagcggcggcagcagcctgccccccaccggcccccccagcacccccgccagccacgccaaggactacaccgtggagaacctgatcagaatgggcatggccggcctggtgctggtgttcctgggcatcctgctgttcgaggcccagcacagccagagaaacccccaggacgccgccggcagatag

SEQ ID NO: 297128 - DNA, 1446 bp, Artificial Sequence
  derived and/or modified sequence
atgacccctgcactgaccgcattgctctgtctcggactctcattgggccccaggaccagggtccaggccggaccttttcccaagcccaccctttgggcagagcccggctccgtgatctcctggggcagccccgtcactatatggtgtcagggctccttagaagcgcaagagtaccaacttgataaagagggcagccctgaacctctcgacaggaataaccctttggagcctaaaaataaggcgcggtttagcatacctagtatgactcagcatcacgccggaagatatcgttgtcactactattccagcgcaggttggtccgaaccttctgacccgctggagttagtgatgactggcttttataataaaccgacattatcagctctgccatcccctgtggttgcaagcggtgggaacatgaccctgcgatgtggctcccagaagggataccatcattttgttctgatgaaagaaggcgagcaccagctcccgcgcaccttggatagccagcagctgcactcgggtggcttccaggctttatttcccgttggcccggtgacccctagtcaccgttggagatttacctgctattactactacaccaatacgccacgcgtgtggagccatcctagcgatcctctggagattctgccaagtggcgtgtcccggaagccttccctcctgaccctccaggggccagttctggccccagggcagtccctaacactgcagtgtggatcagatgtcggatacgacagattcgtgttgtacaaggagggagaaagggacttcctccagaggcccggtcagcagcctcaggccggcctaagccaagctaacttcacgctgggacccgtgtctccctcgcacggaggccagtatcgctgttatggcgcccacaacctgagctcagagtggtctgctccatctgatcctctgaacatcctaatggcaggccaaatttacgacacggtgtctttatccgctcagcctggacctacggtcgccagcggagagaatgtcaccctgctgtgccagagtcgagggtacttcgatactttcctgctgaccaaagagggagcagctcaccctccattaagattgcgtagtatgtacggtgcacacaagtaccaagcagaatttcccatgtcgcctgtcacaagcgcccatgctggcacttaccggtgctatggcagctattcctctaacccgcatcttctgagctttccctcggagccactggaactgatggtgagcggtcattctggcggtagcagtctccctcccaccggaccaccctccaccccagcctcacacgctaaagattacacagtggagaacctgattcggatgggcatggccggtctggtattggtctttctggggattctattatttgaagcacaacacagtcagcgaaacccccaggatgcagccggacgttag

SEQ ID NO: 297129 - DNA, 1446 bp, Artificial Sequence
  derived and/or modified sequence
atgaccccagccctgacagccctgctgtgcctgggcctgagcctgggccccaggaccagggtgcaggccggccccttccccaagcccaccctgtgggccgagcccggcagcgtcatctcctggggcagccctgtgaccatctggtgccagggcagcctggaggcccaggagtaccagctggacaaggagggcagccctgagcccctggacaggaacaaccccctggagcccaagaacaaggcccgcttcagcatccccagcatgacccagcaccacgccggccgctaccgctgccactactacagcagcgctggctggagcgagcccagcgaccccctggagctggtgatgacaggcttctacaacaagcccaccctgagcgccctgcccagccctgtggtggccagcggcggcaacatgaccctgcgctgtggcagccagaagggctaccaccactttgtgctgatgaaggagggggagcaccagctgcccaggaccctggacagccagcagctgcacagcggcggcttccaggccctcttccctgtgggccctgtgacccccagccaccgctggaggttcacctgctactactactacaccaacaccccccgggtgtggagccaccccagcgaccccctggagatcctgcccagcggcgtgtccaggaagcccagcctgctgaccctgcagggccctgtgctggcccctggccagagcctgaccctgcagtgtggcagtgatgtgggctatgacagatttgtgctgtacaaggagggggagcgggacttcctgcagaggcctggccagcagccccaggccggcctgagccaggccaacttcaccctgggccctgtgagccccagccacggcggccagtaccgctgctatggagcccacaacctgagcagcgagtggagcgcccccagcgaccccctgaacatcctgatggccggccagatctatgacacagtgtccctgagcgcccagcccggccccaccgtggccagcggagaaaatgtgaccctgctgtgccagagccggggctactttgacaccttcctgctgaccaaggagggcgccgcccacccccccctgcggctgcgctccatgtacggggcccacaagtaccaggccgagttccccatgagccctgtgaccagcgcccatgctggcacctaccgctgctacggcagctacagcagcaacccccacctgctgtccttccccagcgagcccctggagctgatggtgtctggccacagcggcggcagcagcctgccccccaccggcccccccagcaccccagccagccacgccaaggactacacagtggagaacctgatccgcatgggcatggccggcctggtgctggtgttcctgggcatcctgctgtttgaggcccagcacagccagaggaacccccaggatgctgctggaagatag

SEQ ID NO: 297130 - DNA, 1890 bp, Artificial Sequence
  derived and/or modified sequence
catccctctgcagagcgcggggtcaccggaaggagacgccatgacgcccgccctcacagccctgctctgccttgggctgagtctgggccccaggacccgcgtgcaggcagggcccttccccaaacccaccctctgggctgagccaggctctgtgatcagctgggggagccccgtgaccatctggtgtcaggggagcctggaggcccaggagtaccaactggataaagagggaagcccagagcccttggacagaaataacccactggaacccaagaacaaggccagattctccatcccatccatgacacagcaccatgcagggagataccgctgccactattacagctctgcaggctggtcagagcccagcgaccccctggagctggtgatgacaggattctacaacaaacccaccctctcagccctgcccagccctgtggtggcctcaggggggaatatgaccctccgatgtggctcacagaagggatatcaccattttgttctgatgaaggaaggagaacaccagctcccccggaccctggactcacagcagctccacagtggggggttccaggccctgttccctgtgggccccgtgacccccagccacaggtggaggttcacatgctattactattatacaaacaccccccgggtgtggtcccaccccagtgaccccctggagattctgccctcaggcgtgtctaggaagccctccctcctgaccctgcagggccctgtcctggcccctgggcagagcctgaccctccagtgtggctctgatgtcggctacgacagatttgttctgtataaggagggggaacgtgacttcctccagcgccctggccagcagccccaggctgggctctcccaggccaacttcaccctgggccctgtgagcccctcccacgggggccagtacaggtgctatggtgcacacaacctctcctccgagtggtcggcccccagcgaccccctgaacatcctgatggcaggacagatctatgacaccgtctccctgtcagcacagccgggccccacagtggcctcaggagagaacgtgaccctgctgtgtcagtcacggggttattttgacactttccttctgaccaaagaaggggcagcccatcccccactgcgtctgagatcaatgtacggagctcataagtaccaggctgaattccccatgagtcctgtgacctcagcccacgcggggacctacaggtgctacggctcatacagctccaacccccacctgctgtctttccccagtgagcccctggaactcatggtctcaggacactctggaggctccagcctcccacccacagggccgccctccacacctgcctcacacgccaaggattacacagtggagaatctcatccgcatgggcatggcaggcttggtcctggtgttcctcgggattctgttatttgaggctcagcacagccagagaaacccccaagatgcagccgggaggtgaacagcggagaggacaatgcacccttcagcgtggtggagcctcagggacagatctgatgatcccagaaggctctggaggacaatctaggacctccagaggggggtgagatttcaggccacacactgtggaaggtaatcatgtctgatcacaaattttgggtctccaccttacttccaatctatgttgtgaatgcccagttgagacccacggaaaagagctcatgggtgagtgtgaagtgcttctctgtcttaagttcccagagatccttgcctcttggaggccagcaaacactaactcttgaggaattcatgacaatatcatctgattcctccttcccagcttgtatggcagtctcccaccctcatgtgttcaatctgatgatcccaggaggttctggaacaaaa

SEQ ID NO: 297131 - DNA, 1446 bp, Artificial Sequence
  derived and/or modified sequence
atgacccccgccctgaccgccctgctgtgcctgggcctgagcctgggccccagaactcgcgtgcaagctggccctttcccaaagccaaccctgtgggcagaaccagggtctgtgatttcttggggatcccctgtgactatttggtgtcagggctctctggaagcccaagaataccagctggacaaagaaggaagtcccgaaccactcgatcggaataatccactcgagcccaaaaacaaggcccgctttagcattccttccatgacccagcaccacgcaggaaggtataggtgtcactactactcatcagcaggctggtcagaaccatccgaccctctggagctggttatgactgggttttataacaagcctaccttaagcgcgctgccatctccagtggtcgctagcggcggcaatatgaccttgcggtgtggatcccagaaaggatatcatcactttgtactcatgaaggagggcgaacatcaactccctagaactctggactctcagcaactgcattcaggtggattccaggctttattccctgtgggtccagttacgccgagccacaggtggcggttcacctgttactactactacactaatacaccccgggtttggtctcacccgagtgaccctctcgaaattctgccctctggggttagcaggaagccctctctactaacacttcagggacccgtcttagcaccaggccaaagtctaaccttgcagtgtgggagcgatgtaggctacgacagattcgtgctctataaagaaggagaaagagacttcttgcagcggcccggacagcaacctcaggcgggcctcagccaggccaacttcaccctgggccccgtcagtccatcgcatggcggccagtaccggtgttatggagctcacaacttaagctctgagtggagcgcccctagcgatccactgaacattctgatggctggacaaatttacgataccgtgagtctctcagcgcaaccgggcccgaccgttgctagcggggagaacgtgactcttttgtgccagtcacgcggatattttgacacctttcttctgacaaaggaaggtgccgcacaccccccgctgaggctgcgctccatgtatggagcacacaagtatcaggctgaattccccatgtcgcctgtgacaagtgctcacgccgggacataccggtgttatggtagttatagctccaacccccacttgctctcgtttccctccgagccactggagctcatggtgtcaggacactccggggggagttcccttcccccaaccggcccaccttccacaccagccagccatgctaaggactacacggtcgaaaacttgattagaatgggcatggctggtcttgtgcttgtttttctgggaattctcctctttgaggcgcaacactcccagcgcaatccacaggatgctgcaggccggtag

SEQ ID NO: 297132 - DNA, 1446 bp, Artificial Sequence
  derived and/or modified sequence
atgacacctgcactcacagctttactgtgccttggactaagcctgggcccacgcacaagggtgcaagccggtcccttccctaagcctacattgtgggccgagcccggtagtgtgatttcctggggtagtccagtgactatctggtgccagggcagcctggaagctcaggaataccagttagacaaagagggctcgcccgagccattagacaggaataatcctctggagccgaagaataaggcgaggttcagcataccctctatgactcagcatcacgccggacggtacaggtgtcactattactccagcgctggttggagcgagccatcagatcctctggaactggtgatgactggattctataacaaacctaccctgagtgctctgccctcccctgtggtggctagcggcggaaatatgactctgcggtgcggaagccagaagggctaccatcactttgtgctgatgaaagagggggagcaccagctgccaaggaccctggattcacaacaactgcatagtgggggatttcaggcccttttcccggttggccctgtgacccctagtcatcgatggagatttacctgttactattactacactaatactccacgcgtgtggtcacaccctagcgatccccttgaaatcctccccagcggcgtgtccaggaagcccagtctgctcactttacagggccctgtattagcaccaggacaatccctgacactgcaatgcggcagcgatgtcggctatgatcgcttcgtcctgtacaaagaaggagaaagagatttcctgcagagacctggccagcaacctcaggccggattgtctcaggccaactttaccctggggcctgtcagtcctagtcacggcggacagtataggtgttatggggctcataacctgtcttcggaatggagcgcaccaagtgatcctctcaacattctcatggccggacaaatttacgataccgtctcgttgtctgctcaaccaggccctaccgtagcaagcggcgagaatgttacgctcctgtgccagagccgcggatatttcgacaccttcctgctgacaaaggagggggctgctcaccccccactgagactgcggtctatgtatggggctcacaagtatcaggcagagtttcccatgagtcctgttaccagtgcccatgccggaacataccgatgttacggtagttactcaagcaatccccacctgctgtcatttccatcggagccactcgaactgatggtctcagggcattctggcggttcttccctgccaccgaccgggcctcctagtacacccgctagccacgctaaagattacactgtggagaatctaattcgcatggggatggccggattggtactggtctttttgggaatccttctgttcgaggcccagcatagccaacgcaacccacaggacgcagcaggacgatag

SEQ ID NO: 297133 - protein, 464 aa, Artificial Sequence
  derived and/or modified sequence
MTPALTALLCLGLSLGPRTRVQAGPFPKPTLWAEPGSVISWGSPVTIWCQGSLEAQEYQLDKEGSPEPLDRNNPLEPKNKARFSIPSMTQHHAGRYRCHYYSSAGWSEPSDPLELVMTGFYNKPTLSALPSPVVASGGNMTLRCGSQKGYHHFVLMKEGEHQLPRTLDSQQLHSGGFQALFPVGPVTPSHRWRFTCYYYYTNTPRVWSHPSDPLEILPSGVSRKPSLLTLQGPVLAPGQSLTLQCGSDVGYDRFVLYKEGERDFLQRPGQQPQAGLSQANFTLGPVSPSHGGQYRCYGAHNLSSEWSAPSDPLNILMAGQIYDTVSLSAQPGPTVASGENVTLLCQSRGYFDTFLLTKEGAAHPPLRLRSMYGAHKYQAEFPMSPVTSAHAGTYRCYGSYSSNPHLLSFPSEPLELMVSASHAKDYTVENLIRMGMAGLVLVFLGILLFEAQHSQRNPQDAAGR

SEQ ID NO: 297134 - DNA, 1395 bp, Artificial Sequence
  derived and/or modified sequence
atgacccccgccctgaccgccctgctgtgcctgggcctgagcctgggccccagaaccagagtgcaggccggccccttccccaagcccaccctgtgggccgagcccggcagcgtgatcagctggggcagccccgtgaccatctggtgccagggcagcctggaggcccaggagtaccagctggacaaggagggcagccccgagcccctggacagaaacaaccccctggagcccaagaacaaggccagattcagcatccccagcatgacccagcaccacgccggcagatacagatgccactactacagcagcgccggctggagcgagcccagcgaccccctggagctggtgatgaccggcttctacaacaagcccaccctgagcgccctgcccagccccgtggtggccagcggcggcaacatgaccctgagatgcggcagccagaagggctaccaccacttcgtgctgatgaaggagggcgagcaccagctgcccagaaccctggacagccagcagctgcacagcggcggcttccaggccctgttccccgtgggccccgtgacccccagccacagatggagattcacctgctactactactacaccaacacccccagagtgtggagccaccccagcgaccccctggagatcctgcccagcggcgtgagcagaaagcccagcctgctgaccctgcagggccccgtgctggcccccggccagagcctgaccctgcagtgcggcagcgacgtgggctacgacagattcgtgctgtacaaggagggcgagagagacttcctgcagagacccggccagcagccccaggccggcctgagccaggccaacttcaccctgggccccgtgagccccagccacggcggccagtacagatgctacggcgcccacaacctgagcagcgagtggagcgcccccagcgaccccctgaacatcctgatggccggccagatctacgacaccgtgagcctgagcgcccagcccggccccaccgtggccagcggcgagaacgtgaccctgctgtgccagagcagaggctacttcgacaccttcctgctgaccaaggagggcgccgcccacccccccctgagactgagaagcatgtacggcgcccacaagtaccaggccgagttccccatgagccccgtgaccagcgcccacgccggcacctacagatgctacggcagctacagcagcaacccccacctgctgagcttccccagcgagcccctggagctgatggtgagcgccagccacgccaaggactacaccgtggagaacctgatcagaatgggcatggccggcctggtgctggtgttcctgggcatcctgctgttcgaggcccagcacagccagagaaacccccaggacgccgccggcagatag

SEQ ID NO: 297135 - DNA, 1395 bp, Artificial Sequence
  derived and/or modified sequence
atgacccccgcactcaccgcacttctctgtctgggcctctctctcggtccacgaacgcgcgtgcaggcgggacctttccctaaacctacattatgggccgagcctgggagtgttatatcttggggctcacccgtcactatatggtgtcagggtagcctcgaggcccaagaatatcagctggataaggaaggctctccagagcctttagacaggaacaatcctctcgagccaaaaaataaggcgagatttagcattccttccatgacccagcaccatgccgggaggtacagatgtcactactactcatcggccggatggtccgaacccagcgatcccctcgagctcgtgatgaccggcttctacaacaagcctacactttcggccttaccaagccctgtggtggcctctggcggtaatatgaccctccggtgtgggtcccaaaaggggtaccatcactttgtgctcatgaaggagggcgaacatcagttgcctagaacgttagattcacaacaactccatagcggtggatttcaggctcttttccccgtaggtcctgttactccgagtcacaggtggcgttttacatgttattattattacaccaatacacccagggtttggtctcaccccagcgacccactggagatactccctagtggggtctcgcggaaaccttccctgctgaccttacaggggcccgttctcgctcccggccagtccctgaccctccaatgcgggagcgatgtgggttacgaccggttcgttctttataaggagggtgagagggactttctgcagcgccctgggcaacagccccaggcagggctgtctcaagcaaattttaccttgggcccggtgagcccctcccatggcggtcagtatagatgttatggcgcccacaacctctcgtctgagtggagcgcaccgtcagaccctttaaatattctcatggcaggtcagatttacgacacagtgagcctgtcggcacagcctggccccaccgttgctagcggcgagaacgtcacattactatgtcaatctcgcggctactttgataccttcctgcttactaaagaaggtgccgctcacccgccgttacgcctacgaagtatgtacggggcccacaaataccaggccgagtttccaatgagcccagtcacctctgctcacgcagggacatatcggtgttacgggtcctatagttctaacccacacctgctgtctttcccctctgagcctctggagttgatggtctctgcttcacacgcgaaagattacactgtcgagaacctcattaggatgggcatggccggcttggtgctcgtctttctgggcatacttttgtttgaggcccagcactcccaacgcaacccccaggatgctgccggcaggtag

SEQ ID NO: 297136 - DNA, 1395 bp, Artificial Sequence
  derived and/or modified sequence
atgaccccagccctgacagccctgctgtgcctgggcctgagcctgggccccaggaccagggtgcaggccggccccttccccaagcccaccctgtgggccgagcccggcagcgtcatctcctggggcagccctgtgaccatctggtgccagggcagcctggaggcccaggagtaccagctggacaaggagggcagccctgagcccctggacaggaacaaccccctggagcccaagaacaaggcccgcttcagcatccccagcatgacccagcaccacgccggccgctaccgctgccactactacagcagcgctggctggagcgagcccagcgaccccctggagctggtgatgacaggcttctacaacaagcccaccctgagcgccctgcccagccctgtggtggccagcggcggcaacatgaccctgcgctgtggcagccagaagggctaccaccactttgtgctgatgaaggagggggagcaccagctgcccaggaccctggacagccagcagctgcacagcggcggcttccaggccctcttccctgtgggccctgtgacccccagccaccgctggaggttcacctgctactactactacaccaacaccccccgggtgtggagccaccccagcgaccccctggagatcctgcccagcggcgtgtccaggaagcccagcctgctgaccctgcagggccctgtgctggcccctggccagagcctgaccctgcagtgtggcagtgatgtgggctatgacagatttgtgctgtacaaggagggggagcgggacttcctgcagaggcctggccagcagccccaggccggcctgagccaggccaacttcaccctgggccctgtgagccccagccacggcggccagtaccgctgctatggagcccacaacctgagcagcgagtggagcgcccccagcgaccccctgaacatcctgatggccggccagatctatgacacagtgtccctgagcgcccagcccggccccaccgtggccagcggagaaaatgtgaccctgctgtgccagagccggggctactttgacaccttcctgctgaccaaggagggcgccgcccacccccccctgcggctgcgctccatgtacggggcccacaagtaccaggccgagttccccatgagccctgtgaccagcgcccatgctggcacctaccgctgctacggcagctacagcagcaacccccacctgctgtccttccccagcgagcccctggagctgatggtgtctgccagccacgccaaggactacacagtggagaacctgatccgcatgggcatggccggcctggtgctggtgttcctgggcatcctgctgtttgaggcccagcacagccagaggaacccccaggatgctgctggccgctag

SEQ ID NO: 297137 - DNA, 1532 bp, Artificial Sequence
  derived and/or modified sequence
tgcgtctctgctgatctgagtctgcctgcagcatggacctgggtcttccctgaagcatctccagggctggagagacgactgccatgcactgagggctcatccctctgcagagcgcggggtcaccggaaggagacgccatgacgcccgccctcacagccctgctctgccttgggctgagtctgggccccaggacccgcgtgcaggcagggcccttccccaaacccaccctctgggctgagccaggctctgtgatcagctgggggagccccgtgaccatctggtgtcaggggagcctggaggcccaggagtaccaactggataaagagggaagcccagagcccttggacagaaataacccactggaacccaagaacaaggccagattctccatcccatccatgacacagcaccatgcagggagataccgctgccactattacagctctgcaggctggtcagagcccagcgaccccctggagctggtgatgacaggattctacaacaaacccaccctctcagccctgcccagccctgtggtggcctcaggggggaatatgaccctccgatgtggctcacagaagggatatcaccattttgttctgatgaaggaaggagaacaccagctcccccggaccctggactcacagcagctccacagtggggggttccaggccctgttccctgtgggccccgtgacccccagccacaggtggaggttcacatgctattactattatacaaacaccccccgggtgtggtcccaccccagtgaccccctggagattctgccctcaggcgtgtctaggaagccctccctcctgaccctgcagggccctgtcctggcccctgggcagagcctgaccctccagtgtggctctgatgtcggctacgacagatttgttctgtataaggagggggaacgtgacttcctccagcgccctggccagcagccccaggctgggctctcccaggccaacttcaccctgggccctgtgagcccctcccacgggggccagtacaggtgctatggtgcacacaacctctcctccgagtggtcggcccccagcgaccccctgaacatcctgatggcaggacagatctatgacaccgtctccctgtcagcacagccgggccccacagtggcctcaggagagaacgtgaccctgctgtgtcagtcacggggttattttgacactttccttctgaccaaagaaggggcagcccatcccccactgcgtctgagatcaatgtacggagctcataagtaccaggctgaattccccatgagtcctgtgacctcagcccacgcggggacctacaggtgctacggctcatacagctccaacccccacctgctgtctttccccagtgagcccctggaactcatggtctcagcctcacacgccaaggattacacagtggagaatctcatccgcatgggcatggcaggcttggtcctggtgttcctcgggattctgttatttgaggctcagcacagccagagaaacccccaagatgcagccgggaggtga

SEQ ID NO: 297138 - DNA, 1395 bp, Artificial Sequence
  derived and/or modified sequence
atgacccccgccctgaccgccctgctgtgcctgggcctgagcctgggccctagaacccgcgtccaggcagggcccttccccaagcctaccctgtgggctgagcctggatccgtgatctcgtggggaagtcctgtgactatttggtgtcaaggcagtctggaggcccaggagtaccaactggacaaagaagggagcccagagcctctggatcgaaacaaccctctggaacccaagaacaaggccaggttcagtattcctagcatgactcagcatcacgccggcagataccggtgtcattattacagctcagctggctggagtgagccttctgaccccttagagctggttatgaccgggttctacaacaagccaactctttccgcccttccctcccccgtggtggcttcaggcggcaacatgactctcagatgcgggagccaaaaagggtatcatcactttgttctgatgaaagaaggtgaacatcagctgccccgcaccttggactctcagcagttgcactctggcggatttcaggcgctgtttcccgtaggccccgttacgccgtcccacaggtggcgttttacttgctactactactacaccaatacccccagggtttggtcccaccctagcgaccctctggaaattctgccttctggggtgtctcgtaaaccctcccttctgacgctacagggtccggtgctggctcctggccagtctctcacattacagtgtggcagtgatgtcggatacgataggtttgttctgtataaagaaggagaacgagattttctccagcgtccaggtcagcaaccccaggcgggattgtcacaggctaactttaccttagggcccgtgtctccgagccacggtggacaataccgctgttacggagcccacaatctatcctctgagtggtctgcgccatccgaccctctcaatattctgatggcaggtcaaatttacgataccgtatcactctccgcccaacctggtccgacagttgctagtggtgaaaacgtcaccctgctgtgtcagtctaggggatattttgataccttcctcctcactaaggaaggagcggcccacccacccttgcgactgcgttcaatgtatggtgcccataaatatcaggctgagttcccaatgtctccggtgacatcggctcatgccggcacgtatcgctgttacggatcatattcttccaacccccacctgctttcgtttccctcggagccattggagctgatggtgtccgccagtcacgccaaagattacactgtggagaacctgattaggatgggcatggccggactagtattagtgttccttggcatcttactattcgaggcccagcatagccagaggaatcctcaagatgctgccggtaggtag

SEQ ID NO: 297139 - DNA, 1395 bp, Artificial Sequence
  derived and/or modified sequence
atgaccccagcactcaccgcgttgctttgcctgggcttatcactggggcctcggactcgtgttcaagctggaccctttcccaagcctaccctgtgggccgagcctggatcggtgatctcgtggggaagtccagttaccatatggtgtcaaggctcacttgaggcacaggagtatcagctggacaaggaaggctctcccgagcctttagacagaaacaatcctctggagccaaaaaataaagctcggtttagcatccccagcatgactcagcaccacgccggaaggtatcgatgtcactattacagtagcgcgggatggtccgagccatccgatcccctcgaacttgtaatgaccggattctacaacaaaccaactctttcagccttgccgagccccgtagtcgccagcggcggaaatatgacgctaaggtgtggcagccagaaggggtatcaccacttcgtccttatgaaggaaggtgagcaccagctgccaaggactctagattcacagcagctccacagcgggggattccaggccctttttcccgtgggacccgtcacaccatcccacaggtggaggtttacctgctattactattacactaacactcctagggtctggtcccatccgtcggacccactggaaatcctccccagtggagtgtcacgaaaaccttccttgctgactttgcaggggcctgttttagccccagggcagtccctgaccctgcagtgcggttctgatgtaggatacgaccgcttcgtgttgtataaggagggcgagagggacttcctgcaacgtcccggtcagcagccacaggctgggctgtctcaggccaatttcaccctggggccagtatccccgtcccatgggggacagtatcgatgctatggggcacacaacctgagttcggagtggagcgccccatccgatccgctgaacatactaatggcaggacagatctacgataccgtatcactcagcgcccagcctggaccaaccgtggcttcaggagaaaatgttactctgctgtgtcagtccagagggtatttcgacacatttcttctgacaaaggaaggcgcagcccacccccctctgagactgcgttcaatgtatggagcacataagtaccaggcagagtttcccatgtctcctgttactagcgcacacgctggcacttaccgttgttatggatcctatagctccaaccctcatcttctttcctttccgagtgagcctctggagttgatggtatccgcctcccatgccaaggattacaccgttgaaaatctcattcggatgggaatggccggtctggtgctggtatttctcggaatcctgctttttgaagcccagcatagccaacgcaatcctcaggatgcagctggtcggtag

SEQ ID NO: 297140 - protein, 814 aa, Artificial Sequence
  derived and/or modified sequence
MFRRARLSVKPNVRPGVGARGSTASNPQRGRESPRPPDPATDSASKPAEPTDVPTVDFGGAEPQEKAPRSSTEKTGGDNDVEESSRSSSTVSQRRKRISSTSSLVKSSVSVPSESHPLSTINQEAPQPTATSTKEKQPCSDRYRIYKAQKLREMLKEELRKEKKQWKNKYAINESQRPPDRSKMTMRDFIYYLPDNNPMTSSLEQEKKTEKPSTPVQTREQEGKSTPNAEDNEMEEETDDGPLLVPRVKVAEDGSIILDEESLTVEVLRTKGPCVVEENDPIFERGSTTTYSSFRKNYYSKPWSNKETDMFFLAISMVGTDFSMIGQLFPHRARIEIKNKFKREEKTNGWRIDKAFQEKRPFDFDFFAHLLQKVLAEEEKRKQKSVKNHSLKEKKSTKPRKNVKVKKVACEGVNNDPDESMSSRISDTERSQKDAQTVEEESLTLSREDAEQVALEVDLNQKKRRRKKQDGANELGVNNLLENATVQAGPSKGEKHKNKCQAIRPELKEGECSKEQMLSCTQNIDGIVGFASTEKVEKRTDPILSLSNQQDATSVATESSESSTSDLPSFEVGIRALCEVNNAEGSCIEERNVDLKNNSLEIDQTENVKPMLRGRFQRPKPNLSRAGKKSVLSQGKTESESKNSHSKTSVEKNHVEKDKMNTLDILRMETTERENPEAETVSVLGEKNCLQEGSQLKALRPVQVRGRLQKPKPNAGKAAERKEILISQEEIGANVEKNENESCADRDTPQHMEDQSRKDFEEEDVILQPEKNDSFQNVQPDEPKVLNECLSVQENNKANKLNQVPILRTRFQKP

SEQ ID NO: 297141 - DNA, 10885 bp, Artificial Sequence
  derived and/or modified sequence
agttgcggcgtcctgtgagcgcggggatgctgggaggagggtgaaatttagccatcggtgtgtggcagggtcatgaaaaagcggcggcggcgggagagaggaggaggcggcggcggggcagtgaaactacggtagctgccccctgagctggtggtgtggctttgtggggagggcgtagttcctaatcccctttccgggcagccgccggggctcggggctgtgagcggccgtgaggctgcctccccgggccccctgcctccgccatgttccgcagggcacgccttagcgtgaagccgaatgtcaggcctggtgtaggcgccaggggctccacagcttccaatccccagcgtggacgggagtctcccaggccgccggatcctgccacggactctgcttccaagcccgcggagcccacagatgtgcccacagtcgatttcggtggagcggagccccaagaaaaggctcctaggagcagtactgaaaagactggtggtgacaatgatgttgaagaatccagtagatcttcctctactgtttcacagagaagaaagcgaatatcaagtacttctagcctggttaagtctagtgtcagtgttccttcagaatctcatcccttatctacaattaatcaagaggctccacagccaactgccacttcaacaaaagagaaacagccatgctcagacagataccgaatatacaaagcccagaaactgagggaaatgttaaaagaagaattgagaaaagagaagaaacaatggaaaaacaaatatgctataaatgaaagtcagaggccaccagatcgttcaaaaatgactatgagagacttcatatattatctaccagataataatccaatgacttcttcactggaacaagaaaagaaaactgaaaagccatcgactccagtccagacaagagagcaagaaggtaagagtactcctaatgctgaagataatgaaatggaagaagagacagatgatgggccattactggttcctcgagtaaaagtggcagaagatggttccattattttggatgaagaaagtttaactgtagaagttttaagaacaaaaggcccttgtgttgttgaagaaaatgaccccatatttgagcgcggttctacaactacatactccagctttaggaaaaactattactctaaaccatggtcaaataaagaaacagatatgttttttttagccatcagcatggtaggaactgacttttctatgatcggacaactttttcctcacagagcaaggatagaaattaagaataaatttaaacgggaagagaaaacaaatggatggagaatagacaaagcattccaggaaaagcgcccttttgacttcgatttttttgctcatttgcttcagaaagttcttgctgaagaagagaaaagaaaacaaaaatctgttaaaaatcacagtttaaaggagaagaaatccaccaaaccacggaaaaatgtaaaagtgaaaaaagttgcctgtgaaggagtgaataatgatccagatgagtctatgagttctagaatttcagacacggaaagatctcagaaggatgctcagacagttgaagaagagtctctgaccttatcaagggaggatgcagagcaggttgcattagaagtagacctaaatcaaaagaaaagaaggaggaagaagcaagatggagctaatgaactgggagtaaacaatcttttagaaaatgccactgttcaggcgggtccttctaaaggagaaaaacacaagaataaatgtcaggctataaggcctgagctaaaggaaggtgaatgcagtaaggagcagatgctttcctgcacacaaaacatagatggcattgtgggttttgcctccactgaaaaagttgagaaaagaactgaccccatcctttcattaagtaatcaacaagatgccacatcagtagcaactgagtcttcagaatcaagcacttcagatttgccttcattcgaagttggaattagagcattgtgtgaggtgaataatgctgagggtagttgtatagaagaaagaaatgttgacctaaaaaataattcactggaaattgatcaaacagaaaatgttaaaccaatgttgagaggtcgcttccaaagacctaaacccaatttgtcaagggctgggaagaaatcagttctttcacaaggcaaaacagagtcagagagcaagaattcacattcaaaaacttcagttgaaaagaaccacgtggaaaaagataaaatgaatacattggacattttgagaatggagactacagagagagagaatccagaagctgaaactgtatctgttttgggtgaaaaaaattgtctgcaggaagggagtcaactaaaggctttaagacctgtacaagtgaggggccgattgcaaaagccaaagccaaatgcaggtaaagctgctgaaagaaaagaaattctcatatcacaggaagaaattggggccaatgtagagaagaatgaaaatgaatcctgtgctgatagagatactcctcaacacatggaagatcaatcgcgtaaagattttgaagaggaagatgtcatattacagcctgagaaaaatgattcttttcaaaatgtgcagccagatgagcccaaggttcttaatgaatgtctaagcgttcaagagaataataaggcaaataaacttaaccaagtcccaattctaaggactcgatttcagaaaccaaagccaaatataggaagaggaactggaaggagagaaatttcctcaaaggaagaggtactagagaagattcttgtctctggggaaatggcggcagcattgagagaaactgtaagactagacacctcaccaaaggagatggtaccagcagagattaatactaaagaaatgcagtcagatttaaaagaaactggaagaagagccatttctcccagggagaagattctagatgtgattgatgacaccatagaaatggagacaggtctgaaagcaatgggaagagagatttgtctaagggagaagacgccagaggtgattgatgccactgaggaaatagacaaagatttggaagaagctggaagaagagaaatatccccacagaaaaatggcccagaggaggttaagcctctaggtgaagtggagacagatttgaaagcaactggaaatgagagttccccaagggagaagacaccagaggtgactgatgccactgaggaaatagacaaaaatttggaagaaactggaagaagaaaaatatccccaagggaaaatggcccagaggaggtcaagcctgtagatgaaatggagacagatttgaacgcaactggaagagagagttctccaagggagaagacaccagaggtgattgatgctactgaggaaatagatttggaagaaactgaaagagaagtatccccacaggaaaatggactagaggaggtcaagcctctaggtgaaatggagacggatttgaaagcaactggaagagacagtttcccaagggggaagacaccagaggtgattgatgccattgaggaaatagagatagatttggaagaaactgaaagagaaatatccccacaggaaaatggcctagaggaggttaagcctctaggtgaaatgcaaacagatttgaaagcaaccggaagggagatttccccaagggagaagacaccagaggtgattgatgccactgaggaaatagacaaagatctggaagaaactggaagaagagaaatatccccagaggaaaatggcccagaggaggtcaagcctgtagatgaaatggagacagacttgaaaacaactggaagagagggttcctcaagggagaagacacgagaggtgattgatgctgctgaggtaatagagacagatttggaagaaactgaaagagaaatatcgccacaggaaaatggcccagaggaggtcaagcctgtaggtaaaatggagacagatttgaaagaaattagagaagaaatttcccaaagggaaaaggtgctagcagagttcagtgctataagggaaaaggagattgatttgaaagaaactggaaaaagagacattcccatcatggagaaagtatcaggaaagatggctgttgttgaagaaatggaggcagatttgaaagaaactggaaaagaaaattttagagagagaggatctgaagagatctgtgttactgaggaaaaggtggcagaattgaaacaaactggaaaaacagacatttctccaagggaaaacgagctagaggagaccagtacctcaagacaaactgacacacatttaatgcagagcggtagcaatgacttcagtgctgtgccttcactagatattcagaacattagcagtgaagtactgtcgatgatgcatacacctgtagaagaaaaaagaaattctgaaaaagaagtatcaagtcacttcagtcatttcaagatttcttcacagactcatgaatctgataaaacagaagtccaggggattcaatctccagatgttccagagcagttttcagatattaatttaagcaaatctcttcctcaagaacagaagccacttgaaattaaaccagcaccttttgtgaggagccgattcaaaagaccaaaaccaaacttagcaagagcagctttgaagagagagactacagaatcagaaaaatatatatatgagaagaaatcagaaaccaagaaaatggagactattgtgatgcaagaaaataatgaacaaactgatactctcccttctcaacatgatgaagcttccctaatgatatcaagagaaaaagacacattaggtcacaggaatgaggaggctgtgatattgccatgtacacagactgaaaggaacctttcaccttcaaattcttgtgaacctaaagaggagtctcagtcagcaccagtccagaaaaatgactcagttgtttctgtggggactaataatgtaaacactttccagcaagaaatgaaggaaagtgttatccaaactgctcgacaagtaaggggccgacttcagagaccgagaccaaatataagaaagacaggacagaggcaaatagtagacaaaggtgaagccaaaggcataattaaggaaggaagaacgatattaccaaaagatgaaactgaaaagaaagtcttaactgtgtcaaattctcaaattgaaactgaaattgaagttccatcgtccgcagttccagaacacagaatgtatgaaaatcaaagtcaggtggttcttgtagaaaaccttcatgttaacaaaacaaatgaaacaatcagacatgaaaataaaccgtatgttcctagttcagcacaaatgacaagaaggaaattccaaaaggctaagccaaatttgggaagagcacacagtaagaaagaggaaccagttttagaaaaagtcacaacagatcagagcaaggaaggcaagccagaagatcatttgctgcagaaaggagcttccaacacccagctccttctaaaagaaaaagctgagcttctgacatctctggaggtttcagcaagaaaagattgtgtaggttccaaagagtctgctttggcaaaaatagatgcggaattagaagaagttggaccatcaagaagggttggagaggaaactgtaggagataattcaccatcttcagttgttgaagagcaatatctcaataaactaacaagctgtccacaaccgttaaacgaaacaagttactctaaaattgccctggatgggaaaacaactatctcttctacatctgagtatgagagaaatcgtggtgaaaggagaagtcataaaaagttcaaaccaaatgtcaccagaggtcgtggatcaaaacgagttcggggtaagacctctaagaaggaacctagagcttccaaggccatgctggtgactcttcgggcttcccaggaagaagatgatgatgctgacgattttgagtctgactatgaggaagaaagctatcatcttgctcccgaagaagtaaacaaagctccagtatttgtacctgttggtctcagatctcctgaacctgtttctgctcagattgaggaaacaatggaagagcttgaaataactgtgaatgtcccagatgtaggatgcatagctgttgttgaacatgagctaccaaacacagatgtgactactgaagaaatgaaacaagaagaaaatttgagtgtaccgtttgaaatgaccacaagtgaacatatccaagatgaaccaggtaccaatgatggaagcaccgaagctgcaataactttacttacaatgggagatctagtattgcagtcagagatcagtagtgaacagggtgatggagtatgtataattcctcatgttcattcaaaggataaaagccatattccttctagcctagataatgtaaatcacaaaattgttcatgaatgtcaggaactttcttcacctgtcattactacatctcctgcatcatttgaagaaaacaagattgtattggaggaacaaagttccagagaagaaataagtttaatggagaaagtaaaggagaatgctacaccaaccaggaatacaatttctaaagtgaccagtaatttgagaataagaagtaggcttgctaagcctaaaccaaatcttgagaagactttagggaccaacaggcttgatgattatcaggaagtttccagtttgtgtgtaaccaaaggggcagaaatggaaactcaaagagaaacagagaaaaatgcttccaaagcaacagaattggaaaataaaaacctcggaccagttacaacagcagagaataaggatcagagcaaattggcatgtgtacatggtatcaaagggaccagtatttcttcagaagtaaacctaactgaaagaaacgaaaatcaagaagagagctctcaggaggttcacatgttgtcagttgctccagttgcttcctctgagacagggccctgcacacttggtttggataggggtcttggtgaaaattctgttgaagagccccagataaaggactctaaaggagacagtgtgcttacacttcctgtgccagagtatacaccaacaagtattccagaagtccaacaagagaatataatcaatcctcaagacctaacagtatttgtttaccagcaacttcagttggtcaagatgccatgggtttatctatttctggaagagataattctaaaaagccgcctgataatttggatcttgtatctaggaagagatttcaatgcaggcttgataaaaatgaccacattcctcctgccaaaaaacgttcactcactttaagagatgactgtcaagaatataccactgaggtgcactcaaaggaattaacaaatgtttttgaggaaacaggggagtctcacaagggacaagatatttttcttacctcaggaagcacactgacaactccagaacctcaaagacagcaagttgaagcagcttttcagagtagaggatctagatctcctgatgcatgcatggacaagaatgtgcctcagttacctcaggatgaaatgattgtgtctgataaggaagaaagaactgatgctgctcctaagtctcagcaaatggatagcagaacatcgtcttctaaagcctcactatccagacctggcagaagacccctgggatttttatctttaatatgctcaaagaatagtttggagtctgatgaacctatgcaagtccatagtaagaaacgcctaaaacctcttatacctggattaagaaagaaattgaaaagatctaatccattcaatgaaagccaggaaaaaaatcgagagtcctctgatctgcttccatctccaagtgttattactactcaatctgagaatattagcagctcagcaactcaggtttcttgtgatcagcccttactgaaagaaggatataaaagtgcccaaaagcgggcccctcaaggggaggcaaccacagtctctgaatatttcttcaatgatatcttcattgaagtggatgaaacagaataaaacaatcttttctctttttcttttttaaattaggtctaggatttccagagtcaattacatcaacaaaacagtatttagagcaaaatatcactgtcttatttttctttaggttgattttgaatacttaatgagcttgatttgaagcttttataatcagtggaaaacatttctgaggttcctttcattctgactgattcagcattttgcaaatagcaagcaattaagactgctttctcagacagaaataacaactcttgtttacattttgactcttcctgtgctaagcacacatggacatttgggaatgttgtggatatatgtctctgtatgaattgcagtgcagacagatttgggggttaattgtatcatatttaacatttagcaacttcttttgtgaagattttttatttttagggggagatgatgaaggatgaaggctttttcatttgcttctaagtacagtcatgtatcacataatgaagtttaagtcaatgatggaccacatatattacagtggtcccatgcaattaaaatggagataaattcctatcaactagtgacattatagccatcataacacagtgcattgcttttttatgtttagatatgtttagatacacaaatacttactattgtgttacaactgcctacagtattcagcatagtaacacattgtagaggtttgtagccgaggagcaataggctataccacatagcctcagtctgtacggtgtgtagcagcctgtaccatctcagtgtttgtaagtacactctgcgttgtttcacacaagatcacctaacaaggcaattcttagaacatgtagttaagggacacgtgactatatgtgaaaacaaattgtcaaacttcactttagtatggcaaatgttaaagaacttttctattatcagctgtttgtctgactgaaaaatacatatttttctaattcatggtgatgtaacattagtcctaattgaaaaactagtatttaaacataattatttataaagatgacacatcaaagggcttatttatttttaaattttttatttaaaaggatattcagttttagctatttttacccctcagattgtagataaagaaggcattaaatttatgtttgtctcctttttctgtttaattttaaagatatttaaaatgatataactaaaaatgtttagctggtgtatatgttttgaatacctttttcccctcagtttagtatattgactttgtactgtaaatttttctgcttttcttggataatctcaggattttcatgaggatagggggaactcaactttatttatgagacaaaatttccatacaaagctcaatctcctttatacacccacagacataatattagtttttaaaaagccaatttcttcatagttttttcccattaaattctcaaggaacacttggatctttaagcacggaacataatcatgatgttaaaaacagagaaaataaggctttataaagttaatgattatcatcagtatgaatttaaggtttgttttaatttcaagatttgattttttatacgtgtaattctattatctacccaagcagatctgtagtggttccaattagacttctcaaacagcaaatttatcctgattttatttgaaaagcctcttggattgatagtatagtagctcaggcattggaaactttctgcaaactgttttgggtttgcaggccagatggtctctgtggcagctactcagctctgcaatttcagtgtgaaagaagccatagacagtacttgaatgaaggactgtggctggattggccttttagtttgaccccctacattaggccccaaattttcttaccctgaggtgctgatatctgtatggatgagttatttgtcactaaagttatgagttgtgcctaaaagttaaaactgttgactgtattatgtaatgatcagtatttcagttgggaagatattttagagtctagataattatgtttgtatattgaaaaaatggtggccagtttttaagttccttaatagaagagaattatgtctcagcacatataacagtaatgctaatttattgaaactactgctgttagagcacttcttattcattgtcttttagtgaaatttatggcgtaacactttgtcagagaggaggctatataattcggagcggaaattgtctataagtaggcatttatttcatgattgatatgtcacagaaatcatggtagtaaatcacattgctatttgaataccctgtttttgtaagtttttaaaactcatattctgaaaagatttcattctcttagtgttagcttgggagttagattgccatgattaaactattatttatccttgtgtaatattagtttttaactttaacatctgtttctttttaatctataatgagctagttttatggaaaatggaatttcttactatataaagaatacagagactcattgtattagagaatcaagtcagccagctaaagtatcctactgttaaatccttaaacctaattttggaaaagagaaagttaatcaatgtatttaccttacatgttggaaagaactatgttaggtctgattcatgtgaagaagatgttgcaaaggatttatttcacaaattttaaaggagatatgagtaaaagtttttatcttttcttgactttttctcctgaacacttatgtcttagcaagtggtcaacatgaggatttgaacgcctaattgttggtaaatggttgaggcatgacaaaaatattaatatccactgtttaccatcatgttatttgaaacaaaagtgaccatgtatactatcttgcttgaagaagtctttgacagaaaaagcaatatcatgtcatttataaattttcttgttctaaagaaagcagttatatatatatataaattatgtaaataaaagttattttatatcatt

SEQ ID NO: 297142 - DNA, 1362 bp, Artificial Sequence
  derived and/or modified sequence
atgggcgccccccccggctacagacccagcgcctgggtgcacctgctgcaccagctgcccagagccgacttccagctgagacccgtgcccagcgtgttcgccccccaggagcaggagtaccagcaggaccagagcagcctggccgtgacccagagacccccccccaccacccccctgcacagactgagacccagacccagactgacccccgccctggccagaagaccccccgaggccgccagaggcgaccccagaccccagagcccccccgaggccctgctgctggtggccgccctggccggcctgggcctgggcctgagcctgatcttcatcgccgtgtacctgatcagattctgctgctgcagaccccccgagccccccggcagcaagatccccagccccggcggcggctgcgtgacctggagctgcatcgtggccctgctggccggctgcaccggcatcggcatcggcttctacggcaacagcgagaccagcgacggcgtgagccagctgagcagcgccctgctgcacgccaaccacaccctgagcaccatcgaccacctggtgctggagaccgtggagagactgggcgaggccgtgagaaccgagctgaccaccctggaggaggtgctggagcccagaaccgagctggtggccgccgccagaggcgccagaagacaggccgaggccgccgcccagcagctgcagggcctggccttctggcagggcgtgcccctgagccccctgcaggtggccgagaacgtgagcttcgtggaggagtacagatggctggcctacgtgctgctgctgctgctggagctgctggtgtgcctgttcaccctgctgggcctggccaagcagagcaagtggctggtgatcgtgatgaccgtgatgagcctgctggtgctggtgctgagctggggcagcatgggcctggaggccgccaccgccgtgggcctgagcgacttctgcagcaaccccgacccctacgtgctgaacctgacccaggaggagaccggcctgagcagcgaggccgacagcgtgcccgccagcagcggccagcaccccctgcccgccgccggccccggcgccagaagctgcgccagcgtgcccttcagcgccgaggccagcgccgtgctgggcggcgacagcgagtgcgacagaagaaagttcccccccgtgggcggcaccgccaccctgccccagcccgcccagggcctgtggtgcagccccgccggccccgtgagaagaagacccggcagacccgccctgcccgccaccctgctgcccgccgtgtgcagaagcgccggccactgccccctgcagcccgcccccagcctgggccccctgcccacccagtag

SEQ ID NO: 297143 - DNA, 1362 bp, Artificial Sequence
  derived and/or modified sequence
atgggtgctccgcccggctatcgaccatcggcatgggtgcatctgcttcaccagctgccaagggccgatttccagcttagacccgtcccttctgtctttgccccccaggaacaagaataccaacaagaccagagcagcttagctgtcactcaacgacccccccctacgacccctttacataggctgaggccgcggccacggttaacccccgcactagcccggcggccccccgaggctgctagaggcgatcctagaccgcagagcccacctgaggcattactactggtggcggcgctcgcggggctgggactgggactctctctcattttcattgcagtgtatctaatccgcttttgctgttgcaggccccctgaacctcccggctcaaaaatccccagtcctggcgggggatgcgtaacttggtcttgtatcgtggcccttctggctggctgtactggtataggcattggcttttacggaaattccgaaactagcgacggcgtgtcacaacttagcagcgcgctactccacgccaaccacaccctgagcacgatcgatcaccttgttttggaaacggtggaacgacttggagaagccgtgaggaccgagctcacaacactcgaggaagtgttagaaccgaggacggagttggtggcagctgccaggggagcccgacggcaggccgaggcagcagcgcagcagctgcaaggcctcgctttctggcaaggcgttcctctttcaccactacaagtagcagagaatgtgtctttcgtcgaggagtaccgctggctagcttatgtcctgctgctgctgctagagctgctcgtgtgcctatttaccctgctggggttagccaaacagtctaaatggctggtcattgtgatgacagtcatgagccttttggtgctcgtgcttagctggggatctatggggctggaagctgccaccgccgtcggtctgagtgacttctgttcgaatccagatccttacgtcttaaatttaacccaggaggaaacaggcctgtccagcgaagccgattccgtgcctgcgtcaagtgggcagcacccacttccagccgccgggccgggggctagatcttgtgcatctgtccctttctctgcggaggcctcagcagtgctcggaggtgactctgaatgtgatagacgcaagtttccacccgtagggggcaccgccaccttaccgcagccagcccaaggcctctggtgttcacctgcagggcctgtgcgcagaagacctggtcgcccagcactccctgctacactcttgccagctgtctgccggagtgccggacattgccccttgcaacctgcgccctcccttggaccacttcccacacagtag

SEQ ID NO: 297144 - DNA, 1362 bp, Artificial Sequence
  derived and/or modified sequence
atgggcgcccctcctggctaccggcccagcgcctgggtgcacctgctgcaccagctgcccagggctgacttccagctgcggcctgtgcccagcgtgtttgccccccaggagcaggagtaccagcaggaccagagcagcctggccgtgacccagaggcccccacccaccacccccctgcaccggctgcggccccggccccggctgaccccagccctggcccggcggcccccagaggccgcccggggggacccccggccccagagccccccagaggccctgctgctggtggccgccctggccggcctgggcctgggcctgagcctcatcttcatcgctgtgtacctgatccgcttctgctgctgcaggcctcctgagcccccaggcagcaagatccccagccctgggggcggctgtgtgacctggagctgcatcgtggccctgctggccggctgcaccggcatcggcatcggcttctacggcaacagcgagaccagtgatggagtgtcccagctgagcagcgccctgctgcacgccaaccacaccctgagcaccatcgaccacctggtgctggagaccgtggagcggctgggggaggccgtgaggacagagctgaccaccctggaggaggtgctggagcccaggacagagctggtggccgccgcccggggggcccggcggcaggccgaggccgccgcccagcagctgcagggcctggccttctggcagggcgtgcccctgagccccctgcaggtggctgaaaatgtgtcctttgtggaggagtaccgctggctggcctacgtgctgctgctgctgctggagctgctggtgtgcctcttcaccctgctgggcctggccaagcagagcaagtggctggtgattgtgatgacagtgatgagcctgctggtgctggtgctgtcctggggctccatgggcctggaggccgccacagctgtgggcctgagtgacttctgcagcaacccagacccctacgtgctgaacctgacccaggaggagaccggcctgagcagcgaggccgacagcgtgcctgccagcagcggccagcaccccctgcctgctgctggccctggggcccggagctgtgcctctgtgcccttctctgctgaggccagcgctgtgctgggcggggacagtgaatgtgacaggaggaagttcccccctgtgggcggcacagccaccctgccccagcctgcccagggcctgtggtgcagccctgctggccctgtgagaagaagacctggccggcctgccctgcctgccaccctgctgcctgctgtgtgccgctctgctggccactgccccctgcagcctgcccccagcctgggccccctgcccacccagtag

SEQ ID NO: 297145 - DNA, 1362 bp, Artificial Sequence
  derived and/or modified sequence
atgggcgccccccccggctaccggcccagcgcctgggtgcacctgctccatcagctcccccgggccgattttcagctccgtccggtaccatctgtgttcgctccacaagaacaggaataccagcaggaccagtcttctctggctgtcacacagaggccaccgccaacgaccccactccaccgcctccggccccgccccaggctcacaccagccttggctcggaggccgcctgaggcagccagaggggaccctcggccacagagtccccccgaagctctgctgctggttgctgccctggccgggctgggattaggactgtcactcatcttcattgcagtgtatctgattcgtttttgctgctgtcgaccaccagaacctcctggatctaaaatccctagtcccggtggtgggtgcgtaacctggagttgcatcgtggcactgttagctggttgcacaggaattggcatcggtttttatgggaatagtgaaacaagcgacggtgtgagccaacttagctcagccttgctacacgcaaatcacaccctgagcacaatcgatcatcttgtcctggagaccgtggagcgcttaggcgaggcagtgagaactgaattaaccaccctggaggaagtgcttgaaccaagaacagagctggtggcagccgcacgcggcgcacggcgacaggcagaggccgcggcccagcagctgcagggactggctttctggcagggagtgcctctctccccactccaagttgccgagaatgtgtcttttgtagaggaatacaggtggctcgcttacgtgttgctgctgctcctagagctgctggtctgtctgttcacactgctgggtctggcaaagcaatctaagtggctcgtgatcgtgatgaccgtgatgtctctgctagtcttagtcctgtcttgggggagcatgggcctagaggcggccactgcggttgggctgtctgatttctgtagtaatccagatccatatgtcctgaatctaactcaggaggagaccggcctgtcctccgaggccgatagtgtccccgcaagctctggccaacaccccttgcctgccgctggacccggggcaaggagctgcgcatccgtgccgtttagcgcggaagctagcgcggtacttggaggcgattccgaatgcgatcgccgaaagtttcctccagtgggtggcaccgcgactctgccccagccagctcaggggctgtggtgcagcccagctggtcccgtaagaagacggccggggcgtcccgccctgcctgcgaccctattacctgccgtgtgtcggtctgctggacactgccctctgcagcctgcgcctagcctgggtccactgcccacgcagtag

SEQ ID NO: 297146 - DNA, 1362 bp, Artificial Sequence
  derived and/or modified sequence
atgggagcaccacctggttacaggccatctgcctgggttcatctgctccaccagctgccgagagccgatttccaattgagacctgtgccttcggtgttcgctccacaggagcaagaatatcaacaggaccagagttcactggctgttacccagagaccccctcccaccactccactacaccggcttcggcctcgcccaaggctcacccctgctcttgcgagacgacccccagaggccgcaaggggtgacccaagaccccagagtccccctgaagctctcctgctggtagctgcgctggctggcctcggtctgggcctgagtctaatcttcattgccgtgtacctcattaggttctgctgctgtcgacctccggaacctcctggctcaaagattcccagtcccggaggagggtgtgttacctggtcgtgtatagtcgcattactggctggctgcactggcatagggatcggcttttatggtaactcagagacgtcagatggcgtctcacaactcagcagcgcattactccatgcgaaccataccttgtcgaccatcgaccacttggtcctggagaccgtcgagcggctgggagaagccgtccgtactgagctcacgacacttgaggaggtcctcgagcccaggacagaactcgtggccgcagccagaggggcaaggcgacaggcggaggctgcggcacagcagttgcagggcttggcattctggcagggagtgcctttgagccccctgcaggttgcggaaaacgtctctttcgtggaggaatacagatggctggcctacgtgctgctgttgctgttagaactgctggtttgtttatttacgttgttaggattggcgaagcagagcaagtggcttgtgatcgtgatgaccgttatgtccttactggttctcgtgctgagctggggcagtatgggcctggaggctgccaccgccgtgggcttaagcgatttctgcagtaatccggatccctacgtgctgaatcttacccaggaagaaaccggacttagctccgaagccgactccgtgccagcctcatccggccaacatcccctgccggctgccggtccgggagcgaggagctgtgcatccgtcccgttttctgccgaggcgtcagcagtgctgggaggcgacagtgagtgcgaccgcagaaaatttccgccagtaggcggtactgcaaccttacctcagcccgctcaagggttgtggtgttctcctgccggacctgtgcgcaggcgtccagggagacccgctcttcctgccaccctgctgccagccgtgtgtcggtccgcaggacattgtcccctgcagcccgcacctagcctaggcccactacctacgcagtag

SEQ ID NO: 297147 - protein, 632 aa, Artificial Sequence
  derived and/or modified sequence
MTPALTALLCLGLSLGPRTRVQAGPFPKPTLWAEPGSVISWGSPVTIWCQGSLEAQEYQLDKEGSPEPLDRNNPLEPKNKARFSIPSMTQHHAGRYRCHYYSSAGWSEPSDPLELVMTGFYNKPTLSALPSPVVASGGNMTLRCGSQKGYHHFVLMKEGEHQLPRTLDSQQLHSGGFQALFPVGPVTPSHRWRFTCYYYYTNTPRVWSHPSDPLEILPSGVSRKPSLLTLQGPVLAPGQSLTLQCGSDVGYNRFVLYKEGERDFLQRPGQQPQAGLSQANFTLGPVSPSNGGQYRCYGAHNLSSEWSAPSDPLNILMAGQIYDTVSLSAQPGPTVASGENVTLLCQSWWQFDTFLLTKEGAAHPPLRLRSMYGAHKYQAEFPMSPVTSAHAGTYRCYGSYSSNPHLLSHPSEPLELVVSGHSGGSSLPPTGPPSTPGLGRYLEVLIGVSVAFVLLLFLLLFLLLRRQRHSKHRTSDQRKTDFQRPAGAAETEPKDRGLLRRSSPAADVQEENLYAAVKDTQSEDRVELDSQQSPHDEDPQAVTYAPVKHSSPRREMASPPSSLSGEFLDTKDRQVEEDRQMDTEAAASEASQDVTYAQLHSLTLRRKATEPPPSQEGEPPAEPSIYATLAIH

SEQ ID NO: 297148 - protein, 632 aa, Artificial Sequence
  derived and/or modified sequence
MTPALTALLCLGLSLGPRTRVQAGPFPKPTLWAEPGSVISWGSPVTIWCQGSLEAQEYQLDKEGSPEPLDRNNPLEPKNKARFSIPSMTQHHAGRYRCHYYSSAGWSEPSDPLELVMTGFYNKPTLSALPSPVVASGGNMTLRCGSQKGYHHFVLMKEGEHQLPRTLDSQQLHSGGFQALFPVGPVTPSHRWRFTCYYYYTNTPRVWSHPSDPLEILPSGVSRKPSLLTLQGPVLAPGQSLTLQCGSDVGYDRFVLYKEGERDFLQRPGQQPQAGLSQANFTLGPVSPSHGGQYRCYGAHNLSSEWSAPSDPLNILMAGQIYDTVSLSAQPGPTVASGENVTLLCQSRGYFDTFLLTKEGAAHPPLRLRSMYGAHKYQAEFPMSPVTSAHAGTYRCYGSYSSNPHLLSFPSEPLELMVSGHSGGSSLPPTGPPSTPGLGRYLEVLIGVSVAFVLLLFLLLFLLLRRQRHSKHRTSDQRKTDFQRPAGAAETEPKDRGLLRRSSPAADVQEENLYAAVKDTQSEDRVELDSQQSPHDEDPQAVTYAPVKHSSPRREMASPPSSLSGEFLDTKDRQVEEDRQMDTEAAASEASQDVTYAQLHSLTLRRKATEPPPSQEGEPPAEPSIYATLAIH

SEQ ID NO: 297149 - protein, 632 aa, Artificial Sequence
  derived and/or modified sequence
MTPALTALLCLGLSLGPRTRVQAGPFPKPTLWAEPGSVISWGSPVTIWCQGSQEAQEYRLHKEGSPEPLDRNNPLEPKNKARFSIPSMTEHHAGRYRCHYYSSAGWSEPSDPLEMVMTGAYSKPTLSALPSPVVASGGNMTLRCGSQKGYHHFVLMKEGEHQLPRTLDSQQLHSRGFQALFPVGPVTPSHRWRFTCYYYYTNTPWVWSHPSDPLEILPSGVSRKPSLLTLQGPVLAPGQSLTLQCGSDVGYNRFVLYKEGERDFLQRPGQQPQAGLSQANFTLGPVSPSNGGQYRCYGAHNLSSEWSAPSDPLNILMAGQIYDTVSLSAQPGPTVASGENVTLLCQSWWQFDTFLLTKEGAAHPPLRLRSMYGAHKYQAEFPMSPVTSAHAGTYRCYGSYSSNPHLLSHPSEPLELVVSGHSGGSSLPPTGPPSTPGLGRYLEVLIGVSVAFVLLLFLLLFLLLRRQRHSKHRTSDQRKTDFQRPAGAAETEPKDRGLLRRSSPAADVQEENLYAAVKDTQSEDRVELDSQQSPHDEDPQAVTYAPVKHSSPRREMASPPSSLSGEFLDTKDRQVEEDRQMDTEAAASEASQDVTYAQLHSLTLRRKATEPPPSQEGEPPAEPSIYATLAIH

SEQ ID NO: 297150 - DNA, 1899 bp, Artificial Sequence
  derived and/or modified sequence
atgacccccgccctgaccgccctgctgtgcctgggcctgagcctgggccccagaaccagagtgcaggccggccccttccccaagcccaccctgtgggccgagcccggcagcgtgatcagctggggcagccccgtgaccatctggtgccagggcagcctggaggcccaggagtaccagctggacaaggagggcagccccgagcccctggacagaaacaaccccctggagcccaagaacaaggccagattcagcatccccagcatgacccagcaccacgccggcagatacagatgccactactacagcagcgccggctggagcgagcccagcgaccccctggagctggtgatgaccggcttctacaacaagcccaccctgagcgccctgcccagccccgtggtggccagcggcggcaacatgaccctgagatgcggcagccagaagggctaccaccacttcgtgctgatgaaggagggcgagcaccagctgcccagaaccctggacagccagcagctgcacagcggcggcttccaggccctgttccccgtgggccccgtgacccccagccacagatggagattcacctgctactactactacaccaacacccccagagtgtggagccaccccagcgaccccctggagatcctgcccagcggcgtgagcagaaagcccagcctgctgaccctgcagggccccgtgctggcccccggccagagcctgaccctgcagtgcggcagcgacgtgggctacaacagattcgtgctgtacaaggagggcgagagagacttcctgcagagacccggccagcagccccaggccggcctgagccaggccaacttcaccctgggccccgtgagccccagcaacggcggccagtacagatgctacggcgcccacaacctgagcagcgagtggagcgcccccagcgaccccctgaacatcctgatggccggccagatctacgacaccgtgagcctgagcgcccagcccggccccaccgtggccagcggcgagaacgtgaccctgctgtgccagagctggtggcagttcgacaccttcctgctgaccaaggagggcgccgcccacccccccctgagactgagaagcatgtacggcgcccacaagtaccaggccgagttccccatgagccccgtgaccagcgcccacgccggcacctacagatgctacggcagctacagcagcaacccccacctgctgagccaccccagcgagcccctggagctggtggtgagcggccacagcggcggcagcagcctgccccccaccggcccccccagcacccccggcctgggcagatacctggaggtgctgatcggcgtgagcgtggccttcgtgctgctgctgttcctgctgctgttcctgctgctgagaagacagagacacagcaagcacagaaccagcgaccagagaaagaccgacttccagagacccgccggcgccgccgagaccgagcccaaggacagaggcctgctgagaagaagcagccccgccgccgacgtgcaggaggagaacctgtacgccgccgtgaaggacacccagagcgaggacagagtggagctggacagccagcagagcccccacgacgaggacccccaggccgtgacctacgcccccgtgaagcacagcagccccagaagagagatggccagcccccccagcagcctgagcggcgagttcctggacaccaaggacagacaggtggaggaggacagacagatggacaccgaggccgccgccagcgaggccagccaggacgtgacctacgcccagctgcacagcctgaccctgagaagaaaggccaccgagcccccccccagccaggagggcgagccccccgccgagcccagcatctacgccaccctggccatccactag

SEQ ID NO: 297151 - DNA, 1899 bp, Artificial Sequence
  derived and/or modified sequence
atgacccccgccctgaccgccctgctgtgcctgggcctgagcctgggccccagaaccagagtgcaggccggccccttccccaagcccaccctgtgggccgagcccggcagcgtgatcagctggggcagccccgtgaccatctggtgccagggcagcctggaggcccaggagtaccagctggacaaggagggcagccccgagcccctggacagaaacaaccccctggagcccaagaacaaggccagattcagcatccccagcatgacccagcaccacgccggcagatacagatgccactactacagcagcgccggctggagcgagcccagcgaccccctggagctggtgatgaccggcttctacaacaagcccaccctgagcgccctgcccagccccgtggtggccagcggcggcaacatgaccctgagatgcggcagccagaagggctaccaccacttcgtgctgatgaaggagggcgagcaccagctgcccagaaccctggacagccagcagctgcacagcggcggcttccaggccctgttccccgtgggccccgtgacccccagccacagatggagattcacctgctactactactacaccaacacccccagagtgtggagccaccccagcgaccccctggagatcctgcccagcggcgtgagcagaaagcccagcctgctgaccctgcagggccccgtgctggcccccggccagagcctgaccctgcagtgcggcagcgacgtgggctacgacagattcgtgctgtacaaggagggcgagagagacttcctgcagagacccggccagcagccccaggccggcctgagccaggccaacttcaccctgggccccgtgagccccagccacggcggccagtacagatgctacggcgcccacaacctgagcagcgagtggagcgcccccagcgaccccctgaacatcctgatggccggccagatctacgacaccgtgagcctgagcgcccagcccggccccaccgtggccagcggcgagaacgtgaccctgctgtgccagagcagaggctacttcgacaccttcctgctgaccaaggagggcgccgcccacccccccctgagactgagaagcatgtacggcgcccacaagtaccaggccgagttccccatgagccccgtgaccagcgcccacgccggcacctacagatgctacggcagctacagcagcaacccccacctgctgagcttccccagcgagcccctggagctgatggtgagcggccacagcggcggcagcagcctgccccccaccggcccccccagcacccccggcctgggcagatacctggaggtgctgatcggcgtgagcgtggccttcgtgctgctgctgttcctgctgctgttcctgctgctgagaagacagagacacagcaagcacagaaccagcgaccagagaaagaccgacttccagagacccgccggcgccgccgagaccgagcccaaggacagaggcctgctgagaagaagcagccccgccgccgacgtgcaggaggagaacctgtacgccgccgtgaaggacacccagagcgaggacagagtggagctggacagccagcagagcccccacgacgaggacccccaggccgtgacctacgcccccgtgaagcacagcagccccagaagagagatggccagcccccccagcagcctgagcggcgagttcctggacaccaaggacagacaggtggaggaggacagacagatggacaccgaggccgccgccagcgaggccagccaggacgtgacctacgcccagctgcacagcctgaccctgagaagaaaggccaccgagcccccccccagccaggagggcgagccccccgccgagcccagcatctacgccaccctggccatccactag

SEQ ID NO: 297152 - DNA, 1899 bp, Artificial Sequence
  derived and/or modified sequence
atgacacccgctttaactgctctcctgtgcctgggactgtctcttgggcctcgtactagggtgcaggcagggccctttcccaaaccgacgttgtgggctgaaccgggatcggtcattagttggggcagccctgtcactatctggtgccaggggtccctcgaagcccaggagtatcagctagataaagagggcagccccgagccactggaccgaaataaccctctggaacctaaaaataaggctaggtttagtatcccctctatgacccagcaccacgccggcaggtatcggtgtcactattactcttcagctgggtggtccgaacctagtgacccccttgagctggtgatgactgggttttacaacaaacccacactgtccgctctgccctcaccagtcgtggcttctggaggtaatatgaccctgcgctgtggcagtcagaaggggtatcaccatttcgttctgatgaaggaaggggaacatcaactgccaagaactctggattcacagcagctacattcaggaggatttcaggcactgtttcctgtggggccagtgactccgtcccaccgatggcggttcacctgctactattattacacaaacacacctagagtgtggagtcatccgagcgatccactggaaattctgccttctggggtgagccgaaaaccaagtcttttgaccctgcagggaccggtacttgcccctgggcagagcctgacactgcagtgcggatcagacgtgggttacaaccggttcgttctctataaggagggagaacgggactttcttcagagaccaggccagcaaccgcaggccggtctgagccaggccaactttacattgggccccgtgtctccgagcaatggaggacaataccggtgctatggagcccacaatttgagctcggagtggtcagccccaagcgaccctctcaatattcttatggcaggccaaatatatgacaccgtctctttatcagctcagcctggacctacggttgcctccggtgagaacgtaacacttctgtgtcagagttggtggcaatttgatactttcctgttaaccaaggaaggggccgcacaccctccactgcggttacggagtatgtatggggcccataaatatcaggcggaatttcctatgtcccctgttacatcagcccatgcgggcacatatcggtgttatggctcgtactcttcaaacccgcatcttctttcccacccctccgagccgctcgagctagtcgtcagcggtcactcaggtggttccagcttacccccaacaggaccccccagcactcctgggctgggaaggtatctggaggttttgatcggcgtttctgtcgcatttgttctgctcctgtttcttcttctgttcttgctgttgagacgtcagaggcattccaagcaccgtacgtcagatcagaggaaaacggattttcagagacctgccggggctgcagagaccgaaccaaaagacaggggactgttgaggcgatcatcccccgcggccgatgtgcaggaggagaatctctatgcagcggtgaaggatacccaatctgaggaccgagtggagctagacagccagcagagcccacacgacgaggatccccaggcagtgacatatgctcctgtgaagcacagcagccccaggcgtgagatggcaagtcctccaagcagtttgtccggagagtttttagatacaaaggaccgacaggtagaagaagaccgtcagatggatactgaggccgccgcctctgaggcctcacaggatgtgacctacgctcagctgcacagtctgaccttgagaaggaaagcaaccgagcctcctccttctcaagagggggagcccccagcagaacccagtatctacgctaccctcgccatacattag

SEQ ID NO: 297153 - DNA, 1899 bp, Artificial Sequence
  derived and/or modified sequence
atgacccccgccttaactgcactgctttgtctgggcctatctctcggccctcgaacacgggtgcaggccgggcccttccctaaaccgacactgtgggctgagccagggagcgtcatttcttgggggtcccccgtgaccatctggtgtcaggggagcttagaagcccaagagtaccagctggataaagagggtagccctgaacctttagacaggaacaatcccctcgaacctaagaataaggcccggttctcaatccccagtatgacccagcatcatgctggccggtatcgctgtcattactactctagcgcggggtggagcgaacccagtgatccattggagctggtgatgactggtttttataataaacccaccctaagcgccctgcctagtccagtggtggcatccggaggaaacatgactctcagatgtggaagccaaaaaggataccaccacttcgtgctgatgaaagaaggggagcaccagctgccacgcaccctagactcccagcaactgcactctggtggctttcaggcactgttccctgtggggcccgttactccgagccatcggtggagatttacttgttattactattataccaatacaccacgcgtgtggagccatccgtcagatcctctagagatcctaccaagcggagtctctcggaaaccatcactcctgactctgcagggtccagtcttggcaccagggcagagtcttaccctccaatgtggatctgacgtgggctacgaccggtttgtgctttacaaggagggcgagcgggacttcctgcagagacctggccaacagccccaagccggcctgagtcaggctaacttcactctcggtcctgtgagccccagccacggcggccagtaccgatgctatggtgctcataatttaagctccgaatggagtgccccctctgatccgttgaacatcttgatggcgggccaaatctatgatactgtttcccttagtgcacagcccggtcccaccgtggccagcggggagaacgtgacgctgctttgtcagtctcgcgggtatttcgataccttccttctaaccaaggagggggctgcccaccctccactgcgcctccgtagtatgtacggtgctcacaagtaccaggctgaattccccatgagccccgtgacttccgcccatgcaggaacatacaggtgttacgggagctatagctcaaacccacacctgttatcttttccgtccgaacctttggagctgatggtttccggtcacagcgggggctcctctctgccccccactggtccacctagtactcccggcctgggacgctacctggaagtcttgattggcgtgagcgtcgctttcgttctgctgttgtttctgctcctgtttctacttctccggaggcagcgacacagcaaacacagaactagtgaccagcgcaaaactgacttccaacgacccgccggtgcagcagagacagagcctaaggatagggggctattgaggaggtcctcaccggccgccgacgtgcaggaggaaaatttgtatgctgcagttaaagacactcagagcgaggacagagttgagcttgatagtcagcaaagtccacacgacgaggacccacaagccgtgacgtacgcccctgtcaagcattcatcccccaggagggagatggcttcgccaccatctagcctttccggcgaatttctagacacaaaagatcgccaagtcgaagaagatagacagatggataccgaggctgccgcatccgaagcgtcacaagacgtgacatatgcacaattgcactcactaactctacgccggaaggccaccgagccccctccttctcaggagggtgaacctcccgcagaaccaagcatctatgcgacgctggccatccactag

SEQ ID NO: 297154 - DNA, 1899 bp, Artificial Sequence
  derived and/or modified sequence
atgaccccagccctgacagccctgctgtgcctgggcctgagcctgggccccaggaccagggtgcaggccggccccttccccaagcccaccctgtgggccgagcccggcagcgtcatctcctggggcagccctgtgaccatctggtgccagggcagcctggaggcccaggagtaccagctggacaaggagggcagccctgagcccctggacaggaacaaccccctggagcccaagaacaaggcccgcttcagcatccccagcatgacccagcaccacgccggccgctaccgctgccactactacagcagcgctggctggagcgagcccagcgaccccctggagctggtgatgacaggcttctacaacaagcccaccctgagcgccctgcccagccctgtggtggccagcggcggcaacatgaccctgcgctgtggcagccagaagggctaccaccactttgtgctgatgaaggagggggagcaccagctgcccaggaccctggacagccagcagctgcacagcggcggcttccaggccctcttccctgtgggccctgtgacccccagccaccgctggaggttcacctgctactactactacaccaacaccccccgggtgtggagccaccccagcgaccccctggagatcctgcccagcggcgtgtccaggaagcccagcctgctgaccctgcagggccctgtgctggcccctggccagagcctgaccctgcagtgtggcagtgatgtgggctacaacagatttgtgctgtacaaggagggggagcgggacttcctgcagaggcctggccagcagccccaggccggcctgagccaggccaacttcaccctgggccctgtgagccccagcaatggaggccagtaccgctgctatggagcccacaacctgagcagcgagtggagcgcccccagcgaccccctgaacatcctgatggccggccagatctatgacacagtgtccctgagcgcccagcccggccccaccgtggccagcggagaaaatgtgaccctgctgtgccagagctggtggcagtttgacaccttcctgctgaccaaggagggcgccgcccacccccccctgcggctgcgctccatgtacggggcccacaagtaccaggccgagttccccatgagccctgtgaccagcgcccatgctggcacctaccgctgctacggcagctacagcagcaacccccacctgctgagccaccccagcgagcccctggagctggtggtgtctggccacagcggcggcagcagcctgccccccaccggcccccccagcaccccaggcctgggccgctacctggaggtgctgattggagtgtctgtggcctttgtgctgctgctcttcctgctgctcttcctgctgctgcggcggcagaggcacagcaagcacaggaccagtgaccagaggaagacagacttccagaggcctgctggagctgctgagacagagcccaaggaccggggcctgctgcggcgcagcagccctgctgctgatgtgcaggaggagaacctgtatgctgctgtgaaggacacccagagtgaagatagagtggagctggacagccagcagagcccccatgatgaggacccccaggccgtgacctacgcccctgtgaagcacagcagcccccggcgggagatggccagcccccccagcagcctgagcggggagttcctggacaccaaggaccggcaggtggaggaggaccggcagatggacacagaagctgctgccagcgaggccagccaggatgtgacctacgcccagctgcacagcctgaccctgcggaggaaggccacagagcccccacccagccaggagggggagcccccagctgagcccagcatctatgccaccctggccatccactag

SEQ ID NO: 297155 - DNA, 1899 bp, Artificial Sequence
  derived and/or modified sequence
atgaccccagccctgacagccctgctgtgcctgggcctgagcctgggccccaggaccagggtgcaggccggccccttccccaagcccaccctgtgggccgagcccggcagcgtcatctcctggggcagccctgtgaccatctggtgccagggcagcctggaggcccaggagtaccagctggacaaggagggcagccctgagcccctggacaggaacaaccccctggagcccaagaacaaggcccgcttcagcatccccagcatgacccagcaccacgccggccgctaccgctgccactactacagcagcgctggctggagcgagcccagcgaccccctggagctggtgatgacaggcttctacaacaagcccaccctgagcgccctgcccagccctgtggtggccagcggcggcaacatgaccctgcgctgtggcagccagaagggctaccaccactttgtgctgatgaaggagggggagcaccagctgcccaggaccctggacagccagcagctgcacagcggcggcttccaggccctcttccctgtgggccctgtgacccccagccaccgctggaggttcacctgctactactactacaccaacaccccccgggtgtggagccaccccagcgaccccctggagatcctgcccagcggcgtgtccaggaagcccagcctgctgaccctgcagggccctgtgctggcccctggccagagcctgaccctgcagtgtggcagtgatgtgggctatgacagatttgtgctgtacaaggagggggagcgggacttcctgcagaggcctggccagcagccccaggccggcctgagccaggccaacttcaccctgggccctgtgagccccagccacggcggccagtaccgctgctatggagcccacaacctgagcagcgagtggagcgcccccagcgaccccctgaacatcctgatggccggccagatctatgacacagtgtccctgagcgcccagcccggccccaccgtggccagcggagaaaatgtgaccctgctgtgccagagccggggctactttgacaccttcctgctgaccaaggagggcgccgcccacccccccctgcggctgcgctccatgtacggggcccacaagtaccaggccgagttccccatgagccctgtgaccagcgcccatgctggcacctaccgctgctacggcagctacagcagcaacccccacctgctgtccttccccagcgagcccctggagctgatggtgtctggccacagcggcggcagcagcctgccccccaccggcccccccagcaccccaggcctgggccgctacctggaggtgctgattggagtgtctgtggcctttgtgctgctgctcttcctgctgctcttcctgctgctgcggcggcagaggcacagcaagcacaggaccagtgaccagaggaagacagacttccagaggcctgctggagctgctgagacagagcccaaggaccggggcctgctgcggcgcagcagccctgctgctgatgtgcaggaggagaacctgtatgctgctgtgaaggacacccagagtgaagatagagtggagctggacagccagcagagcccccatgatgaggacccccaggccgtgacctacgcccctgtgaagcacagcagcccccggcgggagatggccagcccccccagcagcctgagcggggagttcctggacaccaaggaccggcaggtggaggaggaccggcagatggacacagaagctgctgccagcgaggccagccaggatgtgacctacgcccagctgcacagcctgaccctgcggaggaaggccacagagcccccacccagccaggagggggagcccccagctgagcccagcatctatgccaccctggccatccactag

SEQ ID NO: 297156 - DNA, 2066 bp, Artificial Sequence
  derived and/or modified sequence
ccatgacgcccgccctcacagccctgctctgccttgggctgagtctgggccccaggacccgcgtgcaggcagggcccttccccaaacccaccctctgggctgagccaggctctgtgatcagctgggggagccccgtgaccatctggtgtcaggggagcctggaggcccaggagtaccaactggataaagagggaagcccagagcccttggacagaaataacccactggaacccaagaacaaggccagattctccatcccatccatgacacagcaccatgcagggagataccgctgccactattacagctctgcaggctggtcagagcccagcgaccccctggagctggtgatgacaggattctacaacaaacccaccctctcagccctgcccagccctgtggtggcctcaggggggaatatgaccctccgatgtggctcacagaagggatatcaccattttgttctgatgaaggaaggagaacaccagctcccccggaccctggactcacagcagctccacagtggggggttccaggccctgttccctgtgggccccgtgacccccagccacaggtggaggttcacatgctattactattatacaaacaccccccgggtgtggtcccaccccagtgaccccctggagattctgccctcaggcgtgtctaggaagccctccctcctgaccctgcagggccctgtcctggcccctgggcagagcctgaccctccagtgtggctctgatgtcggctacaacagatttgttctgtataaggagggggaacgtgacttcctccagcgccctggccagcagccccaggctgggctctcccaggccaacttcaccctgggccctgtgagcccctccaatgggggccagtacaggtgctacggtgcacacaacctctcctccgagtggtcggcccccagcgaccccctgaacatcctgatggcaggacagatctatgacaccgtctccctgtcagcacagccgggccccacagtggcctcaggagagaacgtgaccctgctgtgtcagtcatggtggcagtttgacactttccttctgaccaaagaaggggcagcccatcccccactgcgtctgagatcaatgtacggagctcataagtaccaggctgaattccccatgagtcctgtgacctcagcccacgcggggacctacaggtgctacggctcatacagctccaacccccacctgctgtctcaccccagtgagcccctggagctcgtggtctcaggacactctggaggctccagcctcccacccacagggccgccctccacacctggtctgggaagatacctggaggttttgattggggtctcggtggccttcgtcctgctgctcttcctcctcctcttcctcctcctccgacgtcagcgtcacagcaaacacaggacatctgaccagagaaagactgatttccagcgtcctgcaggggctgcggagacagagcccaaggacaggggcctgctgaggaggtccagcccagctgctgacgtccaggaagaaaacctctatgctgccgtgaaggacacacagtctgaggacagggtggagctggacagtcagcagagcccacacgatgaagacccccaggcagtgacgtatgccccggtgaaacactccagtcctaggagagaaatggcctctcctccctcctcactgtctggggaattcctggacacaaaggacagacaggtggaagaggacaggcagatggacactgaggctgctgcatctgaagcctcccaggatgtgacctacgcccagctgcacagcttgacccttagacggaaggcaactgagcctcctccatcccaggaaggggaacctccagctgagcccagcatctacgccactctggccatccactagcccggggggtacgcagaccccacactcagcagaaggagactcaggactgctgaaggcacgggagctgcccccagtggacaccagtgaaccccagtcagcctggacccctaacacagaccatgaggagacgctgggaacttgtgggactcacctgactcaaagatg

SEQ ID NO: 297157 - DNA, 2066 bp, Artificial Sequence
  derived and/or modified sequence
ccatgacgcccgccctcacagccctgctctgccttgggctgagtctgggccccaggacccgcgtgcaggcagggcccttccccaaacccaccctctgggctgagccaggctctgtgatcagctgggggagccccgtgaccatctggtgtcaggggagcctggaggcccaggagtaccaactggataaagagggaagcccagagcccttggacagaaataacccactggaacccaagaacaaggccagattctccatcccatccatgacacagcaccatgcagggagataccgctgccactattacagctctgcaggctggtcagagcccagcgaccccctggagctggtgatgacaggattctacaacaaacccaccctctcagccctgcccagccctgtggtggcctcaggggggaatatgaccctccgatgtggctcacagaagggatatcaccattttgttctgatgaaggaaggagaacaccagctcccccggaccctggactcacagcagctccacagtggggggttccaggccctgttccctgtgggccccgtgacccccagccacaggtggaggttcacatgctattactattatacaaacaccccccgggtgtggtcccaccccagtgaccccctggagattctgccctcaggcgtgtctaggaagccctccctcctgaccctgcagggccctgtcctggcccctgggcagagcctgaccctccagtgtggctctgatgtcggctacgacagatttgttctgtataaggagggggaacgtgacttcctccagcgccctggccagcagccccaggctgggctctcccaggccaacttcaccctgggccctgtgagcccctcccacgggggccagtacaggtgctatggtgcacacaacctctcctccgagtggtcggcccccagcgaccccctgaacatcctgatggcaggacagatctatgacaccgtctccctgtcagcacagccgggccccacagtggcctcaggagagaacgtgaccctgctgtgtcagtcacggggttattttgacactttccttctgaccaaagaaggggcagcccatcccccactgcgtctgagatcaatgtacggagctcataagtaccaggctgaattccccatgagtcctgtgacctcagcccacgcggggacctacaggtgctacggctcatacagctccaacccccacctgctgtctttccccagtgagcccctggaactcatggtctcaggacactctggaggctccagcctcccacccacagggccgccctccacacctggtctgggaagatacctggaggttttgattggggtctcggtggccttcgtcctgctgctcttcctcctcctcttcctcctcctccgacgtcagcgtcacagcaaacacaggacatctgaccagagaaagactgatttccagcgtcctgcaggggctgcggagacagagcccaaggacaggggcctgctgaggaggtccagcccagctgctgacgtccaggaagaaaacctctatgctgccgtgaaggacacacagtctgaggacagggtggagctggacagtcagcagagcccacacgatgaagacccccaggcagtgacgtatgccccggtgaaacactccagtcctaggagagaaatggcctctcctccctcctcactgtctggggaattcctggacacaaaggacagacaggtggaagaggacaggcagatggacactgaggctgctgcatctgaagcctcccaggatgtgacctacgcccagctgcacagcttgacccttagacggaaggcaactgagcctcctccatcccaggaaggggaacctccagctgagcccagcatctacgccactctggccatccactagcccggggggtacgcagaccccacactcagcagaaggagactcaggactgctgaaggcacgggagctgcccccagtggacaccagtgaaccccagtcagcctggacccctaacacagaccatgaggagacgctgggaacttgtgggactcacctgactcaaagatg

SEQ ID NO: 297158 - DNA, 1899 bp, Artificial Sequence
  derived and/or modified sequence
atgacccccgccctgaccgccctgctgtgcctgggcctgagcctgggacctagaactcgcgtgcaggcggggcccttcccaaaaccaaccctctgggcagagcccggtagtgttatttcttgggggagcccagtgacaatctggtgtcagggttccctggaggcccaggaataccagctggacaaagagggtagccctgagccgttagacagaaacaatcccctggagcctaaaaacaaagccaggttctctatcccctccatgacccaacaccacgctggaaggtatagatgtcattactacagctcagctggttggtcagaaccaagcgatcctctcgaactggttatgaccgggttttacaacaagcccaccctgtccgcgcttccatcacctgtggtggcatccgggggcaatatgacgctaaggtgtgggagccaaaaaggctaccatcattttgtgctgatgaaagagggtgagcaccagctgccccggaccctcgactcacaacagttgcactcaggaggttttcaggccctgtttcccgtgggacccgttacaccttcccacagatggcggttcacttgttattactactatactaacaccccccgagtctggtcccacccatccgacccgctcgagatcctgccaagcggggtctctaggaagccatccctccttaccctgcaaggacccgtgctggctcccgggcagagtctaaccctgcagtgtgggtctgatgtcggctataatcgcttcgttctttacaaggagggtgagcgagatttcctgcagagacccggacagcagccacaagccggtttgtctcaagcgaacttcacgcttgggcccgtctccccttctaatggggggcagtatagatgctacggagctcacaacctgagtagcgagtggagcgctcccagtgaccctctcaacatactaatggccggccagatctatgacaccgtgagcctgtctgcccaaccaggtccgactgtggcttctggtgaaaacgtaaccctgctctgccagtcttggtggcagttcgacactttcctcctgaccaaagagggtgcagctcacccacccctacgtctgagatcaatgtacggcgcgcacaaatatcaggctgaatttcccatgagtcccgtgaccagtgcccatgcaggaacttataggtgttacggctcctactcatcaaacccacacttgctgtctcatccgagcgagcctctggaactcgtggtatctgggcatagcggcggcagctcactgccgccaactggacctcccagcaccccaggcctgggcaggtacttggaggtgttgatcggggtctccgttgcctttgtgctcctgctgttcctgctgctgtttctcctgctccgacgacaaagacactcgaagcacagaaccagcgaccagagaaagaccgattttcagcggcctgccggggcagcagagacagagccaaaggatagaggactgcttcgaagatctagtcccgcggccgatgtgcaggaggagaacttatatgcagctgtgaaggacacacaatcagaggatagggtggaattggactcacagcagtcaccccatgacgaggacccccaagccgtcacatatgcacctgtaaagcattctagcccacggcgagagatggcaagtcctcccagctccctgagtggcgaattcctcgatacaaaggacaggcaggtagaagaagatagacagatggacacagaggccgcagctagcgaggcttcccaggatgttacttacgcacaactccactcgttgactcttcgtcgcaaggccacggagcccccgccctcccaggagggtgaaccgccagccgagccctcaatctacgccaccctggctatacactag

SEQ ID NO: 297159 - DNA, 1899 bp, Artificial Sequence
  derived and/or modified sequence
atgacccccgccctgaccgccctgctgtgcctgggcctgagcctgggccctagaacacgcgtacaggccggaccattcccaaagcctacactgtgggcagaacctggttccgtgatctcatggggatccccagtcacgatctggtgccagggaagtttggaggcacaggagtatcaacttgataaggaaggcagtcctgagccccttgaccgcaataaccccttggaaccgaaaaacaaagccaggttttccatcccgagtatgacgcaacaccacgctgggagatatcgctgccactactattcgtctgccggatggtcagagccgtctgaccctctggaactggtgatgaccggattctataacaagcccaccttgagtgctctccccagccccgtggtggccagcggcgggaacatgacattgcggtgtgggtcccaaaaaggctaccaccatttcgtcttgatgaaggagggagagcaccagctgccaagaaccctggactcccaacagctgcacagtggcggttttcaggcactgttccccgtgggccctgtaaccccaagccatcgatggcgatttacatgttattactattacacaaacactccaagagtttggagtcaccctagtgaccccctggagattctaccgagcggcgtctccagaaagccctcactcttaaccctccaggggcctgtactggcccccggacagagcctgactttacagtgcggcagtgacgtgggctacgacagatttgtgctatataaggaaggcgaacgagattttttacagcgtcctgggcaacagccacaggccggactttcccaagcgaacttcactctgggccctgtctccccctctcacgggggacaataccgatgttacggagctcataacctgagcagcgaatggagtgctccctctgatccattgaacatcctgatggcaggccagatatacgataccgtgagcctgtctgctcagccgggtcctacagtggcctctggcgaaaatgtgacccttctgtgccagagcagaggatactttgacacatttctgttgactaaagaaggagctgcccatcctcccctcagactaaggtcaatgtatggggcccacaagtatcaggcagagttccccatgagtcctgtcacctccgcccatgcagggacataccgctgctacgggtcctattcaagcaacccgcacctactgtccttcccatctgagcctttggaactgatggtttccgggcatagcggcgggtcctcactgccaccaaccgggccgccctctactccaggactgggtaggtacctcgaggtacttatcggtgtcagtgtcgccttcgtgctgctgctgtttctgttgcttttcttgctactgcgcagacagcgtcacagcaagcacagaacctcagaccagcggaagaccgattttcagcggccagctggtgcagccgagacagagcccaaagatcgcggtctgctccgaagatcctcccccgccgctgacgtgcaagaagaaaatctctacgccgctgtgaaggacactcaaagtgaggacagggtggaacttgattcccagcagagcccacacgatgaggatcctcaagcagtcacttacgctcctgttaagcatagtagccctagacgggagatggcgagtcctcccagttcactgtctggcgagttcctcgataccaaagaccgccaggtggaagaggataggcagatggacaccgaggctgcggctagcgaagccagccaggacgtgacatacgcccaactgcatagcctgacattgcggcgcaaagccacagagcccccacctagccaggagggggaaccacctgcggaaccttctatctacgccacacttgccattcactag

SEQ ID NO: 297160 - DNA, 1899 bp, Artificial Sequence
  derived and/or modified sequence
atgacacctgctctgaccgccctgttatgcctgggccttagtctgggtcctcgaacaagagtgcaggcgggaccttttcccaagcctacactttgggccgaacccggatcagtgatctcttggggtagccctgttacaatctggtgtcagggatcactagaggcgcaggagtatcagctcgacaaggaaggctcccccgagccgctggatcgtaataaccctttagagcccaagaataaggcccgattttcgataccctcaatgactcaacaccacgctggcaggtatagatgccactattattcatcagcgggatggtccgaaccgagcgacccactggagctggtgatgaccggcttttacaataagcctacactgtcagcacttcccagtccagtagttgcctccgggggtaatatgactttgcgctgcggaagccagaagggctatcaccacttcgtgctgatgaaggaaggagagcaccagcttccgagaaccctcgatagtcagcagttgcacagcgggggtttccaggccctcttcccagttggtcccgtcactcctagccacaggtggaggtttacctgctattattactacaccaatactccacgggtgtggtcgcaccccagcgacccactggagatccttccaagcggcgtgtcacgaaagccttctctgttaacactgcaggggcctgttcttgctccgggacaatcattgaccttgcaatgtgggagcgatgttgggtacaatagattcgtgttatataaagagggtgaacgggacttcttgcagaggcccggacaacagccccaggctggcctaagccaagcaaactttacactgggcccagtgtctccatcaaacggcggacagtatcgctgctacggggcacacaatctttcctccgagtggagtgcaccctcggatcctctgaacattctgatggccggtcagatttacgataccgtttctttatccgcacagccaggacctaccgtagcatcaggtgagaacgtgacgttactgtgtcagagttggtggcaatttgatacctttctgctgacaaaagagggagctgcccacccacctcttcgtttgcgctcaatgtatggggctcataaatatcaagcagagttccccatgagcccagtgactagcgctcatgctggcacttatagatgctacggttcatacagctcgaatcctcacctcctgtctcatccatccgaacctctagaattagtggtgtcaggacactctggagggagcagtctgcctcccacgggacccccatccactcctggcttaggtagatacctagaagtcctgattggggtttccgtcgcattcgtgctcctgctgttcctgctgttattcctcttgctgaggcgacaacgtcactccaagcatcgcacatcagatcagaggaaaaccgactttcagagaccagctggggcagccgaaacagagcctaaggaccgtggtctcctaagaagatcatcccccgctgctgacgttcaggaagaaaatctttacgcagcagtgaaggatacccagagtgaggacagggtcgagctggactcccagcagtcgccacacgatgaagacccacaggccgtgacatacgcccctgtgaagcacagttccccaaggcgcgagatggcctcccctcccagtagtctcagtggcgagttccttgacaccaaagacagacaggtagaggaggacagacagatggatactgaagccgcagcgagcgaagcctctcaagacgttacgtacgctcagctccactctctcacactcaggagaaaagcaactgagccacctccgtcccaggagggagagccgccagccgagccatcaatatatgctaccttggcaatacactag

SEQ ID NO: 297161 - DNA, 1899 bp, Artificial Sequence
  derived and/or modified sequence
atgacccctgcactcacggctctgctttgccttgggttgtccctcggacctcgtacacgcgtgcaggccggaccgtttcctaaaccaactctctgggctgaaccaggaagcgtaataagctggggttcgcccgtcaccatctggtgccagggctcgcttgaggcacaggagtaccagctcgacaaggaaggaagtccagagcctttggatagaaacaaccctcttgagccaaagaataaggcccgattttcaatccctagcatgacacagcatcatgcaggcagataccgctgccattactattctagcgcgggatggagtgaaccatccgatccactggagttagtgatgaccggattctacaacaagcccaccctcagtgccctccccagccccgtggtggcttccggcggtaatatgacactgagatgtggatctcagaaaggttatcatcacttcgtgttgatgaaggaaggtgagcatcagctacctagaaccctggattcacagcagttacatagtgggggttttcaggctctcttcccagttggacctgtgacgccatcgcaccggtggcggttcacttgctactattattacacaaatacccctagggtttggagtcatcccagcgaccctttagaaatcctgccgagtggggtctctaggaagccatccctgcttacactgcagggacctgtgctcgcccctgggcagtcgctcacacttcagtgtggttctgacgttggctacgaccgcttcgtgctgtacaaggagggcgagagggactttcttcagcggcctggtcagcagccgcaggcaggcctatcccaggccaactttacactgggccctgtgtctccttcacacggcggacagtatcggtgctatggtgcccataatctttctagcgagtggtccgccccttccgatccacttaatattctgatggccggacagatctatgacactgtgagcctgagcgcacagcctgggccaacagttgcctctggggaaaacgtcactctcctgtgccaatcacgcggttacttcgataccttccttttaacgaaggaaggcgctgcgcatcccccactcaggttacggtccatgtacggggcacataagtaccaggcagaatttcccatgagtccagtaacctccgctcatgccggaacgtataggtgctacgggagctactcttccaacccccatctactttcctttccatccgaacctttggaactcatggtgagcggtcactccggaggaagttcgctgccaccaaccgggcctccatccacgccaggtcttggccgatacctggaagttctgataggtgtgtcagtggctttcgtgttgctgttgtttctgctgttattcctccttctccggaggcaaaggcatagcaagcacagaaccagcgatcaacgcaaaaccgatttccagaggcctgctggggcagctgaaactgagcctaaggacagaggattgctccgacgttcatcccccgcagccgacgttcaggaggagaatctctacgccgctgtgaaggacacccagagtgaggatcgggtcgagctggatagtcagcaaagtccccatgatgaagatccacaggccgtgacatacgctcctgtgaaacattccagcccgaggagggagatggctagccccccttctagcctttccggagagttcctggataccaaagaccgccaggtggaagaagaccgacagatggatactgaggccgctgcttctgaggcttctcaagacgtgacatacgcccaacttcactccctgacattgaggaggaaagctactgagccgcctccctcccaggagggcgagccaccggctgaaccttctatatatgcaaccctggctatccattag

SEQ ID NO: 297162 - DNA, 1899 bp, Artificial Sequence
  derived and/or modified sequence
atgacaccggcacttacagcactcctgtgtctcggcctttctttgggaccccgcacacgcgtgcaggccggaccttttcccaagcctaccttatgggccgaacccggctccgtgatctcatggggctcaccggttacaatttggtgccaaggatcccaggaggctcaagaatacaggctgcacaaagagggatcacccgaacctttggaccgcaacaacccactggagccaaagaataaggcacgcttttccatcccctcgatgaccgagcaccatgcaggaaggtataggtgccactactactcttccgccggatggtccgaaccaagcgatcctctggagatggtcatgactggcgcctattctaaaccaacccttagtgccctgccttctccagtggtggcatctggcggaaacatgactctccggtgtggttctcagaagggctaccaccactttgtgctaatgaaggagggcgagcaccaacttccacggaccttggattcccaacaactgcactctcggggatttcaagctttgttcccagtaggccccgtgacaccttcacaccgttggcgctttacatgctactactattatactaataccccctgggtatggtcccacccctctgaccccttagagatcctgccatctggggtatccagaaagccatctctgctgactttacagggtcctgtgttggcgccaggccaatcactcactttacagtgcggctctgatgtgggctataaccggtttgtgctttacaaggagggtgagagggatttcctccaacggcccggacaacagccccaagcgggtctatcacaagctaattttactctcgggcccgtgagtccatccaacgggggtcaatataggtgctacggcgctcataacctgagtagcgagtggtcagccccatctgatcctctgaatatcttgatggccggccagatctacgataccgtttctttgtcagcgcagcccggccccacagttgcctcgggcgagaacgtaaccctgttgtgtcagtcttggtggcagttcgacacattcctattgacaaaagagggcgccgcgcatcctcccctgcgcctcaggagcatgtacggagctcataagtatcaggccgaattccccatgtccccggtcacctccgctcacgctgggacgtacagatgctatggaagttactccagcaacccacatttgctcagccatccttcagagcccctggagctggttgtgtctgggcacagcggaggctcgtccctgccaccgacaggtccaccaagtacgccaggtctggggcgctaccttgaggtcttgattggcgtgagtgttgctttcgtgttactgctcttcctgctgctctttctgttgttgagaagacagcgccattcaaaacatcgaacatcggatcagcgcaagacagacttccagcgccctgctggggctgcagaaaccgaacctaaggaccggggactgctccggcggtccagccccgctgctgacgtgcaggaagagaatctctatgccgccgtaaaggacactcagagcgaggacagagtggaacttgactcccagcagagcccccacgatgaggaccctcaggcggtgacatatgcccccgtgaagcactcctccccccggcgtgaaatggcaagccccccaagttcactctcgggagagtttctggacaccaaggaccgacaggtcgaagaggaccggcagatggacaccgaagccgcagctagtgaagcctcacaggacgtgacctatgcccaactgcattcattaactctaaggcgcaaggcaacagaaccccccccgtcccaagaaggcgaacctccggccgagccgagcatctacgcaactttggctatccattag

SEQ ID NO: 297163 - DNA, 1899 bp, Artificial Sequence
  derived and/or modified sequence
atgaccccagccctgacagccctgctgtgcctgggcctgagcctgggccccaggaccagggtgcaggccggccccttccccaagcccaccctgtgggccgagcccggcagcgtcatctcctggggcagccctgtgaccatctggtgccagggcagccaggaggcccaggagtaccgcctgcacaaggagggcagccctgagcccctggacaggaacaaccccctggagcccaagaacaaggcccgcttcagcatccccagcatgacagagcaccacgccggccgctaccgctgccactactacagcagcgctggctggagcgagcccagcgaccccctggagatggtgatgaccggggcctacagcaagcccaccctgagcgccctgcccagccctgtggtggccagcggcggcaacatgaccctgcgctgtggcagccagaagggctaccaccactttgtgctgatgaaggagggggagcaccagctgcccaggaccctggacagccagcagctgcacagccggggcttccaggccctcttccctgtgggccctgtgacccccagccaccgctggaggttcacctgctactactactacaccaacaccccctgggtgtggagccaccccagcgaccccctggagatcctgcccagcggcgtgtccaggaagcccagcctgctgaccctgcagggccctgtgctggcccctggccagagcctgaccctgcagtgtggcagtgatgtgggctacaacagatttgtgctgtacaaggagggggagcgggacttcctgcagaggcctggccagcagccccaggccggcctgagccaggccaacttcaccctgggccctgtgagccccagcaatggaggccagtaccgctgctatggagcccacaacctgagcagcgagtggagcgcccccagcgaccccctgaacatcctgatggccggccagatctatgacacagtgtccctgagcgcccagcccggccccaccgtggccagcggagaaaatgtgaccctgctgtgccagagctggtggcagtttgacaccttcctgctgaccaaggagggcgccgcccacccccccctgcggctgcgctccatgtacggggcccacaagtaccaggccgagttccccatgagccctgtgaccagcgcccatgctggcacctaccgctgctacggcagctacagcagcaacccccacctgctgagccaccccagcgagcccctggagctggtggtgtctggccacagcggcggcagcagcctgccccccaccggcccccccagcaccccaggcctgggccgctacctggaggtgctgattggagtgtctgtggcctttgtgctgctgctcttcctgctgctcttcctgctgctgcggcggcagaggcacagcaagcacaggaccagtgaccagaggaagacagacttccagaggcctgctggagctgctgagacagagcccaaggaccggggcctgctgcggcgcagcagccctgctgctgatgtgcaggaggagaacctgtatgctgctgtgaaggacacccagagtgaagatagagtggagctggacagccagcagagcccccatgatgaggacccccaggccgtgacctacgcccctgtgaagcacagcagcccccggcgggagatggccagcccccccagcagcctgagcggggagttcctggacaccaaggaccggcaggtggaggaggaccggcagatggacacagaagctgctgccagcgaggccagccaggatgtgacctacgcccagctgcacagcctgaccctgcggaggaaggccacagagcccccacccagccaggagggggagcccccagctgagcccagcatctatgccaccctggccatccactag

SEQ ID NO: 297164 - DNA, 2066 bp, Artificial Sequence
  derived and/or modified sequence
ccatgacgcccgccctcacagccctgctctgccttgggctgagtctgggccccaggacccgcgtgcaggcagggcccttccccaaacccaccctctgggctgagccaggctctgtgatcagctgggggagccccgtgaccatctggtgtcaggggagccaggaggcccaggagtaccgactgcataaagagggaagcccagagcccttggacagaaataacccactggaacccaagaacaaggccagattctccatcccatccatgacagagcaccatgcagggagataccgctgccactattacagctctgcaggctggtcagagcccagcgaccccctggagatggtgatgacaggagcctacagcaaacccaccctctcagccctgcccagccctgtggtggcctcaggggggaatatgaccctccgatgtggctcacagaagggatatcaccattttgttctgatgaaggaaggagaacaccagctcccccggaccctggactcacagcagctccacagtcgggggttccaggccctgttccctgtgggccccgtgacccccagccacaggtggaggttcacatgctattactattatacaaacaccccctgggtgtggtcccaccccagtgaccccctggagattctgccctcaggcgtgtctaggaagccctccctcctgaccctgcagggccctgtcctggcccctgggcagagcctgaccctccagtgtggctctgatgtcggctacaacagatttgttctgtataaggagggggaacgtgacttcctccagcgccctggccagcagccccaggctgggctctcccaggccaacttcaccctgggccctgtgagcccctccaatgggggccagtacaggtgctacggtgcacacaacctctcctccgagtggtcggcccccagcgaccccctgaacatcctgatggcaggacagatctatgacaccgtctccctgtcagcacagccgggccccacagtggcctcaggagagaacgtgaccctgctgtgtcagtcatggtggcagtttgacactttccttctgaccaaagaaggggcagcccatcccccactgcgtctgagatcaatgtacggagctcataagtaccaggctgaattccccatgagtcctgtgacctcagcccacgcggggacctacaggtgctacggctcatacagctccaacccccacctgctgtctcaccccagtgagcccctggagctcgtggtctcaggacactctggaggctccagcctcccacccacagggccgccctccacacctggtctgggaagatacctggaggttttgattggggtctcggtggccttcgtcctgctgctcttcctcctcctcttcctcctcctccgacgtcagcgtcacagcaaacacaggacatctgaccagagaaagactgatttccagcgtcctgcaggggctgcggagacagagcccaaggacaggggcctgctgaggaggtccagcccagctgctgacgtccaggaagaaaacctctatgctgccgtgaaggacacacagtctgaggacagggtggagctggacagtcagcagagcccacacgatgaagacccccaggcagtgacgtatgccccggtgaaacactccagtcctaggagagaaatggcctctcctccctcctcactgtctggggaattcctggacacaaaggacagacaggtggaagaggacaggcagatggacactgaggctgctgcatctgaagcctcccaggatgtgacctacgcccagctgcacagcttgacccttagacggaaggcaactgagcctcctccatcccaggaaggggaacctccagctgagcccagcatctacgccactctggccatccactagcccggggggtacgcagaccccacactcagcagaaggagactcaggactgctgaaggcacgggagctgcccccagtggacaccagtgaaccccagtcagcctggacccctaacacagaccatgaggagacgctgggaacttgtgggactcacctgactcaaagatg

SEQ ID NO: 297165 - DNA, 1899 bp, Artificial Sequence
  derived and/or modified sequence
atgacccccgccctgaccgccctgctgtgcctgggcctgagcctggggccccgcactcgggtgcaggccgggcccttccctaagcccacattatgggcagaacctggaagtgtgatttcatgggggagcccagttacaatctggtgccagggatcccaggaagcgcaggagtacagattacacaaagagggttcaccggagccgttggacaggaataaccccctcgagcctaagaataaagcacggtttagcatcccatctatgaccgagcatcacgcaggacggtatcggtgtcactattacagctcagctggctggagtgagccttctgaccccctggagatggtcatgaccggcgcctattctaaaccgacgctgtccgccttgccaagcccggtggtcgcttctggaggcaacatgacgttgaggtgcggctcccagaagggctaccatcactttgtcctgatgaaagagggggaacaccagctgccaagaacacttgattcccagcagctgcattcacggggtttccaggccctcttcccagtcggccctgtgacaccttctcacaggtggaggtttacatgctattactactatactaacactccttgggtctggtctcaccccagcgacccgctcgaaattctgccatctggggtgtcacgtaaacctagcttgcttacactgcagggcccggtcctcgctccaggccaaagtctgaccttacagtgtggatcagatgtaggatacaacagattcgtgctatataaagagggggaacgagactttctgcagcgtccaggacaacagccacaagccggcctgtctcaggcaaacttcacactgggccccgtgagcccatcaaacgggggtcagtaccgctgctatggggcccataatctaagtagtgagtggtctgctccgtccgacccactgaacattcttatggctgggcagatctacgacaccgtgagcctgagtgctcagcccggacctacagtggcttccggtgaaaatgtcacgttactctgtcagtcatggtggcaatttgacaccttcttgttaacgaaggaaggcgcagctcatccgcccctgaggctgcgaagtatgtacggcgcacacaagtaccaggcagaattcccaatgtcccctgtaacaagcgcgcatgccggcacgtatcgctgctacggatcatattcgagtaatccccatcttctgtcacacccgagtgaaccgttggaattggtggtatccgggcactctggaggctctagtcttcctccgacaggaccgcctagcactcctggactcggccgatatcttgaggttttaattggggtgagcgtcgcctttgtgctcctgctctttctgttattgttcttgctactgcggaggcagcgccacagtaaacatcggacctctgaccaacgtaaaactgattttcagcgccccgccggcgccgctgagactgagccaaaagataggggactcctgcgaaggtcatcaccagcagctgacgtccaggaggagaacctctatgctgcagtgaaagacacccaatccgaagacagggtagagctggactcgcaacagagcccccacgatgaggacccacaggcagtcacttatgcccctgtgaaacattctagtccacggcgggaaatggcctcgccccccagtagtctgagcggggaatttctggacacgaaagacagacaggtggaggaggatcgacagatggacacagaagctgccgcatccgaggcctcccaggatgtgacctatgcacaactgcacagcctcacgttgcgacgaaaagccactgagcctccaccctcacaggaaggagaaccacccgccgagccatccatctatgctaccctcgcaattcactag

SEQ ID NO: 297166 - DNA, 1899 bp, Artificial Sequence
  derived and/or modified sequence
atgacacccgcactgacggcccttctgtgcctgggtctgtctctggggccaaggactagagtacaagcaggtccatttccaaagcccaccctgtgggccgagccaggctctgtgataagttggggttctcccgtaactatatggtgccagggctcacaggaggctcaggaatacaggctgcacaaggaaggtagtcctgagcctctggaccgcaataaccctctggagccgaagaacaaagcacgcttttctatccccagcatgactgaacaccacgcaggcaggtaccggtgtcactattattcgtctgctgggtggtccgaaccctccgacccacttgagatggtgatgactggtgcttacagtaaacctacactcagcgctctcccctcacctgtcgtcgcttcgggagggaacatgacgctgaggtgtggttctcagaaagggtaccatcactttgtcctgatgaaggaaggggagcatcagttacccaggactcttgactctcagcagctccatagcaggggctttcaagctctgttccctgtgggtcccgtgacgcccagtcatcggtggaggttcacttgctactattactacaccaacacgccctgggtttggagtcatccttctgatccacttgaaattctgccctcaggagtgtctagaaagccaagtctgttaaccctgcaggggccagtgctggcccctgggcagtccctgactctgcaatgcggatcggacgtgggatacaacaggtttgtgctgtacaaagaaggggagagggactttctgcagaggcctgggcagcagcctcaagccggtctctctcaggcaaattttacactcggtccagtcagcccctcgaatggcggacagtatcggtgttatggcgctcacaatttatcctccgagtggtccgctccttcagatcctctgaatattttaatggctgggcagatctacgacaccgtttccctcagcgcccagccagggcctactgtggcaagtggtgagaatgtcaccttgctctgtcagtcttggtggcagtttgatacgtttcttcttactaaagagggcgctgcccaccctccactgagactcaggtcgatgtatggcgcacataaatatcaggcggaatttccaatgtcccccgttacatccgcccacgcaggcacctaccgatgttacggatcgtacagctctaacccacatctgctgtctcatccctctgagccactggaacttgttgtgtctggccatagcggtggatctagcctccctcccaccgggcctccctcaactcccggtctgggcaggtacttggaagtgttaataggtgtgtcagtggcatttgtgctgcttctgttcctgctcttatttctactgctaagacgacagagacattccaaacatcgaacctctgatcagcgtaagactgacttccagaggccagccggagcagcggagactgagcctaaggatagaggactcctgcgacgctcaagccccgctgccgacgtgcaagaagaaaacctttacgccgcagtgaaggatacacagagtgaggatagggtggaacttgatagccaacagtcccctcacgatgaagaccctcaagcagttacttacgcccctgtaaagcattctagtcccaggagagagatggcctccccgccatcatctttgtcaggtgaatttctagacaccaaggaccggcaggtcgaggaggacagacagatggacaccgaggctgccgctagtgaggccagtcaagatgtcacctacgcacaacttcactctctcacccttaggcggaaggcgaccgaacctccgcctagccaggaaggcgagccaccagccgagcccagcatttatgcaaccttggcaatacattag

SEQ ID NO: 297167 - DNA, 1899 bp, Artificial Sequence
  derived and/or modified sequence
atgacccccgccctgaccgccctgctgtgcctgggcctgagcctgggccccagaaccagagtgcaggccggccccttccccaagcccaccctgtgggccgagcccggcagcgtgatcagctggggcagccccgtgaccatctggtgccagggcagccaggaggcccaggagtacagactgcacaaggagggcagccccgagcccctggacagaaacaaccccctggagcccaagaacaaggccagattcagcatccccagcatgaccgagcaccacgccggcagatacagatgccactactacagcagcgccggctggagcgagcccagcgaccccctggagatggtgatgaccggcgcctacagcaagcccaccctgagcgccctgcccagccccgtggtggccagcggcggcaacatgaccctgagatgcggcagccagaagggctaccaccacttcgtgctgatgaaggagggcgagcaccagctgcccagaaccctggacagccagcagctgcacagcagaggcttccaggccctgttccccgtgggccccgtgacccccagccacagatggagattcacctgctactactactacaccaacaccccctgggtgtggagccaccccagcgaccccctggagatcctgcccagcggcgtgagcagaaagcccagcctgctgaccctgcagggccccgtgctggcccccggccagagcctgaccctgcagtgcggcagcgacgtgggctacaacagattcgtgctgtacaaggagggcgagagagacttcctgcagagacccggccagcagccccaggccggcctgagccaggccaacttcaccctgggccccgtgagccccagcaacggcggccagtacagatgctacggcgcccacaacctgagcagcgagtggagcgcccccagcgaccccctgaacatcctgatggccggccagatctacgacaccgtgagcctgagcgcccagcccggccccaccgtggccagcggcgagaacgtgaccctgctgtgccagagctggtggcagttcgacaccttcctgctgaccaaggagggcgccgcccacccccccctgagactgagaagcatgtacggcgcccacaagtaccaggccgagttccccatgagccccgtgaccagcgcccacgccggcacctacagatgctacggcagctacagcagcaacccccacctgctgagccaccccagcgagcccctggagctggtggtgagcggccacagcggcggcagcagcctgccccccaccggcccccccagcacccccggcctgggcagatacctggaggtgctgatcggcgtgagcgtggccttcgtgctgctgctgttcctgctgctgttcctgctgctgagaagacagagacacagcaagcacagaaccagcgaccagagaaagaccgacttccagagacccgccggcgccgccgagaccgagcccaaggacagaggcctgctgagaagaagcagccccgccgccgacgtgcaggaggagaacctgtacgccgccgtgaaggacacccagagcgaggacagagtggagctggacagccagcagagcccccacgacgaggacccccaggccgtgacctacgcccccgtgaagcacagcagccccagaagagagatggccagcccccccagcagcctgagcggcgagttcctggacaccaaggacagacaggtggaggaggacagacagatggacaccgaggccgccgccagcgaggccagccaggacgtgacctacgcccagctgcacagcctgaccctgagaagaaaggccaccgagcccccccccagccaggagggcgagccccccgccgagcccagcatctacgccaccctggccatccactag

SEQ ID NO: 297168 - protein, 631 aa, Artificial Sequence
  derived and/or modified sequence
MTPALTALLCLGLSLGPRTRVQAGPFPKPTLWAEPGSVISWGSPVTIWCQGSLEAQEYQLDKEGSPEPLDRNNPLEPKNKARFSIPSMTQHHAGRYRCHYYSSAGWSEPSDPLELVMTGFYNKPTLSALPSPVVASGGNMTLRCGSQKGYHHFVLMKEGEHQLPRTLDSQQLHSGGFQALFPVGPVTPSHRWRFTCYYYYTNTPRVWSHPSDPLEILPSGVSRKPSLLTLQGPVLAPGQSLTLQCGSDVGYDRFVLYKEGERDFLQRPGQQPQAGLSQANFTLGPVSPSHGGQYRCYGAHNLSSEWSAPSDPLNILMAGQIYDTVSLSAQPGPTVASGENVTLLCQSWWQFDTFLLTKEGAAHPPLRLRSMYGAHKYQAEFPMSPVTSAHAGTYRCYGSYSSNPHLLSHPSEPLELVVSGHSGGSSLPPTGPPSTPGLGRYLEVLIGVSVAFVLLLFLLLFLLLRRQRHSKHRTSDQRKTDFQRPAGAAETEPKDRGLLRRSSPAADVQEENLYAAVKDTQSEDRVELDSQSPHDEDPQAVTYAPVKHSSPRREMASPPSSLSGEFLDTKDRQVEEDRQMDTEAAASEASQDVTYAQLHSLTLRRKATEPPPSQEGEPPAEPSIYATLAIH

SEQ ID NO: 297169 - protein, 631 aa, Artificial Sequence
  derived and/or modified sequence
MTPALTALLCLGLSLGPRTRVQAGPFPKPTLWAEPGSVISWGSPVTIWCQGSQEAQEYRLHKEGSPEPLDRNNPLEPKNKARFSIPSMTEHHAGRYRCHYYSSAGWSEPSDPLEMVMTGAYSKPTLSALPSPVVASGGNMTLRCGSQKGYHHFVLMKEGEHQLPRTLDSQQLHSRGFQALFPVGPVTPSHRWRFTCYYYYTNTPWVWSHPSDPLEILPSGVSRKPSLLTLQGPVLAPGQSLTLQCGSDVGYNRFVLYKEGERDFLQRPGQQPQAGLSQANFTLGPVSPSNGGQYRCYGAHNLSSEWSAPSDPLNILMAGQIYDTVSLSAQPGPTVASGENVTLLCQSWWQFDTFLLTKEGAAHPPLRLRSMYGAHKYQAEFPMSPVTSAHAGTYRCYGSYSSNPHLLSHPSEPLELVVSGHSGGSSLPPTGPPSTPGLGRYLEVLIGVSVAFVLLLFLLLFLLLRRQRHSKHRTSDQRKTDFQRPAGAAETEPKDRGLLRRSSPAADVQEENLYAAVKDTQSEDRVELDSQSPHDEDPQAVTYAPVKHSSPRREMASPPSSLSGEFLDTKDRQVEEDRQMDTEAAASEASQDVTYAQLHSLTLRRKATEPPPSQEGEPPAEPSIYATLAIH

SEQ ID NO: 297170 - DNA, 1896 bp, Artificial Sequence
  derived and/or modified sequence
atgacccccgccctgaccgccctgctgtgcctgggcctgagcctgggccccagaaccagagtgcaggccggccccttccccaagcccaccctgtgggccgagcccggcagcgtgatcagctggggcagccccgtgaccatctggtgccagggcagcctggaggcccaggagtaccagctggacaaggagggcagccccgagcccctggacagaaacaaccccctggagcccaagaacaaggccagattcagcatccccagcatgacccagcaccacgccggcagatacagatgccactactacagcagcgccggctggagcgagcccagcgaccccctggagctggtgatgaccggcttctacaacaagcccaccctgagcgccctgcccagccccgtggtggccagcggcggcaacatgaccctgagatgcggcagccagaagggctaccaccacttcgtgctgatgaaggagggcgagcaccagctgcccagaaccctggacagccagcagctgcacagcggcggcttccaggccctgttccccgtgggccccgtgacccccagccacagatggagattcacctgctactactactacaccaacacccccagagtgtggagccaccccagcgaccccctggagatcctgcccagcggcgtgagcagaaagcccagcctgctgaccctgcagggccccgtgctggcccccggccagagcctgaccctgcagtgcggcagcgacgtgggctacgacagattcgtgctgtacaaggagggcgagagagacttcctgcagagacccggccagcagccccaggccggcctgagccaggccaacttcaccctgggccccgtgagccccagccacggcggccagtacagatgctacggcgcccacaacctgagcagcgagtggagcgcccccagcgaccccctgaacatcctgatggccggccagatctacgacaccgtgagcctgagcgcccagcccggccccaccgtggccagcggcgagaacgtgaccctgctgtgccagagctggtggcagttcgacaccttcctgctgaccaaggagggcgccgcccacccccccctgagactgagaagcatgtacggcgcccacaagtaccaggccgagttccccatgagccccgtgaccagcgcccacgccggcacctacagatgctacggcagctacagcagcaacccccacctgctgagccaccccagcgagcccctggagctggtggtgagcggccacagcggcggcagcagcctgccccccaccggcccccccagcacccccggcctgggcagatacctggaggtgctgatcggcgtgagcgtggccttcgtgctgctgctgttcctgctgctgttcctgctgctgagaagacagagacacagcaagcacagaaccagcgaccagagaaagaccgacttccagagacccgccggcgccgccgagaccgagcccaaggacagaggcctgctgagaagaagcagccccgccgccgacgtgcaggaggagaacctgtacgccgccgtgaaggacacccagagcgaggacagagtggagctggacagccagagcccccacgacgaggacccccaggccgtgacctacgcccccgtgaagcacagcagccccagaagagagatggccagcccccccagcagcctgagcggcgagttcctggacaccaaggacagacaggtggaggaggacagacagatggacaccgaggccgccgccagcgaggccagccaggacgtgacctacgcccagctgcacagcctgaccctgagaagaaaggccaccgagcccccccccagccaggagggcgagccccccgccgagcccagcatctacgccaccctggccatccactag

SEQ ID NO: 297171 - DNA, 1896 bp, Artificial Sequence
  derived and/or modified sequence
atgacccctgctctcactgctctgctatgcctaggccttagcctgggcccgcggacacgcgtgcaggctggcccttttcctaaacctacgctctgggccgagcccggctccgtaataagctggggctcaccagtgacaatttggtgccagggatcgctggaggcccaagagtatcagctggataaagaggggagcccagagccactggacagaaacaacccactggaacctaaaaacaaggctcgattcagcatcccgtctatgacacagcaccatgcaggacggtacagatgtcattattacagcagcgccggatggtctgagcctagcgacccgctggaactcgtgatgactggcttctataacaagccgactctttccgcccttccttctccggtcgtggcttcgggcggaaacatgaccctgcgttgcggctctcaaaagggataccatcacttcgttctgatgaaggaaggagagcaccaactcccaagaacattggacagccagcaactgcattccggcggcttccaagctttgttccccgtgggacccgtgacgccctctcatcgttggcgctttacctgttactattattacacaaataccccgagagtgtggagtcacccaagcgacccacttgagattctaccctctggggtctcgcggaaaccgagtctcctgaccctgcagggacctgtactcgctcctggacaatccctcacactacaatgtggttctgacgtcgggtacgatagattcgttttgtataaggagggggaacgcgattttctccagaggcccggtcagcagccgcaggcaggcctgtcacaggcaaacttcacgcttggacctgtgtctccttcgcatggcgggcagtaccgatgctatggagcacacaatctttcttctgagtggtccgctccgagtgatcctctcaatattttaatggctggacagatctacgataccgtgtccttgagcgcacagcctgggcccacggttgcctcaggagaaaacgtgacgctcttgtgtcagagttggtggcaatttgacacatttctactcacaaaagagggcgcagcacacccaccgcttcggctgcgcagcatgtacggagcccataagtatcaggccgagtttcccatgtcacctgttacctcagctcacgccggcacttatcgatgctacggaagctattccagcaacccccatctgttatcccacccgagcgagcctttggagctagttgtgagcggccattccggagggagcagcttgccccctactggaccgccctcaacccccggccttggccggtatttggaggtcctgatcggcgtgtccgtggcctttgttctccttctgtttctgcttctcttcctccttctcagaagacaaagacactccaaacaccgcacttccgaccagcgtaaaactgactttcagcgccctgctggggccgcggagactgagcccaaagatcgtggtttgctgagacgtagttcgcccgctgctgacgtgcaggaggagaacctgtacgccgcagtgaaggatacgcaatccgaggacagggtggagctggattctcaatcaccgcatgatgaggacccccaggctgtcacctacgcgccggtgaagcactcctccccccggagggagatggcttctcctccgtcctctctgtctggcgagttcttagatactaaagacaggcaggtggaggaggatagacagatggatacagaagctgccgcttcagaagcctcacaggatgtcacctacgctcagctccattctttaacattgcggcggaaggccacggagcccccccccagccaggagggtgagccccccgccgaaccgtctatctatgccactctggcaattcactag

SEQ ID NO: 297172 - DNA, 1896 bp, Artificial Sequence
  derived and/or modified sequence
atgaccccagccctgacagccctgctgtgcctgggcctgagcctgggccccaggaccagggtgcaggccggccccttccccaagcccaccctgtgggccgagcccggcagcgtcatctcctggggcagccctgtgaccatctggtgccagggcagcctggaggcccaggagtaccagctggacaaggagggcagccctgagcccctggacaggaacaaccccctggagcccaagaacaaggcccgcttcagcatccccagcatgacccagcaccacgccggccgctaccgctgccactactacagcagcgctggctggagcgagcccagcgaccccctggagctggtgatgacaggcttctacaacaagcccaccctgagcgccctgcccagccctgtggtggccagcggcggcaacatgaccctgcgctgtggcagccagaagggctaccaccactttgtgctgatgaaggagggggagcaccagctgcccaggaccctggacagccagcagctgcacagcggcggcttccaggccctcttccctgtgggccctgtgacccccagccaccgctggaggttcacctgctactactactacaccaacaccccccgggtgtggagccaccccagcgaccccctggagatcctgcccagcggcgtgtccaggaagcccagcctgctgaccctgcagggccctgtgctggcccctggccagagcctgaccctgcagtgtggcagtgatgtgggctatgacagatttgtgctgtacaaggagggggagcgggacttcctgcagaggcctggccagcagccccaggccggcctgagccaggccaacttcaccctgggccctgtgagccccagccacggcggccagtaccgctgctatggagcccacaacctgagcagcgagtggagcgcccccagcgaccccctgaacatcctgatggccggccagatctatgacacagtgtccctgagcgcccagcccggccccaccgtggccagcggagaaaatgtgaccctgctgtgccagagctggtggcagtttgacaccttcctgctgaccaaggagggcgccgcccacccccccctgcggctgcgctccatgtacggggcccacaagtaccaggccgagttccccatgagccctgtgaccagcgcccatgctggcacctaccgctgctacggcagctacagcagcaacccccacctgctgagccaccccagcgagcccctggagctggtggtgtctggccacagcggcggcagcagcctgccccccaccggcccccccagcaccccaggcctgggccgctacctggaggtgctgattggagtgtctgtggcctttgtgctgctgctcttcctgctgctcttcctgctgctgcggcggcagaggcacagcaagcacaggaccagtgaccagaggaagacagacttccagaggcctgctggagctgctgagacagagcccaaggaccggggcctgctgcggcgcagcagccctgctgctgatgtgcaggaggagaacctgtatgctgctgtgaaggacacccagagtgaagatagagtggagctggacagccagagcccccatgatgaggacccccaggccgtgacctacgcccctgtgaagcacagcagcccccggcgggagatggccagcccccccagcagcctgtctggagagttcctggacaccaaggaccggcaggtggaggaggaccggcagatggacacagaggccgccgccagcgaggccagccaggatgtgacctacgcccagctgcacagcctgaccctgcggaggaaggccacagagcccccacccagccaggagggggagcccccagctgagcccagcatctatgccaccctggccatccactag

SEQ ID NO: 297173 - DNA, 1924 bp, Artificial Sequence
  derived and/or modified sequence
ccatgacgcccgccctcacagccctgctctgccttgggctgagtctgggccccaggacccgcgtgcaggcagggcccttccccaaacccaccctctgggctgagccaggctctgtgatcagctgggggagccccgtgaccatctggtgtcaggggagcctggaggcccaggagtaccaactggataaagagggaagcccagagcccttggacagaaataacccactggaacccaagaacaaggccagattctccatcccatccatgacacagcaccatgcagggagataccgctgccactattacagctctgcaggctggtcagagcccagcgaccccctggagctggtgatgacaggattctacaacaaacccaccctctcagccctgcccagccctgtggtggcctcaggggggaatatgaccctccgatgtggctcacagaagggatatcaccattttgttctgatgaaggaaggagaacaccagctcccccggaccctggactcacagcagctccacagtggggggttccaggccctgttccctgtgggccccgtgacccccagccacaggcgtgtctaggaagccctccctcctgaccctgcagggccctgtcctggcccctgggcagagcctgaccctccagtgtggctctgatgtcggctacgacagatttgttctgtataaggagggggaacgtgacttcctccagcgccctggccagcagccccaggctgggctctcccaggccaacttcaccctgggccctgtgagcccctcccacgggggccagtacaggtgctatggtgcacacaacctctcctccgagtggtcggcccccagcgaccccctgaacatcctgatggcaggacagatctatgacaccgtctccctgtcagcacagccgggccccacagtggcctcaggagagaacgtgaccctgctgtgtcagtcacggggttattttgacactttccttctgaccaaagaaggggcagcccatcccccactgcgtctgagatcaatgtacggagctcataagtaccaggctgaattccccatgagtcctgtgacctcagcccacgcggggacctacaggtgctacggctcatacagctccaacccccacctgctgtctttccccagtgagcccctggaactcatggtctcaggacactctggaggctccagcctcccacccacagggccgccctccacacctggtctgggaagatacctggaggttttgattggggtctcggtggccttcgtcctgctgctcttcctcctcctcttcctcctcctccgacgtcagcgtcacagcaaacacaggacatctgaccagagaaagactgatttccagcgtcctgcaggggctgcggagacagagcccaaggacaggggcctgctgaggaggtccagcccagctgctgacgtccaggaagaaaacctctagcccacacgatgaagacccccaggcagtgacgtatgccccggtgaaacactccagtcctaggagagaaatggcctctcctccctcctcactgtctggggaattcctggacacaaaggacagacaggtggaagaggacaggcagatggacactgaggctgctgcatctgaagcctcccaggatgtgacctacgcccagctgcacagcttgacccttagacggaaggcaactgagcctcctccatcccaggaaggggaacctccagctgagcccagcatctacgccactctggccatccactagcccggggggtacgcagaccccacactcagcagaaggagactcaggactgctgaaggcacgggagctgcccccagtggacaccagtgaaccccagtcagcctggacccctaacacagaccatgaggagacgctgggaacttgtgggactcacctgactcaaagatg

SEQ ID NO: 297174 - DNA, 2170 bp, Artificial Sequence
  derived and/or modified sequence
ctgagggctcatccctctgcagagcgcggggtcaccggaaggagacgccatgacgcccgccctcacagccctgctctgccttgggctgagtctgggccccaggacccgcgtgcaggcagggcccttccccaaacccaccctctgggctgagccaggctctgtgatcagctgggggagccccgtgaccatctggtgtcaggggagcctggaggcccaggagtaccaactggataaagagggaagcccagagcccttggacagaaataacccactggaacccaagaacaaggccagattctccatcccatccatgacacagcaccatgcagggagataccgctgccactattacagctctgcaggctggtcagagcccagcgaccccctggagctggtgatgacaggattctacaacaaacccaccctctcagccctgcccagccctgtggtggcctcaggggggaatatgaccctccgatgtggctcacagaagggatatcaccattttgttctgatgaaggaaggagaacaccagctcccccggaccctggactcacagcagctccacagtggggggttccaggccctgttccctgtgggccccgtgacccccagccacaggtggaggttcacatgctattactattatacaaacaccccccgggtgtggtcccaccccagtgaccccctggagattctgccctcaggcgtgtctaggaagccctccctcctgaccctgcagggccctgtcctggcccctgggcagagcctgaccctccagtgtggctctgatgtcggctacgacagatttgttctgtataaggagggggaacgtgacttcctccagcgccctggccagcagccccaggctgggctctcccaggccaacttcaccctgggccctgtgagcccctcccacgggggccagtacaggtgctatggtgcacacaacctctcctccgagtggtcggcccccagcgaccccctgaacatcctgatggcaggacagatctatgacaccgtctccctgtcagcacagccgggccccacagtggcctcaggagagaacgtgaccctgctgtgtcagtcatggtggcagtttgacactttccttctgaccaaagaaggggcagcccatcccccactgcgtctgagatcaatgtacggagctcataagtaccaggctgaattccccatgagtcctgtgacctcagcccacgcggggacctacaggtgctacggctcatacagctccaacccccacctgctgtctcaccccagtgagcccctggagctcgtggtctcaggacactctggaggctccagcctcccacccacagggccgccctccacacctggtctgggaagatacctggaggttttgattggggtctcggtggccttcgtcctgctgctcttcctcctcctcttcctcctcctccgacgtcagcgtcacagcaaacacaggacatctgaccagagaaagactgatttccagcgtcctgcaggggctgcggagacagagcccaaggacaggggcctgctgaggaggtccagcccagctgctgacgtccaggaagaaaacctctatgctgccgtgaaggacacacagtctgaggacagggtggagctggacagtcagagcccacacgatgaagacccccaggcagtgacgtatgccccggtgaaacactccagtcctaggagagaaatggcctctcctccctcctcactgtctggggaattcctggacacaaaggacagacaggtggaagaggacaggcagatggacactgaggctgctgcatctgaagcctcccaggatgtgacctacgcccagctgcacagcttgacccttagacggaaggcaactgagcctcctccatcccaggaaggggaacctccagctgagcccagcatctacgccactctggccatccactagcccggggggtacgcagaccccacactcagcagaaggagactcaggactgctgaaggcacgggagctgcccccagtggacaccagtgaaccccagtcagcctggacccctaacacagaccatgaggagacgctgggaacttgtgggactcacctgactcaaagatgactaatatcgtcccattttggaaataaagcaacagacttctcaacaatcaatgagttaat

SEQ ID NO: 297175 - DNA, 1896 bp, Artificial Sequence
  derived and/or modified sequence
atgacccccgccctgaccgccctgctgtgcctgggcctgagcctgggaccccgaaccagggtgcaggcaggccccttccccaaacccacactttgggccgagccaggctcagtcatctcttggggtagcccagtaacaatctggtgtcagggctccctggaggcacaggagtaccagttggacaaggagggctccccggagcctctcgataggaataacccactggagcccaagaataaggcaagattcagtatcccttctatgacccagcaccacgcgggacgctaccgctgtcactactactcatccgcaggttggagcgaacctagcgacccgctggaactcgtcatgactgggttctataacaaacctacactgtctgccttaccttctcctgttgttgcatcaggaggcaatatgaccctgaggtgcggctcccagaaagggtaccatcactttgtgctcatgaaagagggggaacaccagctgcccaggacgcttgattcccaacagcttcatagcggcggattccaggcactttttcctgttggccccgtcacccccagccataggtggaggtttacgtgctactactattacactaatacgccgcgcgtctggtctcacccctctgaccctctggaaatccttccaagtggcgtgagccgcaagccaagtctcttgacactccaagggcccgtgcttgctcctggccagtcacttacattgcagtgtggcagcgatgtggggtatgatagattcgtcctctataaggaaggtgaaagagacttcctgcaacgcccagggcaacagcctcaggccggattaagccaggccaactttacattgggccctgtgtcaccatcgcacggcgggcagtatcggtgttatggcgcccataaccttagttcagagtggagtgccccctctgacccacttaatatcctcatggctggacaaatctacgacactgtgtccctctctgcccagcccgggccgaccgtcgcttctggcgaaaatgttacactgctctgtcagtcgtggtggcagtttgatacgtttctgctgactaaagagggtgcagctcaccccccgcttagacttcggtctatgtatggcgcccacaagtaccaagctgaatttcctatgtcacctgtgacctcagcccatgctgggacctatcggtgctatggatcgtacagcagcaatccgcatctgctttcccacccaagtgagcccctggagttggtcgtgtccggacactcaggcggcagtagcctgccaccaaccggcccaccctccacccctggattggggcggtacctggaggtgcttatcggggtgtccgtcgcatttgttctcttgcttttcttgctcctgttcctgttactgcggcggcagcggcactctaaacataggacttcagatcagagaaaaactgacttccagaggcctgccggagctgctgaaacggaaccaaaagaccgggggctgctccgtagatcaagccccgctgctgacgtacaagaagaaaatttatacgctgccgtgaaggacacccaatctgaagaccgcgttgaattggattcccagtctccacacgatgaggaccctcaggctgtgacatacgcacctgtgaaacatagtagtccacgtcgggaaatggcgagtccaccctctagcctcagcggtgaatttctggacacaaaagaccgacaggtggaggaagatagacagatggatacagaagcagcagcatccgaggcttctcaggacgtcacttacgcgcagctgcatagcttgaccctgcgccggaaagcaacagaacctccccccagccaagagggcgagccccccgccgagccatcgatttatgctacgctggcaatccattag

SEQ ID NO: 297176 - DNA, 1896 bp, Artificial Sequence
  derived and/or modified sequence
atgacgcctgcacttacggccctgctgtgcctgggcttaagcctgggtcccagaacgcgggtacaagccggaccctttcctaaacccactctgtgggcggaacccggatctgttatatcgtggggatcacctgtgacaatctggtgtcaaggctccctagaggctcaggagtaccagctggacaaagagggctcgcccgagccactcgatcggaataatcctttggaacccaagaacaaggctcgtttctccatcccctctatgactcagcatcacgccggacgctaccgatgccactactacagttccgctggatggagcgagccctcagaccccctggagttggtcatgaccggtttctacaataagccaactttgtccgccctgccttcaccagtggtcgcatcagggggaaacatgacgttacggtgcgggagtcaaaagggatatcaccattttgtccttatgaaggagggcgagcaccagctgcccaggaccctggactcccagcagcttcattcgggtggctttcaggccctctttcccgtgggtccggtgacaccctcccacagatggaggttcacctgctattactactataccaatactcctagagtgtggtcgcacccatccgaccctctcgagattctgcccagtggcgtgtccaggaagccctccctgctgacattgcaggggccagtcctcgcaccaggccagagtctgaccctccagtgtggctcagacgtcggctacgataggtttgtcctttataaggaaggtgagcgagacttcctgcaaaggccaggccaacagccacaggctggcctgtcccaagcaaacttcaccctgggccctgtgtccccctcccacgggggacagtatcgctgctacggagcccataatctgagtagcgagtggagcgccccttctgaccccttgaatatcctcatggctgggcagatctatgatactgtctcactttctgcacagccgggaccaactgtggcatccggtgagaacgtgactctcttatgccaatcttggtggcagttcgataccttcttactgacaaaggagggcgctgcccacccccctttgcgccttcggagtatgtacggggcacataagtaccaggccgaattcccaatgtcccctgtcacatccgcacatgctggcacttatagatgctatggtagttattcctccaacccccacctgctctcacaccctagcgagccgcttgaactcgtggtgtctgggcactcaggcggttcttctttgccgcctacgggccctccgagtacacccggactggggaggtatctcgaggtgctcatcggcgtctctgtggccttcgttttactcttgttccttttgctatttttgctattgcgacgacagagacactcaaagcacagaactagcgatcaacggaagacagacttccagagacccgcaggagccgctgaaacagaacccaaggaccggggactcctgcgcagatctagccctgccgcagatgtacaagaggaaaatctctatgctgcggtgaaggacacccagtcggaggatagggttgaattagactcgcagtccccacacgacgaagacccacaagccgtgacatatgcacccgtcaagcacagttctccgagacgggaaatggctagccctccttcatctctcagtggtgagttcctggatacaaaggatagacaggtggaggaagatcgtcagatggacactgaagccgctgcttcagaggcatcccaggacgtgacctacgctcaactacactcattgactctgagaaggaaggctactgagccaccccctagccaggaaggggagcccccagctgaaccgagtatctatgcgacactcgccatccattag

SEQ ID NO: 297177 - DNA, 1932 bp, Artificial Sequence
  derived and/or modified sequence
atgacccctgccctcactgcactgttatgtttgggcctgtctctcggacctcgcacgcgcgtgcaggctggaccttttccaaaacccaccttgtgggccgaacccggatccgtgattagctggggctctcctgttactatatggtgccaggggtctcaggaggctcaggaatacaggttgcacaaggaaggcagccccgagcctctggaccgtaacaaccctctagagcccaaaaacaaggccaggttttccatccccagcatgactgaacaccacgcggggaggtaccggtgccactactattccagtgctggctggagcgaaccatccgatcctctcgagatggtcatgacgggtgcatattccaagccgacactgtccgccctgcctagccccgtcgtagcatccgggggtaacatgaccctgagatgcggcagccagaagggctaccaccactttgttctcatgaaggagggcgagcaccaacttccccgcactctggatagccagcaactgcacagcagaggatttcaggccctgttccccgttggcccagtgaccccaagccacagatggcgcttcacgtgctattactactacactaataccccttgggtgtggtctcatccttccgaccctttagaaatactgccttcaggggtttcccgaaaacctagcctgcttaccctgcaaggccctgtgttagcaccaggacagagcctaacccttcagtgcggcagtgatgtgggatacaaccgcttcgtgctctacaaggaaggtgagcgagactttctccagcggccagggcaacagcctcaagccggcctgtcccaagcaaattttacactgggtccagtcagcccctcaaatggcggccagtaccgctgttacggcgcccacaacctgtcgtccgagtggtcagcccctagcgatcccctgaacatcttgatggcaggtcagatttatgataccgtgtctctgtctgcccagccaggacctactgtagcatcaggggagaatgtgacgctactgtgtcagagctggtggcagtttgacaccttcctcttgaccaaggaaggcgctgcacacccacctttgaggcttcgcagtatgtacggcgcacacaagtatcaagctgagttcccaatgtctcccgtgacttccgcccacgccggcacgtacaggtgttacggtagctacagcagcaatccacacttactgagccatccctccgagccgcttgagctcgtagtctccggtccagaggaccaacccctcaaccctccgggatcaggccctcagaatccacccgggctggggagtggtgccggcactagagccgcaggtcttggtcgctacctggaggtgctaatcggagtatctgtggctttcgtcctcctcctgtttctgttgttgttcttgcttctcaggagacagcggcactctaaacatagaacttccgaccaacggaagacagatttccagagacctgcaggagccgccgagactgagccgaaggacaggggattgctgcgcagaagcagtccagccgcagacgtccaggaagagaatttgtatgcagcagtcaaagatactcagtcggaagacagagtagagttggattcacagagtcctcatgacgaagacccacaggctgttacctacgccccagtcaagcattcatcaccccggcgcgagatggcctctcctccatcaagccttagcggggagttcctggatactaaggatcggcaagtggaagaagatagacagatggacacggaggcagccgcgtctgaggcctcccaagatgtaacgtatgcccagcttcactcactgacgctgcgcaggaaggccaccgagccgcccccctcacaggaaggtgagcctcctgccgagccgtcaatatacgccacactcgccatccattag

SEQ ID NO: 297178 - DNA, 1896 bp, Artificial Sequence
  derived and/or modified sequence
atgacacccgcactgactgccctgctgtgtttgggtctatctcttggccccaggacccgtgtgcaggccggcccctttcctaaaccaacgttgtgggctgaaccaggctccgtgatcagctggggctctccagtgacaatttggtgccagggaagtcaggaggcccaggaatataggctccataaagaaggctcccccgagccactggaccgtaataatccgcttgagccgaaaaataaggcccggttcagcattccgtccatgaccgagcatcacgctggcagatacagatgccattactattcatccgctggatggtccgaaccttctgatcccctggagatggtcatgaccggggcctatagcaaacctaccctgagcgcccttccgagccccgtcgtagcatcaggtgggaacatgactcttcgatgtggttctcagaaaggttaccaccattttgtcctcatgaaagaaggcgaacatcaacttcctcggacgctggacagccagcagctgcactctcgtggattccaggccctgtttcccgtggggcctgtgacgccatctcacagatggcgctttacatgttactattactacacgaatacaccatgggtatggagccacccctctgatcctctggaaatccttccctctggcgtgtcacgcaaaccgtccttgctcacgctgcagggaccggtgcttgccccgggccagtcattgacgctccagtgcggcagcgacgtggggtacaaccgctttgtcctgtataaagaaggcgagagggatttcctccagcggccaggccagcaaccccaggccggtctctctcaggccaacttcacacttggaccagtcagtccatctaacggaggccaatacagatgctatggagcccacaatctctcctccgaatggagtgcacccagtgatccactcaatatcttaatggcaggccaaatctacgacacagtgagcttaagcgctcagcctgggcccacggtcgcttcaggtgagaacgttactctgttatgccagtcttggtggcaattcgacacctttttactgaccaaggagggggctgcgcatcctccccttagactgaggtcaatgtacggggctcataagtatcaggctgagtttcccatgtctcccgtgacatctgcccacgccggtacttatcgctgctatggatcctactcgtctaatccccacctactgagccacccatccgagccactcgagttggtcgtgagcggtcactccggtggcagtagtctgccacccacaggacctccaagcaccccagggctcggaaggtatctggaagttctgattggcgtttccgtggcctttgtactgcttttgttcttgctactcttcctgctattacgacgccagcggcactctaagcatcggacttccgaccaaaggaaaaccgattttcaacgaccggctggtgcagccgaaaccgagccaaaagataggggattgctgcgtcgctcctccccagctgccgatgttcaagaggagaacttatacgccgccgtgaaggacacgcagtccgaggatcgtgtggagctcgactcacaaagcccccatgatgaagaccctcaggccgtgacctacgcacccgtgaaacacagttcccccaggagggaaatggcatcaccaccgagtagcctgtcaggtgaatttttagacacaaaggatagacaagtggaagaagatcggcaaatggacaccgaggccgctgcatctgaagcttcacaagatgtgacctatgcccagctgcattcactaactcttcggcgcaaagcaacggaaccacccccatcccaggaaggtgagcccccagccgagcccagcatctacgccactctcgcaatccattag

SEQ ID NO: 297179 - DNA, 1896 bp, Artificial Sequence
  derived and/or modified sequence
atgacccccgccctgaccgctttgctctgcttgggcctatctcttggcccacggacccgcgtgcaggccgggccatttccaaagccaacactgtgggctgagcctggcagcgtcatctcgtgggggtctcccgtgacaatttggtgtcaaggatctcaggaggcccaggaatatagactccataaagagggttcacccgagcccctggaccggaataaccccctagagccaaagaacaaggctaggttttctattccttccatgaccgaacatcacgctggcaggtacagatgccattactattcaagtgcaggatggtccgagccctctgatcctctggaaatggtcatgaccggagcctattcaaaacctacattgagtgccttgccttcacccgtggtcgcatcaggtgggaatatgacactacggtgtggcagtcagaagggctaccaccacttcgtccttatgaaggagggcgagcaccaactgcctcgcacgctggattctcagcagctccactctaggggttttcaagcactattcccagtgggcccagtaaccccgtcccatcgctggcgctttacgtgctattactattatacaaatacaccatgggtgtggtcccatccaagcgatccacttgaaatcttgccaagcggtgtgtcccgcaaaccgagtctacttaccctccagggcccagtcctcgcccccggtcagtccctgacactgcagtgtggtagcgatgttggctacaaccggtttgtgctctacaaggagggagagcgtgacttcttgcagaggccagggcagcagccacaggccggactgtcacaggccaacttcaccctgggaccagtgagtccgagtaacggtggccagtataggtgctacggtgcccacaacctgtcaagcgaatggtcagccccatcagaccccttgaacattctcatggccggccaaatatacgataccgtgagcctgagtgctcagcccggacctaccgtggcctccggagaaaacgtcacactgctgtgccaatcttggtggcagtttgatacttttttactgaccaaagagggggctgcccatcctcccttacgtttgcggtccatgtatggagctcataaatatcaggccgagttccctatgagccccgtgacctctgcccatgctgggacctacaggtgctacgggtcctactcctccaacccacacctgctgagtcacccaagtgaaccacttgaattagtagtgagcggacattccggaggaagctcattaccacccacgggaccgccttccacccctggcttgggtcgctacctcgaggtgttaatcggtgtgagtgtcgcttttgtactgctgctcttcttactgttattcctgctgctccgaagacaacggcattccaagcaccgcacctcagatcagcgcaagactgactttcagaggcctgcaggcgctgctgaaacagagcctaaagatcgaggccttctgcgacggtcgagtccagccgccgacgtgcaggaggaaaatctgtacgcagccgttaaagacacacagtcagaggaccgggtggaattggattctcagagcccccacgatgaagacccacaggctgtcacatacgctccagtgaaacactcatcccccagacgggaaatggccagtcctccctcgtcacttagcggagaattcctcgacacaaaggatcgccaggtcgaagaagacaggcagatggacacagaagctgccgcctcagaggcgtcccaggacgttacttacgcccagctccatagtctcaccctccggcggaaggccaccgaaccacccccaagccaggagggggagcctcctgccgagccgtctatctatgctacactggctatacattag

SEQ ID NO: 297180 - DNA, 1932 bp, Artificial Sequence
  derived and/or modified sequence
atgaccccagccctgacagccctgctgtgcctgggcctgagcctgggccccaggaccagggtgcaggccggccccttccccaagcccaccctgtgggccgagcccggcagcgtcatctcctggggcagccctgtgaccatctggtgccagggcagccaggaggcccaggagtaccgcctgcacaaggagggcagccctgagcccctggacaggaacaaccccctggagcccaagaacaaggcccgcttcagcatccccagcatgacagagcaccacgccggccgctaccgctgccactactacagcagcgctggctggagcgagcccagcgaccccctggagatggtgatgaccggggcctacagcaagcccaccctgagcgccctgcccagccctgtggtggccagcggcggcaacatgaccctgcgctgtggcagccagaagggctaccaccactttgtgctgatgaaggagggggagcaccagctgcccaggaccctggacagccagcagctgcacagccggggcttccaggccctcttccctgtgggccctgtgacccccagccaccgctggaggttcacctgctactactactacaccaacaccccctgggtgtggagccaccccagcgaccccctggagatcctgcccagcggcgtgtccaggaagcccagcctgctgaccctgcagggccctgtgctggcccctggccagagcctgaccctgcagtgtggcagtgatgtgggctacaacagatttgtgctgtacaaggagggggagcgggacttcctgcagaggcctggccagcagccccaggccggcctgagccaggccaacttcaccctgggccctgtgagccccagcaatggaggccagtaccgctgctatggagcccacaacctgagcagcgagtggagcgcccccagcgaccccctgaacatcctgatggccggccagatctatgacacagtgtccctgagcgcccagcccggccccaccgtggccagcggagaaaatgtgaccctgctgtgccagagctggtggcagtttgacaccttcctgctgaccaaggagggcgccgcccacccccccctgcggctgcgctccatgtacggggcccacaagtaccaggccgagttccccatgagccctgtgaccagcgcccatgctggcacctaccgctgctacggcagctacagcagcaacccccacctgctgagccaccccagcgagcccctggagctggtggtgtctggccctgaggaccagcccctgaaccccccaggcagcggcccccagaaccccccaggcctgggcagcggggccggcaccagggctgctggcctgggccgctacctggaggtgctgattggagtgtctgtggcctttgtgctgctgctcttcctgctgctcttcctgctgctgcggcggcagaggcacagcaagcacaggaccagtgaccagaggaagacagacttccagaggcctgctggagctgctgagacagagcccaaggaccggggcctgctgcggcgcagcagccctgctgctgatgtgcaggaggagaacctgtatgctgctgtgaaggacacccagagtgaagatagagtggagctggacagccagagcccccatgatgaggacccccaggccgtgacctacgcccctgtgaagcacagcagcccccggcgggagatggccagcccccccagcagcctgtctggagagttcctggacaccaaggaccggcaggtggaggaggaccggcagatggacacagaggccgccgccagcgaggccagccaggatgtgacctacgcccagctgcacagcctgaccctgcggaggaaggccacagagcccccacccagccaggagggggagcccccagctgagcccagcatctatgccaccctggccatccactag

SEQ ID NO: 297181 - DNA, 1896 bp, Artificial Sequence
  derived and/or modified sequence
atgaccccagccctgacagccctgctgtgcctgggcctgagcctgggccccaggaccagggtgcaggccggccccttccccaagcccaccctgtgggccgagcccggcagcgtcatctcctggggcagccctgtgaccatctggtgccagggcagccaggaggcccaggagtaccgcctgcacaaggagggcagccctgagcccctggacaggaacaaccccctggagcccaagaacaaggcccgcttcagcatccccagcatgacagagcaccacgccggccgctaccgctgccactactacagcagcgctggctggagcgagcccagcgaccccctggagatggtgatgaccggggcctacagcaagcccaccctgagcgccctgcccagccctgtggtggccagcggcggcaacatgaccctgcgctgtggcagccagaagggctaccaccactttgtgctgatgaaggagggggagcaccagctgcccaggaccctggacagccagcagctgcacagccggggcttccaggccctcttccctgtgggccctgtgacccccagccaccgctggaggttcacctgctactactactacaccaacaccccctgggtgtggagccaccccagcgaccccctggagatcctgcccagcggcgtgtccaggaagcccagcctgctgaccctgcagggccctgtgctggcccctggccagagcctgaccctgcagtgtggcagtgatgtgggctacaacagatttgtgctgtacaaggagggggagcgggacttcctgcagaggcctggccagcagccccaggccggcctgagccaggccaacttcaccctgggccctgtgagccccagcaatggaggccagtaccgctgctatggagcccacaacctgagcagcgagtggagcgcccccagcgaccccctgaacatcctgatggccggccagatctatgacacagtgtccctgagcgcccagcccggccccaccgtggccagcggagaaaatgtgaccctgctgtgccagagctggtggcagtttgacaccttcctgctgaccaaggagggcgccgcccacccccccctgcggctgcgctccatgtacggggcccacaagtaccaggccgagttccccatgagccctgtgaccagcgcccatgctggcacctaccgctgctacggcagctacagcagcaacccccacctgctgagccaccccagcgagcccctggagctggtggtgtctggccacagcggcggcagcagcctgccccccaccggcccccccagcaccccaggcctgggccgctacctggaggtgctgattggagtgtctgtggcctttgtgctgctgctcttcctgctgctcttcctgctgctgcggcggcagaggcacagcaagcacaggaccagtgaccagaggaagacagacttccagaggcctgctggagctgctgagacagagcccaaggaccggggcctgctgcggcgcagcagccctgctgctgatgtgcaggaggagaacctgtatgctgctgtgaaggacacccagagtgaagatagagtggagctggacagccagagcccccatgatgaggacccccaggccgtgacctacgcccctgtgaagcacagcagcccccggcgggagatggccagcccccccagcagcctgtctggagagttcctggacaccaaggaccggcaggtggaggaggaccggcagatggacacagaggccgccgccagcgaggccagccaggatgtgacctacgcccagctgcacagcctgaccctgcggaggaaggccacagagcccccacccagccaggagggggagcccccagctgagcccagcatctatgccaccctggccatccactag

SEQ ID NO: 297182 - DNA, 2204 bp, Artificial Sequence
  derived and/or modified sequence
ctgtcctgccagcactgagggctcatccctctgcagagcgcggggtcaccgggaggagacgccatgacgcccgccctcacagccctgctctgccttgggctgagtctgggccccaggacccgcgtgcaggcagggcccttccccaaacccaccctctgggctgagccaggctctgtgatcagctgggggagccccgtgaccatctggtgtcaggggagccaggaggcccaggagtaccgactgcataaagagggaagcccagagcccttggacagaaataacccactggaacccaagaacaaggccagattctccatcccatccatgacagagcaccatgcagggagataccgctgccactattacagctctgcaggctggtcagagcccagcgaccccctggagatggtgatgacaggagcctacagcaaacccaccctctcagccctgcccagccctgtggtggcctcaggggggaatatgaccctccgatgtggctcacagaagggatatcaccattttgttctgatgaaggaaggagaacaccagctcccccggaccctggactcacagcagctccacagtcgggggttccaggccctgttccctgtgggccccgtgacccccagccacaggtggaggttcacatgctattactattatacaaacaccccctgggtgtggtcccaccccagtgaccccctggagattctgccctcaggcgtgtctaggaagccctccctcctgaccctgcagggccctgtcctggcccctgggcagagcctgaccctccagtgtggctctgatgtcggctacaacagatttgttctgtataaggagggggaacgtgacttcctccagcgccctggccagcagccccaggctgggctctcccaggccaacttcaccctgggccctgtgagcccctccaatgggggccagtacaggtgctacggtgcacacaacctctcctccgagtggtcggcccccagcgaccccctgaacatcctgatggcaggacagatctatgacaccgtctccctgtcagcacagccgggccccacagtggcctcaggagagaacgtgaccctgctgtgtcagtcatggtggcagtttgacactttccttctgaccaaagaaggggcagcccatcccccactgcgtctgagatcaatgtacggagctcataagtaccaggctgaattccccatgagtcctgtgacctcagcccacgcggggacctacaggtgctacggctcatacagctccaacccccacctgctgtctcaccccagtgagcccctggagctcgtggtctcaggtcctgaggaccagccccttaaccccccagggtcaggccctcagaatcctccgggtctcggctctggtgcaggaacaagggctgcaggtctgggaagatacctggaggttttgattggggtctcggtggccttcgtcctgctgctcttcctcctcctcttcctcctcctccgacgtcagcgtcacagcaaacacaggacatctgaccagagaaagactgatttccagcgtcctgcaggggctgcggagacagagcccaaggacaggggcctgctgaggaggtccagcccagctgctgacgtccaggaagaaaacctctatgctgccgtgaaggacacacagtctgaggacagggtggagctggacagtcagagcccacacgatgaagacccccaggcagtgacgtatgccccggtgaaacactccagtcctaggagagaaatggcctctcctccctcctcactgtctggggaattcctggacacaaaggacagacaggtggaagaggacaggcagatggacactgaggctgctgcatctgaagcctcccaggatgtgacctacgcccagctgcacagcttgacccttagacggaaggcaactgagcctcctccatcccaggaaggggaacctccagctgagcccagcatctacgccactctggccatccactagcccggggggtacgcagaccccacactcagcagaaggagactcaggactgctgaaggcacgggagctgcccccagtggacaccagtgaaccccagtcagcctggacccctaacacagaccatgaggagacgctgggaacttgtgggactcacctgactcaaagatgactaatatcgtcccattttggaaataaagcaacagacttctcaa

SEQ ID NO: 297183 - DNA, 2848 bp, Artificial Sequence
  derived and/or modified sequence
tgcgtctctgctgatctgagtctgcctgcagcatggacctgggtcttccctgaagcatctccagggctggagagacgactgccatgcactgagggctcatccctctgcagagcgcggggtcaccgggaggagacgccatgacgcccgccctcacagccctgctctgccttgggctgagtctgggccccaggacccgcgtgcaggcagggcccttccccaaacccaccctctgggctgagccaggctctgtgatcagctgggggagccccgtgaccatctggtgtcaggggagccaggaggcccaggagtaccgactgcataaagagggaagcccagagcccttggacagaaataacccactggaacccaagaacaaggccagattctccatcccatccatgacagagcaccatgcagggagataccgctgccactattacagctctgcaggctggtcagagcccagcgaccccctggagatggtgatgacaggagcctacagcaaacccaccctctcagccctgcccagccctgtggtggcctcaggggggaatatgaccctccgatgtggctcacagaagggatatcaccattttgttctgatgaaggaaggagaacaccagctcccccggaccctggactcacagcagctccacagtcgggggttccaggccctgttccctgtgggccccgtgacccccagccacaggtggaggttcacatgctattactattatacaaacaccccctgggtgtggtcccaccccagtgaccccctggagattctgccctcaggcgtgtctaggaagccctccctcctgaccctgcagggccctgtcctggcccctgggcagagcctgaccctccagtgtggctctgatgtcggctacaacagatttgttctgtataaggagggggaacgtgacttcctccagcgccctggccagcagccccaggctgggctctcccaggccaacttcaccctgggccctgtgagcccctccaatgggggccagtacaggtgctacggtgcacacaacctctcctccgagtggtcggcccccagcgaccccctgaacatcctgatggcaggacagatctatgacaccgtctccctgtcagcacagccgggccccacagtggcctcaggagagaacgtgaccctgctgtgtcagtcatggtggcagtttgacactttccttctgaccaaagaaggggcagcccatcccccactgcgtctgagatcaatgtacggagctcataagtaccaggctgaattccccatgagtcctgtgacctcagcccacgcggggacctacaggtgctacggctcatacagctccaacccccacctgctgtctcaccccagtgagcccctggagctcgtggtctcaggacactctggaggctccagcctcccacccacagggccgccctccacacctggtctgggaagatacctggaggttttgattggggtctcggtggccttcgtcctgctgctcttcctcctcctcttcctcctcctccgacgtcagcgtcacagcaaacacaggacatctgaccagagaaagactgatttccagcgtcctgcaggggctgcggagacagagcccaaggacaggggcctgctgaggaggtccagcccagctgctgacgtccaggaagaaaacctctatgctgccgtgaaggacacacagtctgaggacagggtggagctggacagtcagagcccacacgatgaagacccccaggcagtgacgtatgccccggtgaaacactccagtcctaggagagaaatggcctctcctccctcctcactgtctggggaattcctggacacaaaggacagacaggtggaagaggacaggcagatggacactgaggctgctgcatctgaagcctcccaggatgtgacctacgcccagctgcacagcttgacccttagacggaaggcaactgagcctcctccatcccaggaaggggaacctccagctgagcccagcatctacgccactctggccatccactagcccggggggtacgcagaccccacactcagcagaaggagactcaggactgctgaaggcacgggagctgcccccagtggacaccagtgaaccccagtcagcctggacccctaacacagaccatgaggagacgctgggaacttgtgggactcacctgactcaaagatgactaatatcgtcccattttggaaataaagcaacagacttctcaacaatcaatgagttaataacaaaaaaacaaaaaacaaaaacagacgtaaaggccgggtgtggtactcaggaggctgagtggggaggattccttgaacacaagaagttaaggctgctgaggctgcagtgagctatgactgtgccactgcactccagcctgtgtgacagagcgagaccttgtctctaaaaaaaaaaacagtgaatgttttaaactgaatgataatgtaaatattatacatcgaacttatgacatgggaaaattaagaagcataaataggccgggcgcggtggctcacgcctataatctcagcactttgggaggctgatgcgggcggatcatgaggtcaggagatcgagaccatcctggctaacacggtgaaaccccgtctctactaaaaatacaaaaaaattagccgggcgtggtggcgagtgcctatagtcccagctactcaggaggctgaggcaggagaatggcatgagcccgggaggcagagcttgcagtgagctgagatcgcaccactgcactccagcctgggcgacagagtgagattccgtctcgaaaaaaaaaaaaaaagaaagaaaaaaaataaaaaagaagcataaccagg

SEQ ID NO: 297184 - DNA, 2822 bp, Artificial Sequence
  derived and/or modified sequence
atgacaagaaggacccagcctccgagcggccacaccctgtgtgtctctctgtcctgccagcactgagggctcatccctctgcagagcgcggggtcaccgggaggagacgccatgacgcccgccctcacagccctgctctgccttgggctgagtctgggccccaggacccgcgtgcaggcagggcccttccccaaacccaccctctgggctgagccaggctctgtgatcagctgggggagccccgtgaccatctggtgtcaggggagccaggaggcccaggagtaccgactgcataaagagggaagcccagagcccttggacagaaataacccactggaacccaagaacaaggccagattctccatcccatccatgacagagcaccatgcagggagataccgctgccactattacagctctgcaggctggtcagagcccagcgaccccctggagatggtgatgacaggagcctacagcaaacccaccctctcagccctgcccagccctgtggtggcctcaggggggaatatgaccctccgatgtggctcacagaagggatatcaccattttgttctgatgaaggaaggagaacaccagctcccccggaccctggactcacagcagctccacagtcgggggttccaggccctgttccctgtgggccccgtgacccccagccacaggtggaggttcacatgctattactattatacaaacaccccctgggtgtggtcccaccccagtgaccccctggagattctgccctcaggcgtgtctaggaagccctccctcctgaccctgcagggccctgtcctggcccctgggcagagcctgaccctccagtgtggctctgatgtcggctacaacagatttgttctgtataaggagggggaacgtgacttcctccagcgccctggccagcagccccaggctgggctctcccaggccaacttcaccctgggccctgtgagcccctccaatgggggccagtacaggtgctacggtgcacacaacctctcctccgagtggtcggcccccagcgaccccctgaacatcctgatggcaggacagatctatgacaccgtctccctgtcagcacagccgggccccacagtggcctcaggagagaacgtgaccctgctgtgtcagtcatggtggcagtttgacactttccttctgaccaaagaaggggcagcccatcccccactgcgtctgagatcaatgtacggagctcataagtaccaggctgaattccccatgagtcctgtgacctcagcccacgcggggacctacaggtgctacggctcatacagctccaacccccacctgctgtctcaccccagtgagcccctggagctcgtggtctcaggacactctggaggctccagcctcccacccacagggccgccctccacacctggtctgggaagatacctggaggttttgattggggtctcggtggccttcgtcctgctgctcttcctcctcctcttcctcctcctccgacgtcagcgtcacagcaaacacaggacatctgaccagagaaagactgatttccagcgtcctgcaggggctgcggagacagagcccaaggacaggggcctgctgaggaggtccagcccagctgctgacgtccaggaagaaaacctctatgctgccgtgaaggacacacagtctgaggacagggtggagctggacagtcagagcccacacgatgaagacccccaggcagtgacgtatgccccggtgaaacactccagtcctaggagagaaatggcctctcctccctcctcactgtctggggaattcctggacacaaaggacagacaggtggaagaggacaggcagatggacactgaggctgctgcatctgaagcctcccaggatgtgacctacgcccagctgcacagcttgacccttagacggaaggcaactgagcctcctccatcccaggaaggggaacctccagctgagcccagcatctacgccactctggccatccactagcccggggggtacgcagaccccacactcagcagaaggagactcaggactgctgaaggcacgggagctgcccccagtggacaccagtgaaccccagtcagcctggacccctaacacagaccatgaggagacgctgggaacttgtgggactcacctgactcaaagatgactaatatcgtcccattttggaaataaagcaacagacttctcaacaatcaatgagttaataacaaaaaaacaaaaaacaaaaacagacgtaaaggccgggtgtggtactcaggaggctgagtggggaggattccttgaacacaagaagttaaggctgctgaggctgcagtgagctatgactgtgccactgcactccagcctgtgtgacagagcgagaccttgtctctaaaaaaaaaaacagtgaatgttttaaactgaatgataatgtaaatattatacatcgaacttatgacatgggaaaattaagaagcataaataggccgggcgcggtggctcacgcctataatctcagcactttgggaggctgatgcgggcggatcatgaggtcaggagatcgagaccatcctggctaacacggtgaaaccccgtctctactaaaaatacaaaaaaattagccgggcgtggtggcgagtgcctatagtcccagctactcaggaggctgaggcaggagaatggcatgagcccgggaggcagagcttgcagtgagctgagatcgcaccactgcactccagcctgggcgacagagtgagattccgtctcgaaaaaaaaaaaaaaagaaagaaaaaaaataaaaaagaagcataaccagg

SEQ ID NO: 297185 - DNA, 1932 bp, Artificial Sequence
  derived and/or modified sequence
atgacccccgccctgaccgccctgctgtgcctgggcctgagcctggggccgagaactagagtgcaggccggcccctttcctaagccgacactgtgggcggaaccgggttcagtgatctcctggggctcccccgtgacgatatggtgccagggcagtcaggaggcacaggagtaccgtctgcacaaggaggggtctccagagcctctagacaggaataacccccttgaacccaagaataaggcacgcttcagtattccgagtatgaccgaacaccatgccggccgctacagatgccactattattcttctgcaggttggagcgagcccagtgacccgctcgagatggtcatgaccggagcctattccaagcccaccttgagcgccctgcctagcccagtggtggcctcaggaggcaatatgaccttacgatgtgggtcccaaaagggctatcatcacttcgtgttaatgaaggaaggggagcatcagctcccccgcacgctggattcacagcagttacacagccgcgggttccaggctttgtttccagtcggccctgtgactccctctcacagatggagattcacttgctattattactatacgaacactccgtgggtctggtctcatccttccgaccctcttgaaatattaccttcaggtgtgtctcgaaagcctagcctgctgacgctgcagggaccggttctggccccagggcagagtctgacactccagtgcggaagcgacgtgggatacaatcggttcgtgctgtataaggaaggggagagggatttcctccagcgtcctgggcagcagccacaggcaggtctgtcacaggctaattttactctgggcccagtttccccttctaatggaggccagtatcgatgctatggtgctcacaatctatccagtgaatggagtgcccctagcgatcccctgaatattcttatggcaggacaaatttatgacacggtcagcttgtcggcccagcctggacctacagtcgcttccggagaaaacgttactctcctgtgtcagtcctggtggcaattcgatacttttctgcttaccaaggaaggtgcggcccacccccctctgaggctcaggtcgatgtatggggcacacaagtatcaagcagagttcccaatgagtccagtgacctccgctcacgcggggacctacaggtgttacggctcttacagctcaaatccccacttgctaagccatccatcggagcccctggagttagttgtgagcgggccagaagatcagcctcttaaccctccgggctccgggcctcaaaatccgccagggttaggttctggcgccggaacgcgggccgccggcctcggccgctacctcgaggtgctgataggggttagcgtggcattcgtcctgctactcttccttctgctgtttttactgcttcggaggcaaaggcactccaaacaccgtacttctgaccaaagaaagactgattttcaacgtcccgctggagcagctgagacggagccaaaggatagggggctgctacgaaggtcctcacccgcagccgacgtgcaggaagagaatctgtatgcagctgtgaaagatacgcagtccgaagaccgggtggaactcgattcccagtccccacacgacgaggatcctcaggccgtgacctatgccccggttaagcacagctcacccaggcgcgaaatggccagtcccccttcttccctgagtggtgagttcttggacacaaaggatcgtcaggtggaagaggacaggcagatggatacggaagccgccgcatcagaagcaagccaggacgtgacatacgctcagctgcactcactcaccctcagacgcaaggccactgagcctccaccatcacaggagggcgaacccccggccgagcctagcatttatgccacccttgcaattcactag

SEQ ID NO: 297186 - DNA, 1896 bp, Artificial Sequence
  derived and/or modified sequence
atgacccccgccctgaccgccctgctgtgcctgggcctgagcctgggtccaaggacccgtgtgcaagcagggccatttccaaaaccaaccctctgggccgaacccggatcggtgatttcctggggcagtcccgtcacgatctggtgccaaggctcccaggaagcccaggaataccggctccacaaggaagggagtccggaacctcttgataggaataatccgcttgaacccaagaataaagcgcggttttcgataccctcgatgactgagcatcatgctggccgttaccgctgtcactactactctagtgccggatggagcgagcccagtgaccctctggaaatggtcatgaccggagcctattctaagccgaccctgagtgcattgcccagtcctgttgttgcctcaggaggtaacatgaccctgcgctgcggttcccagaagggataccatcacttcgtccttatgaaagagggggagcatcagctgccccggacccttgacagtcagcagctgcactcccggggctttcaagctttatttccagtcgggcccgtgaccccttcacacaggtggcggtttacatgctattattactatacaaataccccttgggtttggagccacccatctgatcccctcgagatcctgcctagcggggtgtctcggaaaccatcactcctgacactgcagggccccgttttggcccctggccagagtctgacactgcagtgtggctccgacgtgggttacaacagattcgtcctgtataaagaaggtgaacgggactttctgcagcgacccggccagcagccccaagccgggctgtcgcaggctaatttcaccctcgggcccgtctccccgtccaatgggggccagtaccggtgttatggggcccacaacttgagttctgaatggtctgccccaagtgacccgcttaacatcctgatggcaggtcagatttacgataccgtgagtctatcagcgcagcccgggccgacagtggccagcggtgaaaatgtaaccctcctgtgtcaaagctggtggcagtttgacactttcctgttaaccaaagagggcgcggcccatccccctttacgtttgcgcagcatgtacggcgcccataaataccaggcagaattccccatgtccccagtaacttccgcccatgccgggacataccgatgctacggcagctactcttcgaatccgcacttactttcacacccctctgaaccgctggaactggtggtgtctggccatagtggaggaagctcattgccgcctaccgggcctcctagcacacctggcttaggccgatacctggaggtgctgatcggagtgagtgtcgctttcgttctcctgcttttcttgttgctcttcctgcttctgcgcaggcagcgccactcaaagcatcggacttcggaccagaggaagactgacttccagcgccccgccggggctgctgaaaccgaacctaaggaccgcggattacttagacggagttcacctgccgctgacgtacaggaagagaatctgtacgcagcagtgaaggatacacagagtgaagaccgcgtggaattagattctcagagtccccacgacgaggaccctcaggcagtgacgtatgctccggtgaaacatagcagccctcgtcgagaaatggcatcgccaccttcctctctctcaggagagttcctggacacaaaagacagacaggtggaggaggatcggcagatggacactgaggccgcggcaagtgaagcctcccaggatgtgacctacgcccaattacatagcttgacactgcggagaaaagcgactgaacctccccctagccaggaaggagagccaccggccgagccatccatatacgctaccctggcaatccactag

SEQ ID NO: 297187 - DNA, 1896 bp, Artificial Sequence
  derived and/or modified sequence
atgacccccgccctgaccgccctgctgtgcctgggcctgagcctgggaccccggactcgcgttcaggcgggaccattcccgaaacccaccctgtgggccgaacccggctcggtgatctcctgggggtcacccgtgacgatttggtgccaggggagccaggaggctcaggaatatagactgcataaagagggaagcccggagcctctggatcggaacaatccacttgaaccaaaaaataaagcccggttctccatcccttccatgaccgagcaccatgcaggccggtaccggtgtcactactatagctctgcagggtggtcagagccgagcgaccctttagagatggttatgacaggggcctacagcaagccgactctgtcagcgcttcccagtcccgttgttgccagtggagggaacatgaccctgcgctgtgggagccagaaggggtaccatcattttgtgcttatgaaagaaggggagcatcagctaccgaggactctagactcccagcagctgcactcccggggctttcaggccttattccccgtgggccccgtcaccccgtcacaccggtggcgctttacttgttattattattacacaaatacaccctgggtatggagtcacccctcggatccactcgagatcctgccctccggagttagccgcaaacccagtcttcttacattgcagggacccgtacttgccccaggccagagtttgactctgcagtgcgggtcagatgtgggctacaatcgcttcgtgctgtataaggagggcgagcgggattttctgcagcgtcccggccagcaaccccaagcaggtctgagccaggccaatttcaccctcggtcccgtgtcccctagcaacggcggccagtacaggtgctacggggcgcacaatctcagcagcgaatggagcgctccatctgaccctctcaatattcttatggcaggacagatatacgatacggtgtctctcagtgcccagccagggcccaccgtagcatccggggagaacgttactttgttatgtcagtcatggtggcagtttgatacattcctgttgaccaaagagggggcagcccaccccccgctgcgactcaggagcatgtacggtgcccataagtaccaagccgagtttcccatgtcgcccgtgacatctgctcacgcagggacatataggtgttacggttcttatagcagtaatccccatctgctctctcacccgagcgagcctcttgaactcgtggtttccgggcattctggaggcagctctctccccccgaccggcccgccttctactcctggcctcggaagatacttggaggtgctaatcggggtctccgtcgcattcgtgctcctattgtttctgttactctttttgctgctgcgcaggcagagacactccaaacacaggactagtgaccagcgcaagaccgatttccaacgacccgctggggccgctgaaaccgaaccaaaagaccgaggcctgctccgccgctcctcaccagctgcagacgtgcaggaggaaaacctgtatgctgcagtgaaggacacccagagtgaggaccgcgtggaactggacagtcagtccccccacgatgaagacccacaggctgtcacctatgcgcccgtgaaacactcttctcccaggagggagatggcttcccccccttcgtccctgagcggcgaatttctagatactaaagataggcaggtcgaggaggatagacagatggataccgaggcggcagcgagcgaggctagccaggacgtgacgtatgctcagcttcatagccttacgctgagacgcaaggcgacagagccacccccatctcaagagggcgaacctcctgccgaaccctccatttatgctactttggccatacactag

SEQ ID NO: 297188 - DNA, 1932 bp, Artificial Sequence
  derived and/or modified sequence
atgacccccgctctcaccgcattactctgtctggggctgagcttgggcccaagaacacgagttcaagctggcccatttcctaagcccacgctttgggccgagcccggtagcgtgatatcatggggctcccctgtcaccatctggtgtcagggtagtcaggaagcccaggagtaccgcctgcacaaagaaggcagtcctgaacccctcgatcggaataatcctctcgaacctaagaataaagccaggttcagcatcccttccatgaccgagcaccatgcaggaaggtatagatgccactattattcctcagcaggctggtccgagccctcagacccactagagatggtgatgacaggtgcatattctaaacccaccttgagcgctttgcccagccctgtcgtggcctctgggggtaacatgacgttgcgatgcggtagccagaaagggtatcatcattttgtcctaatgaaggagggcgaacaccagcttccacgcacacttgatagccaacaactgcacagccggggttttcaagctctgtttccagtcggccctgtgacaccaagtcaccgctggcgattcacgtgctactactattacaccaatacaccatgggtgtggtcacacccatctgaccctctggaaatcctcccatcaggagttagccggaaaccctccctgctgacactgcagggtcctgttctagcgccaggccaatcccttacacttcagtgtgggagcgacgttggatataaccgtttcgtgctctacaaggaaggagaaagggactttctgcaaagacccggtcagcaacctcaggcaggactcagtcaggctaatttcacactgggacccgtatccccctccaacggaggtcagtatcgttgctacggggcacacaatctgtccagtgagtggtcggcgccttcagatccgctcaacatccttatggcgggacagatctacgacactgtgtcactcagcgctcagcctggcccaacggttgcctccggagagaacgttaccctgctgtgccagagttggtggcaatttgatacttttcttctgaccaaagaaggagctgcccatcctccactccgcctgcggtcaatgtatggcgcacacaagtatcaggctgaatttccaatgtcacctgtgacaagcgcacatgcaggtacctatcgctgctatggctcttactcaagcaacccacacctattaagccaccctagcgagcctctggagctggtagtctctgggccagaggatcagcctctgaaccccccaggctccggtcctcagaaccccccaggtctcgggtccggtgcgggtacacgggcagcagggctgggccgttatctggaggtgctcattggcgtgagcgtggcatttgtgctgctcttgtttctcctgctgtttctgctccttagacgacagcgccattcgaaacaccgtacctctgatcagagaaagacagatttccaaaggccggcaggcgctgccgagactgagcccaaagatagagggctgctccgacggtcatctcccgcagctgatgtccaggaggaaaacctttacgccgctgtgaaagatacgcaaagcgaggatagggtggagcttgacagtcagtcaccccatgacgaggacccacaagctgtgacttacgcccctgtgaaacacagttcccccaggagagaaatggctagtcctccatcctctctttctggcgaattccttgacaccaaggatcgacaagtcgaagaggatcgacagatggataccgaagcagcagcatcagaagcgtcacaggatgtgacttatgcacagctgcacagcctaaccctgcgcaggaaggccactgaacctccccctagtcaggaaggtgaaccacctgccgagcccagcatctatgccaccctggccatccactag

SEQ ID NO: 297189 - DNA, 1896 bp, Artificial Sequence
  derived and/or modified sequence
atgacacccgcactcacggccctgctctgtctgggtctgtccttaggccctcggaccagagtccaggctggaccattcccaaaaccgactctgtgggcagaacccggttcggtcattagttggggttcccccgtcacaatatggtgccagggttcgcaggaggctcaggagtaccgtctgcacaaggagggtagtcccgagccattagacagaaataatcctctggaaccaaaaaataaggccagatttagcattccttctatgacagagcaccacgcagggagatatcggtgccactactactcatctgccggttggtcagagccatccgatccattagagatggtgatgacgggcgcatactccaagcccaccctgtccgcacttcctagcccggtagtggcgtctggcggaaatatgactctacgctgtggatcccaaaagggatatcaccattttgtcctaatgaaagagggcgaacatcagctcccaaggaccctggattctcagcagctacactcacggggttttcaggccctgttcccggttggacctgtgaccccctcacaccggtggcgctttacatgctattattattacaccaacacaccctgggtgtggtcccacccatctgaccctctggagatacttccaagcggtgtgtcccggaagccgagcctgctgactctccaagggcctgtactcgcccctggacagagcttgactctgcagtgcggctccgacgtaggatacaacagattcgtgttgtacaaggaaggcgagagggactttctgcagcgccctggacaacaaccacaagctggcctgtctcaagctaatttcactctaggacccgtcagtccatctaacggcggacagtacaggtgctatggagcccataatctctcatcagaatggtctgccccatccgaccccctgaatattctgatggctggacagatctatgacaccgtctccctgagcgcacagcccggacccacagttgccagcggcgaaaacgtgacactgctgtgtcagtcatggtggcaatttgatacattcctgctcacaaaagaaggcgcagctcacccacccctaagacttcggtccatgtacggagcgcataagtaccaggcggaattccctatgagccccgtgaccagcgctcacgctgggacatacaggtgctacggaagttactcctccaacccgcacttactatctcaccccagcgagcccttagagctggtggtcagcgggcattctgggggatcatccttgccaccaactgggccaccatccaccccagggcttggtaggtacctggaggttctgattggagtgtctgtggcctttgtcttgctgctgtttctgttgttgtttctgttactgcgaagacagcgccacagtaagcataggacctccgatcagaggaagactgatttccaacgccctgccggagctgccgagactgagccaaaggacagggggctgctgcggaggagcagtccggcagccgacgtgcaggaggaaaacctgtacgccgctgttaaagacacacaatcggaggacagggtggagctggatagccaaagccctcacgacgaggaccctcaggcggtgacctacgccccagtgaagcactccagtcccaggcgagaaatggcctccccaccaagtagtctgtcgggagagttcctagatacaaaggacagacaggtagaagaggatcgacagatggacactgaggccgcagcgtctgaggcttcacaagatgtgacttacgctcagctccacagcttgacattaagaaggaaggctacagaaccccctccttcccaagagggggagcccccagcagaaccctccatctatgctaccttggcgatccattag

SEQ ID NO: 297190 - DNA, 1896 bp, Artificial Sequence
  derived and/or modified sequence
atgacgcccgctctgactgctctgctgtgtctggggttatctctgggcccacgaaccagagtgcaagcagggccattcccaaagccaaccctgtgggccgaaccagggagcgtcatcagttggggctcacccgtaacaatttggtgccagggttctcaggaggcccaggagtaccggcttcataaagagggaagtccagaacccctcgaccgcaataatccattggaaccaaagaataaagctagattctctattccatccatgaccgaacatcacgccggacggtacaggtgtcattactactccagcgcaggctggtcagagcccagcgaccccctcgaaatggtgatgaccggagcctattctaagcctacacttagcgccctgccatctccagtggtggccagtggtgggaacatgaccctgcgctgcggaagccaaaaaggctaccaccatttcgtgttaatgaaggaaggcgagcaccagttgccgagaacactggactcccagcaactacattccagaggcttccaggccctcttcccagtaggtccagtaacaccatctcatcgttggaggttcacatgttactactactacaccaacaccccatgggtgtggtcccaccctagcgatccccttgaaattctgcccagcggcgtctctagaaagccgtccctgctcacactccagggaccggtgcttgcgcctggacagagtctgacactgcagtgtgggtcggatgtaggatataatcggtttgtgctatacaaagagggagaacgagattttttgcaacgcccaggacaacaacctcaagccggactgtcacaggccaactttacactagggcctgtgagcccgagtaatggtggacaataccggtgctacggcgcacacaacctcagttctgagtggtccgcgccatccgatcccctgaacatattgatggccggtcagatctacgataccgtgtctttgagcgctcaacccggtcctaccgtggcaagtggcgagaatgtgaccttactctgtcagagctggtggcagtttgacaccttccttctgacaaaagaaggagccgcacacccacctttaagactccgaagcatgtacggagctcacaaataccaggcggaattccccatgagccccgtgacatcggcacatgccggaacttaccggtgttatggctcctattcatcaaacccgcacctgctttctcatccgagtgagccactcgagcttgtcgtttctgggcacagtggtggctccagcctgcccccaacgggcccaccgagcacaccaggtctggggcgatatttggaggtgctcattggggtttctgttgctttcgtgctcttactctttctgctcctattcttacttctgcggagacaacggcactctaagcacaggacctcagaccagcggaaaactgattttcagcgtcccgctggcgctgccgaaacggagcctaaagaccgcggtctgttaagacggtcaagtcctgcggcagatgtacaagaggagaatctgtatgctgctgtgaaagacactcagtcagaggatcgggtggagctggattctcaatcaccacatgatgaggatcctcaggctgtgacctacgccccagttaagcactcctcacctcgtcgggagatggcctcccccccttcgtcactatccggggagtttttggacaccaaggatcgtcaggtggaggaggacagacagatggatacggaggccgctgcctccgaggcctcacaggacgtgacttatgcgcagctgcattctcttaccctccgaagaaaggccacggagccgcctccgtctcaggaaggcgagccacctgctgagccctcaatctatgcaactctcgcaatccattag

SEQ ID NO: 297191 - DNA, 1932 bp, Artificial Sequence
  derived and/or modified sequence
atgacccccgccctgaccgccctgctgtgcctgggcctgagcctgggccccagaaccagagtgcaggccggccccttccccaagcccaccctgtgggccgagcccggcagcgtgatcagctggggcagccccgtgaccatctggtgccagggcagccaggaggcccaggagtacagactgcacaaggagggcagccccgagcccctggacagaaacaaccccctggagcccaagaacaaggccagattcagcatccccagcatgaccgagcaccacgccggcagatacagatgccactactacagcagcgccggctggagcgagcccagcgaccccctggagatggtgatgaccggcgcctacagcaagcccaccctgagcgccctgcccagccccgtggtggccagcggcggcaacatgaccctgagatgcggcagccagaagggctaccaccacttcgtgctgatgaaggagggcgagcaccagctgcccagaaccctggacagccagcagctgcacagcagaggcttccaggccctgttccccgtgggccccgtgacccccagccacagatggagattcacctgctactactactacaccaacaccccctgggtgtggagccaccccagcgaccccctggagatcctgcccagcggcgtgagcagaaagcccagcctgctgaccctgcagggccccgtgctggcccccggccagagcctgaccctgcagtgcggcagcgacgtgggctacaacagattcgtgctgtacaaggagggcgagagagacttcctgcagagacccggccagcagccccaggccggcctgagccaggccaacttcaccctgggccccgtgagccccagcaacggcggccagtacagatgctacggcgcccacaacctgagcagcgagtggagcgcccccagcgaccccctgaacatcctgatggccggccagatctacgacaccgtgagcctgagcgcccagcccggccccaccgtggccagcggcgagaacgtgaccctgctgtgccagagctggtggcagttcgacaccttcctgctgaccaaggagggcgccgcccacccccccctgagactgagaagcatgtacggcgcccacaagtaccaggccgagttccccatgagccccgtgaccagcgcccacgccggcacctacagatgctacggcagctacagcagcaacccccacctgctgagccaccccagcgagcccctggagctggtggtgagcggccccgaggaccagcccctgaacccccccggcagcggcccccagaacccccccggcctgggcagcggcgccggcaccagagccgccggcctgggcagatacctggaggtgctgatcggcgtgagcgtggccttcgtgctgctgctgttcctgctgctgttcctgctgctgagaagacagagacacagcaagcacagaaccagcgaccagagaaagaccgacttccagagacccgccggcgccgccgagaccgagcccaaggacagaggcctgctgagaagaagcagccccgccgccgacgtgcaggaggagaacctgtacgccgccgtgaaggacacccagagcgaggacagagtggagctggacagccagagcccccacgacgaggacccccaggccgtgacctacgcccccgtgaagcacagcagccccagaagagagatggccagcccccccagcagcctgagcggcgagttcctggacaccaaggacagacaggtggaggaggacagacagatggacaccgaggccgccgccagcgaggccagccaggacgtgacctacgcccagctgcacagcctgaccctgagaagaaaggccaccgagcccccccccagccaggagggcgagccccccgccgagcccagcatctacgccaccctggccatccactag

SEQ ID NO: 297192 - DNA, 1896 bp, Artificial Sequence
  derived and/or modified sequence
atgacccccgccctgaccgccctgctgtgcctgggcctgagcctgggccccagaaccagagtgcaggccggccccttccccaagcccaccctgtgggccgagcccggcagcgtgatcagctggggcagccccgtgaccatctggtgccagggcagccaggaggcccaggagtacagactgcacaaggagggcagccccgagcccctggacagaaacaaccccctggagcccaagaacaaggccagattcagcatccccagcatgaccgagcaccacgccggcagatacagatgccactactacagcagcgccggctggagcgagcccagcgaccccctggagatggtgatgaccggcgcctacagcaagcccaccctgagcgccctgcccagccccgtggtggccagcggcggcaacatgaccctgagatgcggcagccagaagggctaccaccacttcgtgctgatgaaggagggcgagcaccagctgcccagaaccctggacagccagcagctgcacagcagaggcttccaggccctgttccccgtgggccccgtgacccccagccacagatggagattcacctgctactactactacaccaacaccccctgggtgtggagccaccccagcgaccccctggagatcctgcccagcggcgtgagcagaaagcccagcctgctgaccctgcagggccccgtgctggcccccggccagagcctgaccctgcagtgcggcagcgacgtgggctacaacagattcgtgctgtacaaggagggcgagagagacttcctgcagagacccggccagcagccccaggccggcctgagccaggccaacttcaccctgggccccgtgagccccagcaacggcggccagtacagatgctacggcgcccacaacctgagcagcgagtggagcgcccccagcgaccccctgaacatcctgatggccggccagatctacgacaccgtgagcctgagcgcccagcccggccccaccgtggccagcggcgagaacgtgaccctgctgtgccagagctggtggcagttcgacaccttcctgctgaccaaggagggcgccgcccacccccccctgagactgagaagcatgtacggcgcccacaagtaccaggccgagttccccatgagccccgtgaccagcgcccacgccggcacctacagatgctacggcagctacagcagcaacccccacctgctgagccaccccagcgagcccctggagctggtggtgagcggccacagcggcggcagcagcctgccccccaccggcccccccagcacccccggcctgggcagatacctggaggtgctgatcggcgtgagcgtggccttcgtgctgctgctgttcctgctgctgttcctgctgctgagaagacagagacacagcaagcacagaaccagcgaccagagaaagaccgacttccagagacccgccggcgccgccgagaccgagcccaaggacagaggcctgctgagaagaagcagccccgccgccgacgtgcaggaggagaacctgtacgccgccgtgaaggacacccagagcgaggacagagtggagctggacagccagagcccccacgacgaggacccccaggccgtgacctacgcccccgtgaagcacagcagccccagaagagagatggccagcccccccagcagcctgagcggcgagttcctggacaccaaggacagacaggtggaggaggacagacagatggacaccgaggccgccgccagcgaggccagccaggacgtgacctacgcccagctgcacagcctgaccctgagaagaaaggccaccgagcccccccccagccaggagggcgagccccccgccgagcccagcatctacgccaccctggccatccactag

SEQ ID NO: 297193 - protein, 1269 aa, Artificial Sequence
  derived and/or modified sequence
MMSPICDQTIDSRLKVEKATWWGRVGGGSRPHWQSPGVRPCPEEVQDPGYSLSGYYTHPFQGYEHRQLRYQQPGPGSSPSSFLLKQIEFLKGQLPEAPVIGKQTPSLPPSLPGLRPRFPVLLASSTRGRQVDIRGVPRGVHLRSQGLQRGFQHPSPRGRSLPQRGVDCLSSHFQELSIYQDQEQRILKFLEELGEGKATTAHDLSGKLGTPKKEINRVLYSLAKKGKLQKEAGTPPLWKIAVSTQAWNQHSGVVRPDGHSQGAPNSDPSLEPEDRNSTSVSEDLLEPFIAVSAQAWNQHSGVVRPDSHSQGSPNSDPGLEPEDSNSTSALEDPLEFLDMAEIKEKICDYLFNVSDSSALNLAKNIGLTKARDINAVLIDMERQGDVYRQGTTPPIWHLTDKKRERMQIKRNTNSVPETAPAAIPETKRNAEFLTCNIPTSNASNNMVTTEKVENGQEPVIKLENRQEARPEPARLKPPVHYNGPSKAGYVDFENGQWATDDIPDDLNSIRAAPGEFRAIMEMPSFYSHGLPRCSPYKKLTECQLKNPISGLLEYAQFASQTCEFNMIEQSGPPHEPRFKFQVVINGREFPPAEAGSKKVAKQDAAMKAMTILLEEAKAKDSGKSEESSHYSTEKESEKTAESQTPTPSATSFFSGKSPVTTLLECMHKLGNSCEFRLLSKEGPAHEPKFQYCVAVGAQTFPSVSAPSKKVAKQMAAEEAMKALHGEATNSMASDNQPEGMISESLDNLESMMPNKVRKIGELVRYLNTNPVGGLLEYARSHGFAAEFKLVDQSGPPHEPKFVYQAKVGGRWFPAVCAHSKKQGKQEAADAALRVLIGENEKAERMGFTEVTPVTGASLRRTMLLLSRSPEAQPKTLPLTGSTFHDQIAMLSHRCFNTLTNSFQPSLLGRKILAAIIMKKDSEDMGVVVSLGTGNRCVKGDSLSLKGETVNDCHAEIISRRGFIRFLYSELMKYNSQTAKDSIFEPAKGGEKLQIKKTVSFHLYISTAPCGDGALFDKSCSDRAMESTESRHYPVFENPKQGKLRTKVENGEGTIPVESSDIVPTWDGIRLGERLRTMSCSDKILRWNVLGLQGALLTHFLQPIYLKSVTLGYLFSQGHLTRAICCRVTRDGSAFEDGLRHPFIVNHPKVGRVSIYDSKRQSGKTKETSVNWCLADGYDLEILDGTRGTVDGPRNELSRVSKKNIFLLFKKLCSFRYRRDLLRLSYGEAKKAARDYETAKNYFKKGLKDMGYGNWISKPQEEKNFYLCPV

SEQ ID NO: 297194 - DNA, 6515 bp, Artificial Sequence
  derived and/or modified sequence
cccgactgaaggtagagaaggctacgtggtgggggagggtggggggagggtcgcggccgcactggcagtctccgggtgtccggccgtgtcccgaggaagtgcaagacccggggtattccctcagcggatactacacccatccatttcaaggctatgagcacagacagctcaggtaccagcagcctgggccaggatcttcccccagtagtttcctgcttaagcaaatagaatttctcaaggggcagctcccagaagcaccggtgattggaaagcagacaccgtcactgccaccttccctcccaggactccggccaaggtttccagtactacttgcctccagtaccagaggcaggcaagtggacatcaggggtgtccccaggggcgtgcatctcagaagtcaggggctccagagagggttccagcatccttcaccacgtggcaggagtctgccacagagaggtgttgattgcctttcctcacatttccaggaactgagtatctaccaagatcaggaacaaaggatcttaaagttcctggaagagcttggggaagggaaggccaccacagcacatgatctgtctgggaaacttgggactccgaagaaagaaatcaatcgagttttatactccctggcaaagaagggcaagctacagaaagaggcaggaacaccccctttgtggaaaatcgcggtctccactcaggcttggaaccagcacagcggagtggtaagaccagacggtcatagccaaggagccccaaactcagacccgagtttggaaccggaagacagaaactccacatctgtctcagaagatcttcttgagccttttattgcagtctcagctcaggcttggaaccagcacagcggagtggtaagaccagacagtcatagccaaggatccccaaactcagacccaggtttggaacctgaagacagcaactccacatctgccttggaagatcctcttgagtttttagacatggccgagatcaaggagaaaatctgcgactatctcttcaatgtgtctgactcctctgccctgaatttggctaaaaatattggccttaccaaggcccgagatataaatgctgtgctaattgacatggaaaggcagggggatgtctatagacaagggacaacccctcccatatggcatttgacagacaagaagcgagagaggatgcaaatcaagagaaatacgaacagtgttcctgaaaccgctccagctgcaatccctgagaccaaaagaaacgcagagttcctcacctgtaatatacccacatcaaatgcctcaaataacatggtaaccacagaaaaagtggagaatgggcaggaacctgtcataaagttagaaaacaggcaagaggccagaccagaaccagcaagactgaaaccacctgttcattacaatggcccctcaaaagcagggtatgttgactttgaaaatggccagtgggccacagatgacatcccagatgacttgaatagtatccgcgcagcaccaggtgagtttcgagccatcatggagatgccctccttctacagtcatggcttgccacggtgttcaccctacaagaaactgacagagtgccagctgaagaaccccatcagcgggctgttagaatatgcccagttcgctagtcaaacctgtgagttcaacatgatagagcagagtggaccaccccatgaacctcgatttaaattccaggttgtcatcaatggccgagagtttcccccagctgaagctggaagcaagaaagtggccaagcaggatgcagctatgaaagccatgacaattctgctagaggaagccaaagccaaggacagtggaaaatcagaagaatcatcccactattccacagagaaagaatcagagaagactgcagagtcccagacccccaccccttcagccacatccttcttttctgggaagagccccgtcaccacactgcttgagtgtatgcacaaattggggaactcctgcgaattccgtctcctgtccaaagaaggccctgcccatgaacccaagttccaatactgtgttgcagtgggagcccaaactttccccagtgtgagtgctcccagcaagaaagtggcaaagcagatggccgcagaggaagccatgaaggccctgcatggggaggcgaccaactccatggcttctgataaccagcctgaaggtatgatctcagagtcacttgataacttggaatccatgatgcccaacaaggtcaggaagattggcgagctcgtgagatacctgaacaccaaccctgtgggtggccttttggagtacgcccgctcccatggctttgctgctgaattcaagttggtcgaccagtccggacctcctcacgagcccaagttcgtttaccaagcaaaagttgggggtcgctggttcccagccgtctgcgcacacagcaagaagcaaggcaagcaggaagcagcagatgcggctctccgtgtcttgattggggagaacgagaaggcagaacgcatgggtttcacagaggtaaccccagtgacaggggccagtctcagaagaactatgctcctcctctcaaggtccccagaagcacagccaaagacactccctctcactggcagcaccttccatgaccagatagccatgctgagccaccggtgcttcaacactctgactaacagcttccagccctccttgctcggccgcaagattctggccgccatcattatgaaaaaagactctgaggacatgggtgtcgtcgtcagcttgggaacagggaatcgctgtgtgaaaggagattctctcagcctaaaaggagaaactgtcaatgactgccatgcagaaataatctcccggagaggcttcatcaggtttctctacagtgagttaatgaaatacaactcccagactgcgaaggatagtatatttgaacctgctaagggaggagaaaagctccaaataaaaaagactgtgtcattccatctgtatatcagcactgctccgtgtggagatggcgccctctttgacaagtcctgcagcgaccgtgctatggaaagcacagaatcccgccactaccctgtcttcgagaatcccaaacaaggaaagctccgcaccaaggtggagaacggagaaggcacaatccctgtggaatccagtgacattgtgcctacgtgggatggcattcggctcggggagagactccgtaccatgtcctgtagtgacaaaatcctacgctggaacgtgctgggcctgcaaggggcactgttgacccacttcctgcagcccatttatctcaaatctgtcacattgggttaccttttcagccaagggcatctgacccgtgctatttgctgtcgtgtgacaagagatgggagtgcatttgaggatggactacgacatccctttattgtcaaccaccccaaggttggcagagtcagcatatatgattccaaaaggcaatccgggaagactaaggagacaagcgtcaactggtgtctggctgatggctatgacctggagatcctggacggtaccagaggcactgtggatgggccacggaatgaattgtcccgggtctccaaaaagaacatttttcttctatttaagaagctctgctccttccgttaccgcagggatctactgagactctcctatggtgaggccaagaaagctgcccgtgactacgagacggccaagaactacttcaaaaaaggcctgaaggatatgggctatgggaactggattagcaaaccccaggaggaaaagaacttttatctctgcccagtatagtatgctccagtgacagatggattagggtgtgtcatactagggtgtgagagaggtaggtcgtagcattcctcatcacatggtcaggggatttttttttctcctttttttttctttttaagccataattggtgatactgaaaactttgggttcccatttatcctgctttctttgggattgctaggcaaggtctggccaggccccccttttttcccccaagtgaagaggcagaaacctaagaagttatcttttctttctacccaaagcatacatagtcactgagcacctgcggtccatttcctcttaaaagttttgttttgatttgtttccatttcctttccctttgtgtttgctacactgacctcttgcggtcttgattaggtttcagtcaactctggatcatgtcagggactgataatttcatttgtggattacgcagacccctctacttcccctctttcccttctgagattctttccttgtgatctgaatgtctccttttccccctcagagggcaaagaggtgaacataaaggatttggtgaaacatttgtaagggtaggagttgaaaactgcagttcccagtgccacggaagtgtgattggagcctgcagataatgcccagccatcctcccatcctgcactttagccagctgcagggcgggcaaggcaaggaaagctgcttccctggaagtgtatcactttctccggcagctgggaagtctagaaccagccagactgggttaagggagctgctcaagcaatagcagaggtttcacccggcaggatgacacagaccacttcccagggagcacgggcatgccttggaatattgccaagcttccagctgcctcttctcctaaagcattcctaggaatattttccccgccaatgctgggcgtacaccctagccaacgggacaaatcctagagggtataaaatcatctctgctcagataatcatgacttagcaagaataagggcaaaaaatcctgttggcttaacgtcactgttccacccggtgtaatatctctcatgacagtgacaccaagggaagttgactaagtcacatgtaaattaggagtgttttaaagaatgccatagatgttgattcttaactgctacagataacctgtaattgagcagatttaaaattcaggcatacttttccatttatccaagtgctttcatttttccagatggcttcagaagtaggctcgtgggcagggcgcagacctgatctttatagggttgacatagaaagcagtagttgtgggtgaaagggcaggttgtcttcaaactctgtgaggtagaatcctttgtctatacctccatgaacattgactcgtgtgttcagagcctttggcctctctgtggagtctggctctctggctcctgtgcattctttgaatagtcactcgtaaaaactgtcagtgcttgaaactgtttcctttactcatgttgaagggactttgttggcttttagagtgttggtcatgactccaagagcagagcagggaagagcccaagcatagacttggtgccgtggtgatggctgcagtccagttttgtgatgctgcttttacgtgtccctcgataacagtcagctagacacactcaggaggactactgaggctctgcgaccttcaggagctgagcctgcctctctcctttagatgacagaccttcatctgggaacgtgctgagccagcaccctcagatgatttccctccaaactgctgactaggtcatcctctgtctggtagagacattcacatctttgcttttattctatgctctctgtacttttgaccaaaaattgaccaaagtaagaaaatgcaagttctaaaaatagactaaggatgcctttgcagaacaccaaagcatcccaaggaactggtagggaagtggcgcctgtctcctggagtggaagaggcctgctccctggctctgggtctgctgggggcacagtaaatcagtcttggcacccacatccagggcagagaggtctgtggttctcagcatcagaaggcagcgcagcccctctcctcttcaggctacagggttgtcacctgctgagtcctcaggttgtttggcctctctggtccatcttgggcattaggttctccagcagagctctggccagctgcctcttctttaactgggaacacaggctctcacaagatcagaacccccactcacccccaagatcttatctagcaagcctgtagtattcagtttctgttgtaggaagagagcgaggcatccctgaattccacgcatctgctggaaacgagccgtgtcagatcgcacatccctgcgcccccatgcccctctgagtcacacaggacagaggaggcagagcttctgcccactgttatcttcactttctttgtccagtcttttgtttttaataagcagtgaccctccctactcttctttttaatgatttttgtagttgatttgtctgaactgtggctactgtgcattccttgaataatcacttgtaaaaattgtcagtgcttgaagctgtttcctttactcacattgaagggacttcgttggttttttggagtcttggttgtgactccaagagcagagtgaggaagacccccaagcatagactcgggtactgtgatgatggctgcagtccagttttatgattctgcttttatgtgtcccttgataacagtgacttaacaatatacattcctcataaataaaaaaaaaacaagaatctgaa

SEQ ID NO: 297195 - DNA, 3810 bp, Artificial Sequence
  derived and/or modified sequence
atgatgagtcccatatgcgatcaaacgatcgattcccgtcttaaggttgagaaagcaacctggtggggcagggtgggcgggggctctcgacctcattggcagagcccaggcgtcagaccttgtcccgaggaagtgcaggacccaggctattctcttagcgggtactacactcatccttttcaaggatacgaacatagacagctcagatatcagcagccaggtcctggcagctccccaagctcctttctgctgaaacagattgagttccttaagggccagcttccggaggcacccgtgattggcaagcagacaccatccctgccgccttccctacccggccttcgccctaggtttcctgtgctgctggcctcctccacaaggggaagacaggtggacattcgtggcgtgcctagaggggtgcacttaagatcacaaggacttcaacggggcttccagcacccttccccaagggggagatctttacctcagagaggcgtagattgccttagctcccattttcaggagctcagcatttaccaggatcaagaacagagaattctgaagtttctggaagagttgggcgaagggaaggccacgacggcacacgatctctcagggaagctgggaacaccaaagaaggaaattaacagagtgctctattctctcgccaagaagggcaagctgcagaaggaggctggcacccctcccctctggaagattgctgtttcaacacaagcttggaaccagcacagcggcgtcgtcagacctgacggtcattctcagggcgcccctaatagcgatccaagcctggagcctgaggatcggaactcaacttccgtcagtgaagacttgcttgaaccattcatcgcggtgtccgcccaagcttggaatcagcacagtggcgtcgtgcgaccagatagccatagccagggctctcccaatagcgatcctggcctcgagccagaggattctaactctacctcagccctggaagacccactggaattcctggacatggcggagattaaggaaaaaatctgcgactacctctttaacgtatcggactctagcgcgcttaacctcgccaagaacatcggtcttactaaggccagagatattaacgctgtgctgatcgatatggaaagacagggagatgtgtatcgacaggggacaactcctccgatatggcatctcactgacaagaagagggagcgcatgcagatcaagcgcaacacaaacagcgtgcccgagaccgctcctgcagcaataccggagacgaagagaaacgcggagttcctgacatgtaatatacccactagtaacgctagcaacaacatggtcaccactgaaaaagtggaaaacggacaggagcccgtcatcaagcttgagaacaggcaagaagcaagaccagagccggcgagactcaagccgcccgttcactataatggtccgtccaaggctggatatgtcgacttcgaaaatgggcagtgggctactgacgatatccccgacgacttgaattccatcagagccgcccccggggagtttagagcgattatggagatgccaagcttttatagccacggactcccccggtgctcaccatacaaaaagctcacggagtgtcagctgaaaaatccaatctccggactcttggaatacgcccagtttgccagccagacatgcgagtttaacatgatcgagcagtcaggcccaccccacgagcctagatttaagtttcaagtcgtgataaacgggagggaattcccccctgccgaggcggggagtaagaaggtagccaagcaggacgctgccatgaaagcgatgaccatcttacttgaggaagcaaaggcaaaagactccgggaaatctgaggagagctctcattattcaacagaaaaagagtccgagaaaacggcagaatcccagacccccacaccgtccgccacgagcttcttctctggaaaaagccccgtcacaaccctcttagaatgtatgcacaagctgggcaactcatgtgagtttaggcttctttccaaggagggcccggcacatgaacctaagttccaatactgtgtggccgtcggagcccaaacatttccatccgtgtctgccccttccaagaaggtcgcgaagcagatggcggcggaggaagccatgaaagccctgcacggggaggcgacaaactccatggcctctgacaaccagcctgagggcatgatcagcgagtcactggataatcttgaatcgatgatgcccaacaaggtcaggaaaatcggtgagctggttagatacctgaataccaaccccgttggcgggctgctagagtatgctaggtctcacgggttcgccgctgagttcaaactggtggaccaaagcggcccgccacatgagccgaagtttgtgtaccaagctaaggtgggcggtagatggttccctgctgtctgtgcccactcaaaaaaacagggaaaacaggaagcagccgatgccgctttacgtgtacttataggggagaacgagaaagcagaacgaatgggatttaccgaagtgacgccagtgactggggcaagcctgagacggaccatgttgcttcttagccggtctcctgaagcacagcccaaaactcttcctctcacaggatcaaccttccacgaccagatagcaatgctgtcacatcgatgttttaatacactcacaaactccttccagccaagtctcctgggccgcaagattttggcagcgatcattatgaagaaagatagcgaggacatgggagtcgtcgtaagcctgggcaccggcaatagatgcgtcaaaggggacagtctgagccttaagggggaaactgtcaacgactgccatgcagagattatcagccgcagaggctttatcagatttctgtactctgagctcatgaagtataattcccagactgcgaaggacagcatttttgagcctgccaaaggtggtgagaaactgcaaatcaagaagacagtatcgtttcatctgtatatctccaccgcaccctgcggggacggcgctctgtttgataaaagctgtagcgatagagccatggaatcaacagaatctagacactatcccgtgttcgagaatccaaaacagggcaagctccgcacaaaagtggagaacggcgagggcacgattccagtcgagtccagcgatatcgtcccaacttgggatggcatccggctgggagaacgcttgaggaccatgtcatgttccgataaaatcttacgttggaatgtcctcgggcttcagggagccttattgacacatttcctgcaacctatctacctgaagtctgtaacccttgggtacttgtttagccagggccatctgacccgggctatctgctgcagagtgacacgagatggttccgcatttgaagacggcttgagacatccattcattgttaaccaccctaaagttgggcgggtgtctatttatgattccaaacgtcaatctggaaagacaaaggagactagcgttaattggtgtttagcagacggatatgacttggagatcctggatggcacaagaggcacagttgacgggccccggaatgagctgagtagggtgtctaagaaaaacatcttcttgcttttcaagaaattgtgctctttccggtatagaagagacttactacgactctcttacggggaggctaagaaagctgcaagagactacgaaaccgccaagaactattttaaaaaaggactcaaggacatggggtatgggaactggatctccaaaccgcaggaggagaagaatttttacctgtgccccgtttag

SEQ ID NO: 297196 - DNA, 6554 bp, Artificial Sequence
  derived and/or modified sequence
atgatgtcaccaatctgcgaccagaccattgattcccgactgaaggtagagaaggctacgtggtgggggagggtggggggagggtcgcggccgcactggcagtctccgggtgtccggccgtgtcccgaggaagtgcaagacccggggtattccctcagcggatactacacccatccatttcaaggctatgagcacagacagctcaggtaccagcagcctgggccaggatcttcccccagtagtttcctgcttaagcaaatagaatttctcaaggggcagctcccagaagcaccggtgattggaaagcagacaccgtcactgccaccttccctcccaggactccggccaaggtttccagtactacttgcctccagtaccagaggcaggcaagtggacatcaggggtgtccccaggggcgtgcatctcagaagtcaggggctccagagagggttccagcatccttcaccacgtggcaggagtctgccacagagaggtgttgattgcctttcctcacatttccaggaactgagtatctaccaagatcaggaacaaaggatcttaaagttcctggaagagcttggggaagggaaggccaccacagcacatgatctgtctgggaaacttgggactccgaagaaagaaatcaatcgagttttatactccctggcaaagaagggcaagctacagaaagaggcaggaacaccccctttgtggaaaatcgcggtctccactcaggcttggaaccagcacagcggagtggtaagaccagacggtcatagccaaggagccccaaactcagacccgagtttggaaccggaagacagaaactccacatctgtctcagaagatcttcttgagccttttattgcagtctcagctcaggcttggaaccagcacagcggagtggtaagaccagacagtcatagccaaggatccccaaactcagacccaggtttggaacctgaagacagcaactccacatctgccttggaagatcctcttgagtttttagacatggccgagatcaaggagaaaatctgcgactatctcttcaatgtgtctgactcctctgccctgaatttggctaaaaatattggccttaccaaggcccgagatataaatgctgtgctaattgacatggaaaggcagggggatgtctatagacaagggacaacccctcccatatggcatttgacagacaagaagcgagagaggatgcaaatcaagagaaatacgaacagtgttcctgaaaccgctccagctgcaatccctgagaccaaaagaaacgcagagttcctcacctgtaatatacccacatcaaatgcctcaaataacatggtaaccacagaaaaagtggagaatgggcaggaacctgtcataaagttagaaaacaggcaagaggccagaccagaaccagcaagactgaaaccacctgttcattacaatggcccctcaaaagcagggtatgttgactttgaaaatggccagtgggccacagatgacatcccagatgacttgaatagtatccgcgcagcaccaggtgagtttcgagccatcatggagatgccctccttctacagtcatggcttgccacggtgttcaccctacaagaaactgacagagtgccagctgaagaaccccatcagcgggctgttagaatatgcccagttcgctagtcaaacctgtgagttcaacatgatagagcagagtggaccaccccatgaacctcgatttaaattccaggttgtcatcaatggccgagagtttcccccagctgaagctggaagcaagaaagtggccaagcaggatgcagctatgaaagccatgacaattctgctagaggaagccaaagccaaggacagtggaaaatcagaagaatcatcccactattccacagagaaagaatcagagaagactgcagagtcccagacccccaccccttcagccacatccttcttttctgggaagagccccgtcaccacactgcttgagtgtatgcacaaattggggaactcctgcgaattccgtctcctgtccaaagaaggccctgcccatgaacccaagttccaatactgtgttgcagtgggagcccaaactttccccagtgtgagtgctcccagcaagaaagtggcaaagcagatggccgcagaggaagccatgaaggccctgcatggggaggcgaccaactccatggcttctgataaccagcctgaaggtatgatctcagagtcacttgataacttggaatccatgatgcccaacaaggtcaggaagattggcgagctcgtgagatacctgaacaccaaccctgtgggtggccttttggagtacgcccgctcccatggctttgctgctgaattcaagttggtcgaccagtccggacctcctcacgagcccaagttcgtttaccaagcaaaagttgggggtcgctggttcccagccgtctgcgcacacagcaagaagcaaggcaagcaggaagcagcagatgcggctctccgtgtcttgattggggagaacgagaaggcagaacgcatgggtttcacagaggtaaccccagtgacaggggccagtctcagaagaactatgctcctcctctcaaggtccccagaagcacagccaaagacactccctctcactggcagcaccttccatgaccagatagccatgctgagccaccggtgcttcaacactctgactaacagcttccagccctccttgctcggccgcaagattctggccgccatcattatgaaaaaagactctgaggacatgggtgtcgtcgtcagcttgggaacagggaatcgctgtgtgaaaggagattctctcagcctaaaaggagaaactgtcaatgactgccatgcagaaataatctcccggagaggcttcatcaggtttctctacagtgagttaatgaaatacaactcccagactgcgaaggatagtatatttgaacctgctaagggaggagaaaagctccaaataaaaaagactgtgtcattccatctgtatatcagcactgctccgtgtggagatggcgccctctttgacaagtcctgcagcgaccgtgctatggaaagcacagaatcccgccactaccctgtcttcgagaatcccaaacaaggaaagctccgcaccaaggtggagaacggagaaggcacaatccctgtggaatccagtgacattgtgcctacgtgggatggcattcggctcggggagagactccgtaccatgtcctgtagtgacaaaatcctacgctggaacgtgctgggcctgcaaggggcactgttgacccacttcctgcagcccatttatctcaaatctgtcacattgggttaccttttcagccaagggcatctgacccgtgctatttgctgtcgtgtgacaagagatgggagtgcatttgaggatggactacgacatccctttattgtcaaccaccccaaggttggcagagtcagcatatatgattccaaaaggcaatccgggaagactaaggagacaagcgtcaactggtgtctggctgatggctatgacctggagatcctggacggtaccagaggcactgtggatgggccacggaatgaattgtcccgggtctccaaaaagaacatttttcttctatttaagaagctctgctccttccgttaccgcagggatctactgagactctcctatggtgaggccaagaaagctgcccgtgactacgagacggccaagaactacttcaaaaaaggcctgaaggatatgggctatgggaactggattagcaaaccccaggaggaaaagaacttttatctctgcccagtatagtatgctccagtgacagatggattagggtgtgtcatactagggtgtgagagaggtaggtcgtagcattcctcatcacatggtcaggggatttttttttctcctttttttttctttttaagccataattggtgatactgaaaactttgggttcccatttatcctgctttctttgggattgctaggcaaggtctggccaggccccccttttttcccccaagtgaagaggcagaaacctaagaagttatcttttctttctacccaaagcatacatagtcactgagcacctgcggtccatttcctcttaaaagttttgttttgatttgtttccatttcctttccctttgtgtttgctacactgacctcttgcggtcttgattaggtttcagtcaactctggatcatgtcagggactgataatttcatttgtggattacgcagacccctctacttcccctctttcccttctgagattctttccttgtgatctgaatgtctccttttccccctcagagggcaaagaggtgaacataaaggatttggtgaaacatttgtaagggtaggagttgaaaactgcagttcccagtgccacggaagtgtgattggagcctgcagataatgcccagccatcctcccatcctgcactttagccagctgcagggcgggcaaggcaaggaaagctgcttccctggaagtgtatcactttctccggcagctgggaagtctagaaccagccagactgggttaagggagctgctcaagcaatagcagaggtttcacccggcaggatgacacagaccacttcccagggagcacgggcatgccttggaatattgccaagcttccagctgcctcttctcctaaagcattcctaggaatattttccccgccaatgctgggcgtacaccctagccaacgggacaaatcctagagggtataaaatcatctctgctcagataatcatgacttagcaagaataagggcaaaaaatcctgttggcttaacgtcactgttccacccggtgtaatatctctcatgacagtgacaccaagggaagttgactaagtcacatgtaaattaggagtgttttaaagaatgccatagatgttgattcttaactgctacagataacctgtaattgagcagatttaaaattcaggcatacttttccatttatccaagtgctttcatttttccagatggcttcagaagtaggctcgtgggcagggcgcagacctgatctttatagggttgacatagaaagcagtagttgtgggtgaaagggcaggttgtcttcaaactctgtgaggtagaatcctttgtctatacctccatgaacattgactcgtgtgttcagagcctttggcctctctgtggagtctggctctctggctcctgtgcattctttgaatagtcactcgtaaaaactgtcagtgcttgaaactgtttcctttactcatgttgaagggactttgttggcttttagagtgttggtcatgactccaagagcagagcagggaagagcccaagcatagacttggtgccgtggtgatggctgcagtccagttttgtgatgctgcttttacgtgtccctcgataacagtcagctagacacactcaggaggactactgaggctctgcgaccttcaggagctgagcctgcctctctcctttagatgacagaccttcatctgggaacgtgctgagccagcaccctcagatgatttccctccaaactgctgactaggtcatcctctgtctggtagagacattcacatctttgcttttattctatgctctctgtacttttgaccaaaaattgaccaaagtaagaaaatgcaagttctaaaaatagactaaggatgcctttgcagaacaccaaagcatcccaaggaactggtagggaagtggcgcctgtctcctggagtggaagaggcctgctccctggctctgggtctgctgggggcacagtaaatcagtcttggcacccacatccagggcagagaggtctgtggttctcagcatcagaaggcagcgcagcccctctcctcttcaggctacagggttgtcacctgctgagtcctcaggttgtttggcctctctggtccatcttgggcattaggttctccagcagagctctggccagctgcctcttctttaactgggaacacaggctctcacaagatcagaacccccactcacccccaagatcttatctagcaagcctgtagtattcagtttctgttgtaggaagagagcgaggcatccctgaattccacgcatctgctggaaacgagccgtgtcagatcgcacatccctgcgcccccatgcccctctgagtcacacaggacagaggaggcagagcttctgcccactgttatcttcactttctttgtccagtcttttgtttttaataagcagtgaccctccctactcttctttttaatgatttttgtagttgatttgtctgaactgtggctactgtgcattccttgaataatcacttgtaaaaattgtcagtgcttgaagctgtttcctttactcacattgaagggacttcgttggttttttggagtcttggttgtgactccaagagcagagtgaggaagacccccaagcatagactcgggtactgtgatgatggctgcagtccagttttatgattctgcttttatgtgtcccttgataacagtgacttaacaatatacattcctcataaataaaaaaaaaacaagaatctgaattctt

SEQ ID NO: 297197 - DNA, 3810 bp, Artificial Sequence
  derived and/or modified sequence
atgatgagccccatctgtgaccagaccatcgacagccggctgaaggtggagaaggccacctggtggggccgggtgggcggcggcagccggccccactggcagagccctggggtgcggccctgcccagaggaggtgcaggaccccggctacagcctgagcggctactacacccaccccttccagggctatgagcaccggcagctgcgctaccagcagcccggccctggcagcagccccagcagcttcctgctgaagcagatcgagttcctgaagggccagctgcctgaggcccctgtgattggcaagcagacccccagcctgccccccagcctgcccggcctgcggccccgcttccctgtgctgctggccagcagcacccggggccggcaggtggacatccggggcgtgccccggggcgtgcacctgcggagccagggcctgcagaggggcttccagcaccccagcccccggggccgcagcctgccccagaggggcgtggactgcctgagcagccacttccaggagctgagcatctaccaggaccaggagcagaggatcctgaagttcctggaggagctgggggagggcaaggccaccacagcccatgacctgagcggcaagctgggcacccccaagaaggagatcaacagagtgctgtacagcctggccaagaagggcaagctgcagaaggaggccggcaccccacccctgtggaagattgctgtgtccacccaggcctggaaccagcacagcggcgtggtgcggccagatggccacagccagggcgcccccaacagcgaccccagcctggagccagaagatagaaacagcacctctgtgtctgaggacctgctggagcccttcatcgctgtgtctgcccaggcctggaaccagcacagcggcgtggtgcggccagacagccacagccagggcagccccaacagcgaccccggcctggagcctgaggacagcaacagcaccagcgccctggaggaccccctggagttcctggacatggccgagatcaaggagaagatctgtgactacctgttcaacgtgtctgacagcagcgccctgaacctggccaagaacatcggcctgaccaaggcccgggacatcaatgctgtgctgattgacatggagcggcagggagatgtgtaccggcagggcaccaccccacccatctggcacctgacagacaagaagcgggagaggatgcagatcaagaggaacaccaacagcgtgcctgagacagccccagctgccatccctgagaccaagagaaatgctgagttcctgacctgcaacatccccaccagcaatgccagcaacaacatggtgaccacagagaaggtggagaatggccaggagcccgtcatcaagctggagaaccggcaggaggcccggcctgagcccgcccggctgaagccccctgtgcactacaacggccccagcaaggccggctacgtggactttgaaaatggccagtgggccacagatgacatcccagatgacctgaacagcatccgggccgcccctggagagttccgggccatcatggagatgcccagcttctacagccacggcctgccccgctgcagcccctacaagaagctgacagagtgccagctgaagaaccccatcagcggcctgctggagtatgcccagtttgccagccagacctgtgagttcaacatgattgagcagagcggcccccctcatgagccccgcttcaagttccaggtggtgatcaatggccgggagttccccccagctgaggccggcagcaagaaggtggccaagcaggatgctgccatgaaggccatgaccatcctgctggaggaggccaaggccaaggacagcggcaagtctgaggagagcagccactacagcacagagaaggagagcgagaagacagctgagagccagacccccacccccagcgccaccagcttcttcagcggcaagagccctgtgaccaccctgctggagtgcatgcacaagctgggcaacagctgtgagttccggctgctgagcaaggagggccctgcccacgagcccaagttccagtactgtgtggccgtgggcgcccagaccttccccagcgtgtctgcccccagcaagaaggtggccaagcagatggctgctgaggaggccatgaaggccctgcacggggaggccaccaacagcatggccagtgacaaccagcctgagggcatgatcagcgagagcctggacaacctggagagcatgatgcccaacaaggtgaggaagattggagagctggtgcgctacctgaacaccaaccctgtgggcggcctgctggagtatgcccggagccacggctttgctgctgagttcaagctggtggaccagagcggcccccctcatgagcccaagtttgtgtaccaggccaaggtgggcggccgctggttccctgctgtgtgtgcccacagcaagaagcagggcaagcaggaggccgcagatgctgccctgcgggtgctgattggagaaaatgagaaggccgagaggatgggcttcacagaggtgacccctgtgactggagccagcctgcggaggaccatgctgctgctgagccgcagccctgaggcccagcccaagaccctgcccctgaccggcagcaccttccatgaccagatcgccatgctgagccaccgctgcttcaacaccctgaccaacagcttccagcccagcctgctgggcaggaagatcctggccgccatcatcatgaagaaggacagcgaggacatgggcgtggtggtgtccctgggcaccggcaacagatgtgtgaagggggacagcctgagcctgaagggggagaccgtgaatgactgccacgccgagatcatcagcagaagaggcttcatccgcttcctgtacagcgagctgatgaagtacaacagccagacagccaaggacagcatctttgagcccgccaagggcggggagaagctgcagatcaagaagacagtgtccttccacctgtacatcagcacagccccctgtggagatggagccctgtttgacaagagctgcagcgaccgggccatggagagcacagagagccgccactaccctgtgtttgagaaccccaagcagggcaagctgcggaccaaggtggagaatggagagggcaccatccctgtggagagcagtgacatcgtgcccacctgggatggcatccggctgggggagcggctgcggaccatgagctgcagcgacaagatcctgcgctggaatgtgctgggcctgcagggcgccctgctgacccacttcctgcagcccatctacctgaagtctgtgaccctgggctacctgttcagccagggccacctgacccgggccatctgctgccgggtgaccagagatggcagcgcctttgaagatggcctgcggcaccccttcatcgtgaaccaccccaaggtgggccgggtgtccatctatgacagcaagaggcagagcggcaagaccaaggagacctctgtgaactggtgcctggctgatggctatgacctggagatcctggatggcacccggggcaccgtggatggccccagaaatgagctgagccgggtgtccaagaagaacatcttcctgctcttcaagaagctgtgcagcttccgctacagaagagacctgctgcggctgtcctatggagaggccaagaaggccgcccgggactatgaaacagccaagaactacttcaagaagggcctgaaggacatgggctacggcaactggatcagcaagccccaggaggagaagaacttctacctgtgccctgtgtag

SEQ ID NO: 297198 - DNA, 3810 bp, Artificial Sequence
  derived and/or modified sequence
atgatgagccccatctgcgaccagaccatcgacagccggctgaaggtggaaaaagctacttggtggggtcgcgtaggcggcggcagcagaccacattggcagagccctggtgtgaggccatgcccagaggaagttcaggaccccggatacagcctgtcaggctattatacacaccctttccagggatacgagcaccgccagctgcgctaccagcagcccgggccaggaagttcgccttcctccttcctgctgaagcagatcgagtttctcaaaggtcagctgcctgaagctcccgttatcggcaagcaaacaccaagcttacctcctagtcttccagggctgcggccccggtttccggtgcttctcgcctcaagcacaaggggtcgccaagtggatattcgcggcgtgcctcgaggcgtacatcttaggtcccaaggattacagcgtgggtttcaacacccttcacctagaggaagatcactgcctcagcggggcgtagattgcttatccagccactttcaggaactgagtatataccaggaccaggagcagcgtatccttaaatttcttgaagagttgggtgaggggaaggctacaactgcgcacgatctatctggcaagctggggacacctaagaaggagatcaatagagtgctgtatagcttggctaaaaagggcaagctgcaaaaggaggccggtaccccaccactgtggaaaattgcggtgtctacacaggcttggaatcagcattctggcgtagtccgcccagatggtcatagccaaggagcacccaactctgacccctctcttgaacccgaagacagaaactcgacttccgtttctgaggaccttctggagccctttatcgcggtatctgcccaggcgtggaaccagcactccggagtggttagacctgactctcacagccaaggatccccaaacagtgacccaggtctcgaacctgaggattcaaactctacatccgccctcgaggatcctctggagttcctagacatggcagaaatcaaagagaaaatctgcgattacctgtttaatgtcagtgacagctccgccctcaatctggctaagaacatcggactgactaaagcccgggacatcaatgctgttttaatcgatatggagagacagggagacgtgtaccgtcagggtacaacaccacccatctggcacttgactgataaaaagcgggagaggatgcagattaagcggaacaccaattctgttccagagacagcccctgctgcaatcccagaaaccaaaaggaatgccgaattcctgacgtgtaacattccgacaagtaatgcttccaacaacatggtgacgaccgaaaaagtcgagaacggccaagagcccgtaattaagctggagaacaggcaggaggccaggcccgaaccagctcgacttaaaccgcccgtccattacaacggtcccagcaaagctggttacgtcgatttcgaaaacggccaatgggccaccgatgacatccccgatgatctaaatagtattagagctgcccccggcgagtttcgggccatcatggaaatgccttcgttctacagccacggcttgcccaggtgtagtccgtataagaagctgaccgagtgtcagttgaagaatcctatatcgggactgctagaatacgcacagttcgcatctcagacctgtgagtttaacatgatcgagcaatctggcccacctcatgagccccgctttaaattccaagtagtcattaatggaagagagtttcctccggcggaagctggcagcaagaaggttgcgaaacaggacgccgccatgaaggcaatgactattctgttagaggaagccaaggcaaaggattctggaaagagtgaggagtccagccactactcaacagaaaaagagtcggaaaagactgcagagtcacagaccccaacccctagcgcgacgtctttcttctctggaaagtcccccgtgactacattactggaatgcatgcacaagctgggcaacagctgtgaattccgactcctgagcaaagaaggcccagcccacgaacctaaattccaatactgcgtggcagtcggagcacagaccttcccttccgtttctgccccttctaaaaaagtggccaagcagatggcagccgaggaagccatgaaggcgctccatggggaggccaccaactccatggccagtgacaaccagccagagggcatgatctccgagtcattagacaatctggaatctatgatgcccaacaaagtgcggaagattggtgaattggtgcggtatttgaatacaaaccctgtgggcgggctgctagaatacgccaggtcccacggattcgctgccgagttcaaactggtcgatcaaagcggccctcctcatgagcctaagtttgtatatcaggccaaggtgggaggccgctggttccccgcggtatgtgcccattccaaaaaacaaggaaaacaagaagcagcagacgccgcattgcgcgtgcttattggggagaacgagaaagccgaaaggatgggctttaccgaggtgactcctgtgacaggggcaagcctccggcgaactatgctcctactgagtagatcacccgaggcacagcccaaaactctgcccttaaccgggtcaacgttccacgatcagattgccatgctttctcatcgctgtttcaatactctgacaaattctttccagccctcactgctgggccgcaagatcttggcggctattatcatgaagaaggattcagaagatatgggcgtcgtggtctccttgggaaccggcaatcgctgcgtgaagggggattctctttcactgaaaggtgagactgtcaacgattgtcacgctgaaatcatcagtcgccgcggatttatcaggtttctgtacagtgagctcatgaagtacaattctcagacagccaaggattctatctttgaaccagcgaagggaggcgagaaactgcagatcaaaaagaccgttagtttccacctgtacatctctacggcaccatgcggagacggggcactgtttgataagagctgtagcgacagagccatggagtcaaccgagagtcgccactaccccgtttttgaaaatccaaaacagggcaagttgcggacaaaggtcgaaaacggtgaagggaccatcccagttgagagctcagatatcgtcccaacctgggacggcattcggttgggcgagcggttgcggaccatgtcctgctccgacaaaattttacggtggaacgtgctaggcttgcagggcgcattactcacccattttctgcagccgatttacctcaagtcagtcacactgggctacctatttagtcaggggcacctaacacgcgcaatctgttgccgggtcactcgtgacggctctgctttcgaggacggcctgcgccatcccttcatcgtgaatcaccctaaagttggaagagtttccatctatgattctaagcgccagagcggaaagacaaaggagaccagtgttaattggtgcctcgctgatggttatgacctggagattctggatggtactagagggaccgtcgatggcccccggaacgagttgtcccgagtcagcaaaaaaaatatcttcctgctgttcaagaaactgtgttcattcagatatcgacgagatctcttacgactgtcttacggagaagccaaaaaggccgccagggactacgaaaccgccaaaaactactttaaaaagggtctgaaagatatggggtatggcaattggatctcaaagccacaggaagagaaaaacttctatctttgccctgtgtag

SEQ ID NO: 297199 - DNA, 3810 bp, Artificial Sequence
  derived and/or modified sequence
atgatgagcccgatctgcgaccagaccattgacagcagactcaaagtcgaaaaagccacttggtggggcagggtcggagggggtagccgcccacactggcagtcccctggggtgcggccatgtcctgaagaggtgcaggaccccggatactccctgtccggatattacacccacccattccaaggttacgagcaccgccagttgcggtaccaacagccgggacccggttcttccccatcgagctttctgctcaagcaaattgaatttctgaaagggcagctgccggaagcaccggtgattggcaaacagactccttcgctccccccttcactccccggattgaggcctcgctttcctgttcttctcgcttcatccacacgcggtcgacaggtcgatatcaggggcgtcccccgaggggtgcacttaaggagccagggactgcagcgtggctttcagcacccatcccctaggggcaggagcctacctcagcggggtgtcgattgtctgtcctctcattttcaggaactctctatttaccaggatcaagaacagcgtattcttaaatttttggaggaactcggagagggaaaagccacaacagctcatgacttgagcggcaaactgggcaccccaaagaaggagataaacagggtgctgtactctttggccaagaaaggcaaactgcagaaggaggccggtaccccacccctgtggaaaattgctgtcagtactcaagcttggaatcaacactctggcgtggtcaggccagatggccatagccagggtgcacctaattctgatccatctcttgagccagaagatcggaacagcacctcagtctctgaggatctgctagaacccttcatcgctgtttccgcccaggcgtggaaccagcactccggtgttgtgaggcccgactcccactcccagggctctcctaatagtgaccccggacttgagccagaagatagtaatagtacatctgcccttgaagacccgttggagttcctagacatggccgagatcaaggaaaagatctgtgactatctgttcaacgtcagcgattcttctgccctaaacttggccaaaaacataggtctgacaaaggcacgggatatcaacgctgtcctgatcgacatggaacgccagggagatgtatatcgccaggggacaactcccccaatctggcacctgacagacaaaaagcgtgagcgcatgcagatcaaacgaaacacaaattctgtccccgagactgcccctgccgcaattcctgagacgaaaagaaacgccgaatttctgacttgcaacattccaacatcaaacgcctcaaacaacatggtgacaactgagaaagtcgagaacggccaggaaccagtgatcaagctggaaaaccgccaggaggccaggcccgaacccgctagactcaaacctccagttcactataacgggccaagcaaagccggttatgtcgattttgagaatggtcagtgggccaccgatgacatccctgacgatctgaattccatccgtgcagccccaggcgagtttagagccataatggagatgccctccttttatagccatggtcttcccagatgtagcccttataaaaagctgacagaatgtcaacttaagaacccaattagcggcctactggagtatgcccaattcgcatctcaaacctgcgagtttaacatgattgaacagagcggcccaccccacgagcccagattcaagtttcaagttgtgattaacggcagggagttcccaccggcagaagctggctccaagaaggtggcaaaacaagacgccgctatgaaggcgatgaccatactgctggaggaggcaaaggctaaggatagcgggaaatccgaggaatcatctcattatagtacggagaaggagtccgagaagactgcagagtctcaaactcccacaccaagtgctactagcttcttcagcggcaagagcccagtcactaccctcttggagtgcatgcacaaacttgggaactcttgtgagtttcggctgctgagtaaggaaggaccggctcacgaaccaaaattccagtactgcgttgccgtaggcgctcaaacctttccgtctgtgtctgccccttctaagaaggtcgctaagcagatggcggcagaggaagcaatgaaggccctccatggtgaagctactaattccatggcctccgacaatcaacccgaggggatgatcagcgagtcacttgataatctggaaagtatgatgcccaacaaagtgaggaagataggagaactggtgcgatacctaaacactaaccccgtggggggactgctggaatatgccagatcccatggattcgctgctgagtttaagctggtcgaccagtcggggcctccccatgagcccaagtttgtgtaccaggccaaagtgggcggaagatggttccccgctgtttgcgctcactcaaagaaacaggggaagcaggaagccgctgatgcagccctgcgtgtgctgattggtgagaacgagaaggctgagagaatgggcttcacagaggtcacgccggtgacaggtgctagtctcagacgaaccatgcttctgcttagccggtcaccggaggctcagccaaagaccctgccccttacaggcagcacctttcacgaccagatcgccatgctgagccataggtgtttcaataccctcactaattcattccagccgagtctgctgggtagaaagatactggctgctatcattatgaagaaagattccgaagatatgggcgttgtggtttccctgggcaccgggaacaggtgtgtcaaaggcgactctttatccttgaagggcgaaactgttaacgattgccatgccgagatcatatcccggagaggatttattcggtttctttacagcgagctgatgaagtataattctcagaccgctaaagattcaattttcgaaccagccaaaggtggtgaaaagttacagatcaagaaaacagtgtcttttcacttgtacatctccacggctccatgcggggatggagccttatttgacaaatcttgtagcgatcgggcaatggagtccacagaaagccgtcactaccctgtgttcgagaaccctaagcagggtaaattacgcaccaaggtggagaacggagaagggaccataccagttgaatcttctgacattgtccctacctgggatgggatacgcctaggcgaacgcctgaggaccatgagttgcagcgataagattctgaggtggaacgtgctcggattacagggcgctttgctcacccactttttgcagcccatatacctgaaaagtgtcacactgggatatcttttttctcagggacacctgacgagagctatctgttgccgtgtgactcgggacggctccgcgttcgaagacggcctgcgacatccctttattgtcaaccatcccaaagtgggacgcgtgtccatctatgactcaaaacgccaatcaggaaagacaaaagaaacttccgttaactggtgcctcgcggacgggtatgacctcgagatattggacggtacacgtgggaccgtggatggacctcggaatgagctcagcagagtttccaaaaaaaatatcttcctgctgttcaagaaactctgctcctttcgataccgcagagatctcctgcggctgtcgtatggggaagccaaaaaggcggctcgtgactatgaaaccgccaagaactacttcaagaagggtttgaaagacatgggttatggcaactggattagcaaacctcaggaggaaaaaaatttctacttatgccccgtgtag

SEQ ID NO: 297200 - DNA, 3810 bp, Artificial Sequence
  derived and/or modified sequence
atgatgagccccatctgcgaccagaccatcgacagcagactgaaggtggagaaggccacctggtggggcagagtgggcggcggcagcagaccccactggcagagccccggcgtgagaccctgccccgaggaggtgcaggaccccggctacagcctgagcggctactacacccaccccttccagggctacgagcacagacagctgagataccagcagcccggccccggcagcagccccagcagcttcctgctgaagcagatcgagttcctgaagggccagctgcccgaggcccccgtgatcggcaagcagacccccagcctgccccccagcctgcccggcctgagacccagattccccgtgctgctggccagcagcaccagaggcagacaggtggacatcagaggcgtgcccagaggcgtgcacctgagaagccagggcctgcagagaggcttccagcaccccagccccagaggcagaagcctgccccagagaggcgtggactgcctgagcagccacttccaggagctgagcatctaccaggaccaggagcagagaatcctgaagttcctggaggagctgggcgagggcaaggccaccaccgcccacgacctgagcggcaagctgggcacccccaagaaggagatcaacagagtgctgtacagcctggccaagaagggcaagctgcagaaggaggccggcaccccccccctgtggaagatcgccgtgagcacccaggcctggaaccagcacagcggcgtggtgagacccgacggccacagccagggcgcccccaacagcgaccccagcctggagcccgaggacagaaacagcaccagcgtgagcgaggacctgctggagcccttcatcgccgtgagcgcccaggcctggaaccagcacagcggcgtggtgagacccgacagccacagccagggcagccccaacagcgaccccggcctggagcccgaggacagcaacagcaccagcgccctggaggaccccctggagttcctggacatggccgagatcaaggagaagatctgcgactacctgttcaacgtgagcgacagcagcgccctgaacctggccaagaacatcggcctgaccaaggccagagacatcaacgccgtgctgatcgacatggagagacagggcgacgtgtacagacagggcaccaccccccccatctggcacctgaccgacaagaagagagagagaatgcagatcaagagaaacaccaacagcgtgcccgagaccgcccccgccgccatccccgagaccaagagaaacgccgagttcctgacctgcaacatccccaccagcaacgccagcaacaacatggtgaccaccgagaaggtggagaacggccaggagcccgtgatcaagctggagaacagacaggaggccagacccgagcccgccagactgaagccccccgtgcactacaacggccccagcaaggccggctacgtggacttcgagaacggccagtgggccaccgacgacatccccgacgacctgaacagcatcagagccgcccccggcgagttcagagccatcatggagatgcccagcttctacagccacggcctgcccagatgcagcccctacaagaagctgaccgagtgccagctgaagaaccccatcagcggcctgctggagtacgcccagttcgccagccagacctgcgagttcaacatgatcgagcagagcggccccccccacgagcccagattcaagttccaggtggtgatcaacggcagagagttcccccccgccgaggccggcagcaagaaggtggccaagcaggacgccgccatgaaggccatgaccatcctgctggaggaggccaaggccaaggacagcggcaagagcgaggagagcagccactacagcaccgagaaggagagcgagaagaccgccgagagccagacccccacccccagcgccaccagcttcttcagcggcaagagccccgtgaccaccctgctggagtgcatgcacaagctgggcaacagctgcgagttcagactgctgagcaaggagggccccgcccacgagcccaagttccagtactgcgtggccgtgggcgcccagaccttccccagcgtgagcgcccccagcaagaaggtggccaagcagatggccgccgaggaggccatgaaggccctgcacggcgaggccaccaacagcatggccagcgacaaccagcccgagggcatgatcagcgagagcctggacaacctggagagcatgatgcccaacaaggtgagaaagatcggcgagctggtgagatacctgaacaccaaccccgtgggcggcctgctggagtacgccagaagccacggcttcgccgccgagttcaagctggtggaccagagcggccccccccacgagcccaagttcgtgtaccaggccaaggtgggcggcagatggttccccgccgtgtgcgcccacagcaagaagcagggcaagcaggaggccgccgacgccgccctgagagtgctgatcggcgagaacgagaaggccgagagaatgggcttcaccgaggtgacccccgtgaccggcgccagcctgagaagaaccatgctgctgctgagcagaagccccgaggcccagcccaagaccctgcccctgaccggcagcaccttccacgaccagatcgccatgctgagccacagatgcttcaacaccctgaccaacagcttccagcccagcctgctgggcagaaagatcctggccgccatcatcatgaagaaggacagcgaggacatgggcgtggtggtgagcctgggcaccggcaacagatgcgtgaagggcgacagcctgagcctgaagggcgagaccgtgaacgactgccacgccgagatcatcagcagaagaggcttcatcagattcctgtacagcgagctgatgaagtacaacagccagaccgccaaggacagcatcttcgagcccgccaagggcggcgagaagctgcagatcaagaagaccgtgagcttccacctgtacatcagcaccgccccctgcggcgacggcgccctgttcgacaagagctgcagcgacagagccatggagagcaccgagagcagacactaccccgtgttcgagaaccccaagcagggcaagctgagaaccaaggtggagaacggcgagggcaccatccccgtggagagcagcgacatcgtgcccacctgggacggcatcagactgggcgagagactgagaaccatgagctgcagcgacaagatcctgagatggaacgtgctgggcctgcagggcgccctgctgacccacttcctgcagcccatctacctgaagagcgtgaccctgggctacctgttcagccagggccacctgaccagagccatctgctgcagagtgaccagagacggcagcgccttcgaggacggcctgagacaccccttcatcgtgaaccaccccaaggtgggcagagtgagcatctacgacagcaagagacagagcggcaagaccaaggagaccagcgtgaactggtgcctggccgacggctacgacctggagatcctggacggcaccagaggcaccgtggacggccccagaaacgagctgagcagagtgagcaagaagaacatcttcctgctgttcaagaagctgtgcagcttcagatacagaagagacctgctgagactgagctacggcgaggccaagaaggccgccagagactacgagaccgccaagaactacttcaagaagggcctgaaggacatgggctacggcaactggatcagcaagccccaggaggagaagaacttctacctgtgccccgtgtag

SEQ ID NO: 297201 - DNA, 3588 bp, Artificial Sequence
  derived and/or modified sequence
gggtattctctgtccggatactacacccatccattccaaggctatgaacacaggcagctgaggtaccagcaacctggacctggctcttccccttcttctttcctcctgaagcagatagaatttctgaagggccagctccccgaagccccggttattgggaaacaaaccccctccttgcctccaagcctccctggactccgcccacgctttcccgttctcctggcaagctcaacaagaggccggcaggtggatatccgcggagtccccaggggggtccatctacggagtcagggcctgcagaggggatttcagcacccttctcccagagggcgctctctccctcaacgcggagtcgactgcctgagcagtcacttccaagaactctcaatataccaggatcaggagcagaggatcctgaagttcttggaggagctcggagaaggaaaggccacaacagcccacgacctcagcggcaagttaggaaccccaaaaaaggagataaacagggtgctctacagtctggctaagaaaggaaagctgcagaaagaggcagggacaccacccctctggaagatcgcggtgtctactcaagcttggaatcagcattctggggtcgtgcggcctgacggccactcccaaggtgcacctaattctgatccaagtctggagcccgaagataggaatagcaccagcgtctcagaggacctcttggagccattcatcgccgtcagcgcccaggcctggaatcagcactcaggcgtcgtgcggcccgattcccattcacagggaagccctaacagcgatcccggactcgagccggaggacagcaattcaacttccgcactggaggacccgctggagttcttagacatggcagagattaaggaaaaaatctgtgactatctgttcaacgtgagtgacagtagcgctctgaatttggccaaaaacatcggcctgacaaaggctagagatatcaatgctgtgctgatagatatggagaggcaaggagacgtatataggcagggaactacaccccccatttggcacctaaccgacaaaaaaagggaaagaatgcagattaaaagaaataccaattccgtgccagagaccgcaccagccgctattcccgagacaaagcgaaatgcagagttcctgacatgcaacatacccacctcaaacgcgtccaacaacatggtgacaactgagaaggttgaaaacggccaagagccagtcataaaactggaaaacaggcaagaggcccggcctgagccggcccgactaaagccacccgtgcactataatggtccaagtaaggctggatacgtcgatttcgagaacggacagtgggctacagacgatatccctgatgacctgaactcaattcgcgcagctcccggtgaattccgtgctattatggagatgccgtcattttactcacacggattgccaagatgcagcccttacaaaaaattgacagaatgtcaactgaaaaatccaattagcggactcctggagtatgctcagtttgcatcccagacatgcgagtttaatatgattgagcaaagcgggccccctcatgaaccacgcttcaagttccaggtcgtcatcaatggacgagaattccctcccgctgaggccgggtcaaagaaggtggccaagcaggatgccgctatgaaagccatgactattctgctggaagaggctaaggcaaaggacagcgggaagagcgaggagagctcacattatagcaccgaaaaggaatccgaaaaaaccgccgagtcccagacgccaaccccatcagctacctcctttttttcaggcaagtcacctgtgaccacactcttagagtgtatgcataaacttggaaattcctgcgaattcaggctgctcagtaaagagggtcccgcacacgagcccaaatttcagtactgcgtggctgtgggagcacagaccttcccctctgtctcagctccgagcaaaaaagtcgccaagcagatggcagctgaagaagcgatgaaagccctccacggcgaggccacaaacagcatggcttctgacaaccaaccagaaggaatgatatcggagtcgctggataacctggaaagtatgatgcctaataaagttagaaagatcggagaactcgtcagataccttaacaccaatcctgtgggtggacttttggagtacgcacggtcccatggcttcgcggcagaatttaagctggtcgaccaaagtgggccaccccatgagcctaagtttgtctatcaggccaaagtaggtggacgttggttccctgcggtctgtgcacacagcaagaaacaaggtaaacaagaggcagccgatgccgcactgagagttctgatcggggaaaacgaaaaggcagaaagaatgggcttcacagaactcccactaactggatccaccttccacgaccagatcgccatgctgagccaccgatgctttaataccctaaccaattcctttcagccaagcctgctgggtaggaagatactagccgctattattatgaagaaagacagcgaggacatgggtgtagtggtcagccttgggaccggaaatagatgcgtgaagggcgactcactaagccttaagggtgagacagtgaacgactgccatgccgaaatcatcagtaggcgcggcttcattcggttcctgtatagcgaactcatgaaatacaattcccagaccgcaaaggacagtatctttgagccagccaagggaggcgagaaattgcagattaaaaaaactgtgagtttccacttgtatatttccaccgcaccctgcggcgatggcgctttgttcgacaagagctgctctgacagagcgatggaaagtacggaatcccgacactatcctgtatttgaaaatcccaaacagggcaaattgcggacaaaagtagaaaatggagagggtactatccccgttgagagtagtgacatcgtcccgacctgggatgggattcgcctgggggagcgtcttaggaccatgtcatgttccgataaaatcctgagatggaacgtgctcggactgcagggcgccttgctgacccacttcctacaacccatctacctgaagtccgtcacgctcggatacctgttcagccagggccatctgacccgggccatctgttgccgagtcactcgcgacggttcagcgtttgaggatggactgcggcacccgtttatcgtcaaccatcctaaggttggaagggtctccatctacgacagcaaacggcagtcagggaagacaaaggagacctctgtcaattggtgtctcgccgatgggtacgatcttgagattctggacgggacacggggaactgtcgatggccccaggaacgaactctccagggtatccaaaaaaaacatattcctcctgtttaagaagctgtgttccttccggtaccggcgagacctgctgcgactctcttatggcgaggccaagaaagctgcccgggactatgaaactgcaaaaaattattttaaaaagggtctcaaggacatgggttatggcaattggataagtaaacctcaggaggagaagaacttttatttatgccccgtttag

SEQ ID NO: 297202 - DNA, 3588 bp, Artificial Sequence
  derived and/or modified sequence
ggctacagcctgagcggctactacacccaccccttccagggctatgagcaccggcagctgcgctaccagcagcccggccctggcagcagccccagcagcttcctgctgaagcagatcgagttcctgaagggccagctgcctgaggcccctgtgattggcaagcagacccccagcctgccccccagcctgcccggcctgcggccccgcttccctgtgctgctggccagcagcacccggggccggcaggtggacatccggggcgtgccccggggcgtgcacctgcggagccagggcctgcagaggggcttccagcaccccagcccccggggccgcagcctgccccagaggggcgtggactgcctgagcagccacttccaggagctgagcatctaccaggaccaggagcagaggatcctgaagttcctggaggagctgggggagggcaaggccaccacagcccatgacctgagcggcaagctgggcacccccaagaaggagatcaacagagtgctgtacagcctggccaagaagggcaagctgcagaaggaggccggcaccccacccctgtggaagattgctgtgtccacccaggcctggaaccagcacagcggcgtggtgcggccagatggccacagccagggcgcccccaacagcgaccccagcctggagccagaagatagaaacagcacctctgtgtctgaggacctgctggagcccttcatcgctgtgtctgcccaggcctggaaccagcacagcggcgtggtgcggccagacagccacagccagggcagccccaacagcgaccccggcctggagcctgaggacagcaacagcaccagcgccctggaggaccccctggagttcctggacatggccgagatcaaggagaagatctgtgactacctgttcaacgtgtctgacagcagcgccctgaacctggccaagaacatcggcctgaccaaggcccgggacatcaatgctgtgctgattgacatggagcggcagggagatgtgtaccggcagggcaccaccccacccatctggcacctgacagacaagaagcgggagaggatgcagatcaagaggaacaccaacagcgtgcctgagacagccccagctgccatccctgagaccaagagaaatgctgagttcctgacctgcaacatccccaccagcaatgccagcaacaacatggtgaccacagagaaggtggagaatggccaggagcccgtcatcaagctggagaaccggcaggaggcccggcctgagcccgcccggctgaagccccctgtgcactacaacggccccagcaaggccggctacgtggactttgaaaatggccagtgggccacagatgacatcccagatgacctgaacagcatccgggccgcccctggagagttccgggccatcatggagatgcccagcttctacagccacggcctgccccgctgcagcccctacaagaagctgacagagtgccagctgaagaaccccatcagcggcctgctggagtatgcccagtttgccagccagacctgtgagttcaacatgattgagcagagcggcccccctcatgagccccgcttcaagttccaggtggtgatcaatggccgggagttccccccagctgaggccggcagcaagaaggtggccaagcaggatgctgccatgaaggccatgaccatcctgctggaggaggccaaggccaaggacagcggcaagtctgaggagagcagccactacagcacagagaaggagagcgagaagacagctgagagccagacccccacccccagcgccaccagcttcttcagcggcaagagccctgtgaccaccctgctggagtgcatgcacaagctgggcaacagctgtgagttccggctgctgagcaaggagggccctgcccacgagcccaagttccagtactgtgtggccgtgggcgcccagaccttccccagcgtgtctgcccccagcaagaaggtggccaagcagatggctgctgaggaggccatgaaggccctgcacggggaggccaccaacagcatggccagtgacaaccagcctgagggcatgatcagcgagagcctggacaacctggagagcatgatgcccaacaaggtgaggaagattggagagctggtgcgctacctgaacaccaaccctgtgggcggcctgctggagtatgcccggagccacggctttgctgctgagttcaagctggtggaccagagcggcccccctcatgagcccaagtttgtgtaccaggccaaggtgggcggccgctggttccctgctgtgtgtgcccacagcaagaagcagggcaagcaggaggccgcagatgctgccctgcgggtgctgattggagaaaatgagaaggccgagaggatgggcttcacagagctgcccctgaccggcagcaccttccatgaccagatcgccatgctgagccaccgctgcttcaacaccctgaccaacagcttccagcccagcctgctgggcaggaagatcctggccgccatcatcatgaagaaggacagcgaggacatgggcgtggtggtgtccctgggcaccggcaacagatgtgtgaagggggacagcctgagcctgaagggggagaccgtgaatgactgccacgccgagatcatcagcagaagaggcttcatccgcttcctgtacagcgagctgatgaagtacaacagccagacagccaaggacagcatctttgagcccgccaagggcggggagaagctgcagatcaagaagacagtgtccttccacctgtacatcagcacagccccctgtggagatggagccctgtttgacaagagctgcagcgaccgggccatggagagcacagagagccgccactaccctgtgtttgagaaccccaagcagggcaagctgcggaccaaggtggagaatggagagggcaccatccctgtggagagcagtgacatcgtgcccacctgggatggcatccggctgggggagcggctgcggaccatgagctgcagcgacaagatcctgcgctggaatgtgctgggcctgcagggcgccctgctgacccacttcctgcagcccatctacctgaagtctgtgaccctgggctacctgttcagccagggccacctgacccgggccatctgctgccgggtgaccagagatggcagcgcctttgaagatggcctgcggcaccccttcatcgtgaaccaccccaaggtgggccgggtgtccatctatgacagcaagaggcagagcggcaagaccaaggagacctctgtgaactggtgcctggctgatggctatgacctggagatcctggatggcacccggggcaccgtggatggccccagaaatgagctgagccgggtgtccaagaagaacatcttcctgctcttcaagaagctgtgcagcttccgctacagaagagacctgctgcggctgtcctatggagaggccaagaaggccgcccgggactatgaaacagccaagaactacttcaagaagggcctgaaggacatgggctacggcaactggatcagcaagccccaggaggagaagaacttctacctgtgccctgtgtag

SEQ ID NO: 297203 - DNA, 3588 bp, Artificial Sequence
  derived and/or modified sequence
ggctacagcctgagcggctactacacccaccccttccagggctacgagcatcgccagctgcgctatcaacagcccggacctgggtcctccccatcaagcttcctgctcaaacagatcgaattcttaaaaggacagcttcccgaagctccagtgattgggaagcaaacccccagtctgcccccttccctcccaggcttgcgtccgcgcttccctgtgttgcttgcgtcctccacacgggggcgccaggttgatatccgcggagtaccacggggggtccatctgagaagccagggcctacagcgcggcttccagcacccaagcccacgcggaaggtcactcccccagcggggagtggattgcttgtctagtcacttccaggagctgtctatctatcaggatcaggaacagcgcattttgaaattcctcgaggagttaggagaaggcaaagctactacagctcatgatctcagcggcaagcttggcacccccaagaaggaaatcaacagagtcctgtactcacttgctaagaaggggaaactgcagaaggaagctggcacacccccattgtggaagatcgctgttagtactcaggcgtggaatcaacattccggcgtagtgagacctgatgggcattcccagggcgcacccaatagcgacccatccttggagccggaagaccgaaacagcacctccgtatctgaagatttgttagagcccttcatagccgtgtccgctcaggcatggaaccagcactccggcgttgtccgcccagacagccactctcagggcagccccaattcagacccaggactcgaacctgaagacagcaatagcacttccgccctcgaggatccgttagagttcctggatatggcagaaatcaaggaaaaaatttgcgactatctgtttaacgtgagcgactcgtctgccctaaacctggccaaaaatattgggcttaccaaggctagagatatcaatgccgttctgattgatatggagagacaaggagacgtttacagacaagggactactccaccaatttggcatctgacagacaaaaagagggagcggatgcaaattaagaggaatactaacagtgtccctgagaccgctcccgccgcaatcccagagaccaaaaggaacgccgagttcctgacctgcaacatccctacctccaatgctagtaataacatggttacaactgagaaggtagagaacgggcaggagcctgtcatcaaacttgagaaccgacaggaggcaagaccagaacccgctaggctcaaacctccagttcactacaacggcccttccaaagcaggttatgtggactttgagaatggacagtgggcgaccgacgatatacctgacgacctgaacagtatcagggctgctccgggagagttccgcgctattatggaaatgcccagcttttacagccatggtctcccacgatgcagcccttataagaagttaactgaatgtcagctcaaaaacccaatatccggactcctcgaatatgcccaatttgcgagccaaacgtgtgagtttaatatgatagagcagtctggcccaccgcatgagcctcgattcaagttccaggtcgttatcaacggtcgcgaattcccccctgctgaagccggctcaaaaaaggtggccaagcaagacgctgctatgaaagccatgacaatcctcctcgaagaggccaaagccaaagactctggaaagagcgaagagtcttcccattattcaacagaaaaagaatctgagaaaacggcagaatctcagacgccgactccgagcgcaacttccttttttagcggcaaatccccggtaaccacgttgctggaatgtatgcataaattaggcaacagctgcgagttccgcctgctttctaaggaaggccctgcccatgaaccgaagtttcagtactgcgtggccgtgggcgcccaaaccttcccctccgtgagcgcaccctcgaaaaaggtagctaaacagatggccgcggaggaggctatgaaggccttgcacggggaagctactaactctatggcctccgacaaccagcccgagggaatgattagtgagagtctggacaatttagagagtatgatgccaaataaggtgcggaagattggcgaactcgtgagatatctgaacacaaacccagtaggcggcctactcgagtacgctaggtctcatgggttcgccgctgagtttaagctcgtagatcagagcggaccaccccacgaaccaaagtttgtgtatcaggcgaaggttggcggaagatggttccctgctgtctgcgcccattctaagaaacagggcaagcaagaggctgcggatgccgcactgcgggttttaattggcgagaacgaaaaggccgagcggatgggcttcaccgagttgcctctcacaggctccaccttccatgatcagatcgccatgttgagccatcgatgctttaacaccctcacaaacagtttccaaccgtcccttctgggtagaaaaatcctggctgctatcatcatgaagaaagactcagaggacatgggcgtggtggtgtccctcgggaccgggaacagatgcgtgaaaggagatagcttaagcctcaaaggtgagaccgtcaatgattgtcatgccgagatcataagccgcaggggcttcattcggttcttgtattcagaactgatgaagtataacagccagacagctaaagactctatcttcgagcctgcaaaggggggcgagaagttgcagattaagaaaacagtgagcttccatctgtacatctctaccgctccttgcggcgacggcgcattatttgataaatcttgttctgatagagctatggagagcactgagagccggcactaccccgtatttgaaaatccgaagcagggcaaactgagaacgaaagttgagaatggcgaggggacaatcccagtggagtcatcagatatagtccccacttgggacggcattcgccttggagagcgtctccgcaccatgagttgctccgacaagatcctccggtggaacgtccttggcctgcagggcgccttgctgactcacttcctccagcccatctatttaaagagcgtcacgttaggatacctgttttcacagggccatctgactcgggccatctgttgtcgcgtgaccagagatggttctgctttcgaagatgggttaaggcatcccttcatcgttaaccatccaaaggtcggacgcgtatctatctatgatagtaaaagacagtctggcaagactaaagagacttctgtgaactggtgccttgccgatggctatgacctggagattctggacggaactaggggcaccgtggacggtcctcgaaatgagctaagtagggtatcaaaaaagaatatatttctgctgttcaaaaagctgtgctcctttcgatacagacgggacctgttgagactgtcatacggtgaggcaaagaaagccgctcgcgactacgagactgcaaagaattattttaagaaaggcttgaaagacatggggtatggaaactggatctctaaaccccaggaggagaagaacttctacttgtgcccagtgtag

SEQ ID NO: 297204 - DNA, 3585 bp, Artificial Sequence
  derived and/or modified sequence
gggtattccctcagcggatactacacccatccatttcaaggctatgagcacagacagctcaggtaccagcagcctgggccaggatcttcccccagtagtttcctgcttaagcaaatagaatttctcaaggggcagctcccagaagcaccggtgattggaaagcagacaccgtcactgccaccttccctcccaggactccggccaaggtttccagtactacttgcctccagtaccagaggcaggcaagtggacatcaggggtgtccccaggggcgtgcatctcagaagtcaggggctccagagagggttccagcatccttcaccacgtggcaggagtctgccacagagaggtgttgattgcctttcctcacatttccaggaactgagtatctaccaagatcaggaacaaaggatcttaaagttcctggaagagcttggggaagggaaggccaccacagcacatgatctgtctgggaaacttgggactccgaagaaagaaatcaatcgagttttatactccctggcaaagaagggcaagctacagaaagaggcaggaacaccccctttgtggaaaatcgcggtctccactcaggcttggaaccagcacagcggagtggtaagaccagacggtcatagccaaggagccccaaactcagacccgagtttggaaccggaagacagaaactccacatctgtctcagaagatcttcttgagccttttattgcagtctcagctcaggcttggaaccagcacagcggagtggtaagaccagacagtcatagccaaggatccccaaactcagacccaggtttggaacctgaagacagcaactccacatctgccttggaagatcctcttgagtttttagacatggccgagatcaaggagaaaatctgcgactatctcttcaatgtgtctgactcctctgccctgaatttggctaaaaatattggccttaccaaggcccgagatataaatgctgtgctaattgacatggaaaggcagggggatgtctatagacaagggacaacccctcccatatggcatttgacagacaagaagcgagagaggatgcaaatcaagagaaatacgaacagtgttcctgaaaccgctccagctgcaatccctgagaccaaaagaaacgcagagttcctcacctgtaatatacccacatcaaatgcctcaaataacatggtaaccacagaaaaagtggagaatgggcaggaacctgtcataaagttagaaaacaggcaagaggccagaccagaaccagcaagactgaaaccacctgttcattacaatggcccctcaaaagcagggtatgttgactttgaaaatggccagtgggccacagatgacatcccagatgacttgaatagtatccgcgcagcaccaggtgagtttcgagccatcatggagatgccctccttctacagtcatggcttgccacggtgttcaccctacaagaaactgacagagtgccagctgaagaaccccatcagcgggctgttagaatatgcccagttcgctagtcaaacctgtgagttcaacatgatagagcagagtggaccaccccatgaacctcgatttaaattccaggttgtcatcaatggccgagagtttcccccagctgaagctggaagcaagaaagtggccaagcaggatgcagctatgaaagccatgacaattctgctagaggaagccaaagccaaggacagtggaaaatcagaagaatcatcccactattccacagagaaagaatcagagaagactgcagagtcccagacccccaccccttcagccacatccttcttttctgggaagagccccgtcaccacactgcttgagtgtatgcacaaattggggaactcctgcgaattccgtctcctgtccaaagaaggccctgcccatgaacccaagttccaatactgtgttgcagtgggagcccaaactttccccagtgtgagtgctcccagcaagaaagtggcaaagcagatggccgcagaggaagccatgaaggccctgcatggggaggcgaccaactccatggcttctgataaccagcctgaaggtatgatctcagagtcacttgataacttggaatccatgatgcccaacaaggtcaggaagattggcgagctcgtgagatacctgaacaccaaccctgtgggtggccttttggagtacgcccgctcccatggctttgctgctgaattcaagttggtcgaccagtccggacctcctcacgagcccaagttcgtttaccaagcaaaagttgggggtcgctggttcccagccgtctgcgcacacagcaagaagcaaggcaagcaggaagcagcagatgcggctctccgtgtcttgattggggagaacgagaaggcagaacgcatgggtttcacagagctccctctcactggcagcaccttccatgaccagatagccatgctgagccaccggtgcttcaacactctgactaacagcttccagccctccttgctcggccgcaagattctggccgccatcattatgaaaaaagactctgaggacatgggtgtcgtcgtcagcttgggaacagggaatcgctgtgtgaaaggagattctctcagcctaaaaggagaaactgtcaatgactgccatgcagaaataatctcccggagaggcttcatcaggtttctctacagtgagttaatgaaatacaactcccagactgcgaaggatagtatatttgaacctgctaagggaggagaaaagctccaaataaaaaagactgtgtcattccatctgtatatcagcactgctccgtgtggagatggcgccctctttgacaagtcctgcagcgaccgtgctatggaaagcacagaatcccgccactaccctgtcttcgagaatcccaaacaaggaaagctccgcaccaaggtggagaacggagaaggcacaatccctgtggaatccagtgacattgtgcctacgtgggatggcattcggctcggggagagactccgtaccatgtcctgtagtgacaaaatcctacgctggaacgtgctgggcctgcaaggggcactgttgacccacttcctgcagcccatttatctcaaatctgtcacattgggttaccttttcagccaagggcatctgacccgtgctatttgctgtcgtgtgacaagagatgggagtgcatttgaggatggactacgacatccctttattgtcaaccaccccaaggttggcagagtcagcatatatgattccaaaaggcaatccgggaagactaaggagacaagcgtcaactggtgtctggctgatggctatgacctggagatcctggacggtaccagaggcactgtggatgggccacggaatgaattgtcccgggtctccaaaaagaacatttttcttctatttaagaagctctgctccttccgttaccgcagggatctactgagactctcctatggtgaggccaagaaagctgcccgtgactacgagacggccaagaactacttcaaaaaaggcctgaaggatatgggctatgggaactggattagcaaaccccaggaggaaaagaacttttatctctgcccagta

SEQ ID NO: 297205 - DNA, 3588 bp, Artificial Sequence
  derived and/or modified sequence
gggtactctctgtctgggtattatacccacccatttcaagggtacgagcatagacagcttcggtatcagcagcctgggcctgggtctagtcccagctctttcctgctgaagcagattgagtttttgaaaggtcagctgcctgaggccccagtcataggaaaacagacaccaagtctgcccccatcgctacccggacttcgcccacggtttccagtcctgcttgcaagctcaacccgcggtcgccaagtggatattagaggtgtaccccgtggggtccatctgcgcagccagggcctgcaaagagggttccaacacccaagccccaggggtcgcagtttgccacagcgcggtgtggattgcctatctagtcactttcaggagctttccatatatcaagatcaggagcagcggatcctgaagttcttagaggagctaggggagggtaaggcaaccaccgcccacgatttgtccggcaaactggggactccaaagaaggaaatcaatcgggtgctctatagtctggcaaaaaagggaaagctccagaaagaagcaggaacacctcccctgtggaagatcgccgtcagcacgcaagcgtggaaccagcactcaggcgtcgtgcggccagacggccacagccagggcgctccaaatagtgatcccagcctcgagccagaggaccgcaactcaacctccgtgtctgaagacttactcgagcctttcatagcggtcagcgcccaggcttggaaccagcattcgggggtcgtgcggccagacagccatagtcagggttctcccaactccgacccaggtctagaacccgaggactctaactcaacttctgctctggaggatcccctagagtttttagacatggccgaaatcaaagagaagatatgtgactatcttttcaatgtgtcagattccagcgctttaaatctcgcgaagaatataggtctgacgaaggctcgcgatatcaacgccgtcctgatcgacatggagaggcaaggtgacgtgtatagacagggaacgactccccctatctggcacctcaccgacaaaaagagggaacgcatgcagatcaagcggaatactaattctgtaccagagactgcccctgccgctatccccgaaactaagagaaacgccgagtttctcacatgcaacattccaacttcaaacgcatccaataatatggtgacaactgagaaggtggaaaatggacaagagcccgtcatcaaactggaaaacaggcaggaggccaggcctgagccagcacgcctgaagccaccggtgcattacaatgggcctagcaaggcaggctacgtggactttgaaaacggacaatgggctacggacgacattcccgacgaccttaattcaattcgggctgcccctggcgaattcagggctatcatggagatgccttctttctacagtcatggactcccccgttgctctccttacaagaaactcactgagtgccagctaaagaaccctatcagcggactcctcgaatatgcacagttcgcttctcagacttgtgagttcaatatgattgagcagagtggcccaccgcatgagcctcgcttcaagttccaagtggtgattaatggcagggaattccccccagccgaggccggaagcaagaaagtggcaaagcaggatgccgcaatgaaggccatgactatcctgttggaggaggccaaggccaaggactcgggtaaatccgaagagtcctcacattattcaactgaaaaggagagtgaaaagacagcagagagtcaaaccccaacccccagtgctacgtcgttctttagcggcaagtcccccgtcacgacgctgctcgagtgcatgcataaactgggaaattcctgtgaatttcgtttgctgtctaaggagggccctgcgcatgaacctaaatttcagtactgtgtcgcggtgggtgcccagaccttccctagcgtttccgcaccaagtaagaaggtcgcgaagcagatggctgccgaggaagcaatgaaggctttgcatggcgaagctacaaactccatggcaagtgataatcaacccgaaggcatgatatccgaaagcctcgacaacctcgagtctatgatgccaaacaaggtgaggaagatcggcgagctggtgaggtacctcaatacaaacccagtcgggggactgcttgagtatgctaggtcccacggatttgccgcagaatttaagctggtagatcagagcggtccgcctcacgaaccaaagttcgtatatcaggcaaaagtgggaggacgctggttcccggctgtgtgcgcacacagcaaaaaacaggggaagcaggaagccgctgacgctgccctgagggtgctgatcggagagaacgaaaaggccgaacgcatgggatttacagaactgcccctgactggatcgactttccacgatcagatcgcaatgctgtcacatcggtgcttcaatacactaaccaattctttccagccttcgctccttggcagaaagatactggccgctattattatgaaaaaggactcagaagacatgggcgtggtggtgagcctgggcactggaaacagatgcgttaagggcgacagcctcagtttaaagggtgaaaccgtgaatgactgtcacgcagagatcatctctagacgtggtttcataaggttcctgtattctgaactcatgaagtacaatagccagacagcaaaagattccattttcgagccagccaaagggggagagaagctccagattaagaaaaccgtctcatttcacctatatatcagcaccgctccatgtggtgacggtgcactgttcgataagtcatgttccgacagagctatggaaagtacagagagcaggcattatcccgtgttcgaaaaccctaagcagggtaagctcaggaccaaagtggagaacggggaaggaacaattccagtcgaaagctctgatatcgttccaacatgggacgggattcgactcggcgaacgcctacgcactatgtcatgtagcgacaagattctgcgctggaatgttctcggcctacagggcgcattactgacacacttcctgcagcctatctacctgaaatcagtgaccttgggctacctgttcagccaggggcacctgacgagggctatatgctgtcgcgtgacacgggatggcagcgctttcgaggacggacttaggcatccgttcatcgttaaccaccctaaggttggaagagtttccatttatgattcgaaacggcagagtggaaaaactaaggagactagcgtgaattggtgcctggctgacggttacgatctggagatcctggacggcacaaggggaaccgtggacggtccacgcaatgagctaagccgggtgtctaaaaaaaatatctttctgttatttaaaaaactgtgtagctttagataccggagagatctgctgagactgtcctacggggaggccaagaaagcagctagagattatgagaccgctaaaaactactttaaaaagggcctaaaagatatgggatacggtaactggataagtaagccacaggaagaaaaaaatttttatctgtgtccggtgtag

SEQ ID NO: 297206 - DNA, 3588 bp, Artificial Sequence
  derived and/or modified sequence
ggctacagcctgagcggctactacacccaccccttccagggctacgagcacagacagctgagataccagcagcccggccccggcagcagccccagcagcttcctgctgaagcagatcgagttcctgaagggccagctgcccgaggcccccgtgatcggcaagcagacccccagcctgccccccagcctgcccggcctgagacccagattccccgtgctgctggccagcagcaccagaggcagacaggtggacatcagaggcgtgcccagaggcgtgcacctgagaagccagggcctgcagagaggcttccagcaccccagccccagaggcagaagcctgccccagagaggcgtggactgcctgagcagccacttccaggagctgagcatctaccaggaccaggagcagagaatcctgaagttcctggaggagctgggcgagggcaaggccaccaccgcccacgacctgagcggcaagctgggcacccccaagaaggagatcaacagagtgctgtacagcctggccaagaagggcaagctgcagaaggaggccggcaccccccccctgtggaagatcgccgtgagcacccaggcctggaaccagcacagcggcgtggtgagacccgacggccacagccagggcgcccccaacagcgaccccagcctggagcccgaggacagaaacagcaccagcgtgagcgaggacctgctggagcccttcatcgccgtgagcgcccaggcctggaaccagcacagcggcgtggtgagacccgacagccacagccagggcagccccaacagcgaccccggcctggagcccgaggacagcaacagcaccagcgccctggaggaccccctggagttcctggacatggccgagatcaaggagaagatctgcgactacctgttcaacgtgagcgacagcagcgccctgaacctggccaagaacatcggcctgaccaaggccagagacatcaacgccgtgctgatcgacatggagagacagggcgacgtgtacagacagggcaccaccccccccatctggcacctgaccgacaagaagagagagagaatgcagatcaagagaaacaccaacagcgtgcccgagaccgcccccgccgccatccccgagaccaagagaaacgccgagttcctgacctgcaacatccccaccagcaacgccagcaacaacatggtgaccaccgagaaggtggagaacggccaggagcccgtgatcaagctggagaacagacaggaggccagacccgagcccgccagactgaagccccccgtgcactacaacggccccagcaaggccggctacgtggacttcgagaacggccagtgggccaccgacgacatccccgacgacctgaacagcatcagagccgcccccggcgagttcagagccatcatggagatgcccagcttctacagccacggcctgcccagatgcagcccctacaagaagctgaccgagtgccagctgaagaaccccatcagcggcctgctggagtacgcccagttcgccagccagacctgcgagttcaacatgatcgagcagagcggccccccccacgagcccagattcaagttccaggtggtgatcaacggcagagagttcccccccgccgaggccggcagcaagaaggtggccaagcaggacgccgccatgaaggccatgaccatcctgctggaggaggccaaggccaaggacagcggcaagagcgaggagagcagccactacagcaccgagaaggagagcgagaagaccgccgagagccagacccccacccccagcgccaccagcttcttcagcggcaagagccccgtgaccaccctgctggagtgcatgcacaagctgggcaacagctgcgagttcagactgctgagcaaggagggccccgcccacgagcccaagttccagtactgcgtggccgtgggcgcccagaccttccccagcgtgagcgcccccagcaagaaggtggccaagcagatggccgccgaggaggccatgaaggccctgcacggcgaggccaccaacagcatggccagcgacaaccagcccgagggcatgatcagcgagagcctggacaacctggagagcatgatgcccaacaaggtgagaaagatcggcgagctggtgagatacctgaacaccaaccccgtgggcggcctgctggagtacgccagaagccacggcttcgccgccgagttcaagctggtggaccagagcggccccccccacgagcccaagttcgtgtaccaggccaaggtgggcggcagatggttccccgccgtgtgcgcccacagcaagaagcagggcaagcaggaggccgccgacgccgccctgagagtgctgatcggcgagaacgagaaggccgagagaatgggcttcaccgagctgcccctgaccggcagcaccttccacgaccagatcgccatgctgagccacagatgcttcaacaccctgaccaacagcttccagcccagcctgctgggcagaaagatcctggccgccatcatcatgaagaaggacagcgaggacatgggcgtggtggtgagcctgggcaccggcaacagatgcgtgaagggcgacagcctgagcctgaagggcgagaccgtgaacgactgccacgccgagatcatcagcagaagaggcttcatcagattcctgtacagcgagctgatgaagtacaacagccagaccgccaaggacagcatcttcgagcccgccaagggcggcgagaagctgcagatcaagaagaccgtgagcttccacctgtacatcagcaccgccccctgcggcgacggcgccctgttcgacaagagctgcagcgacagagccatggagagcaccgagagcagacactaccccgtgttcgagaaccccaagcagggcaagctgagaaccaaggtggagaacggcgagggcaccatccccgtggagagcagcgacatcgtgcccacctgggacggcatcagactgggcgagagactgagaaccatgagctgcagcgacaagatcctgagatggaacgtgctgggcctgcagggcgccctgctgacccacttcctgcagcccatctacctgaagagcgtgaccctgggctacctgttcagccagggccacctgaccagagccatctgctgcagagtgaccagagacggcagcgccttcgaggacggcctgagacaccccttcatcgtgaaccaccccaaggtgggcagagtgagcatctacgacagcaagagacagagcggcaagaccaaggagaccagcgtgaactggtgcctggccgacggctacgacctggagatcctggacggcaccagaggcaccgtggacggccccagaaacgagctgagcagagtgagcaagaagaacatcttcctgctgttcaagaagctgtgcagcttcagatacagaagagacctgctgagactgagctacggcgaggccaagaaggccgccagagactacgagaccgccaagaactacttcaagaagggcctgaaggacatgggctacggcaactggatcagcaagccccaggaggagaagaacttctacctgtgccccgtgtag

SEQ ID NO: 297207 - DNA, 387 bp, Artificial Sequence
  derived and/or modified sequence
atggccagcagcaacaccgtgctgatgagactggtggccagcgcctacagcatcgcccagaaggccggcatgatcgtgagaagagtgatcgccgagggcgacctgggcatcgtggagaagacctgcgccaccgacctgcagaccaaggccgacagactggcccagatgagcatctgcagcagcctggccagaaagttccccaagctgaccatcatcggcgaggaggacctgcccagcgaggaggtggaccaggagctgatcgaggacagccagtgggaggagatcctgaagcagccctgccccagccagtacagcgccatcaaggaggaggacctggtggtgtgggtggaccccctggacggcaccaaggagtacaccgagggctag

SEQ ID NO: 297208 - DNA, 387 bp, Artificial Sequence
  derived and/or modified sequence
atggcttcctccaataccgtgttgatgaggctggtagcttccgcctatagcattgcacagaaagccgggatgattgtgcggcgcgtgatagcagagggcgatctgggtattgtcgaaaagacctgtgccaccgacctgcagacgaaggccgataggctggcccaaatgagtatctgctcgtctctggcccgtaaattcccaaaactgacgatcatcggcgaggaggacctcccgtccgaagaagtggatcaagaattgatcgaagattctcagtgggaggaaatcctgaaacaaccatgtcctagccagtactccgctatcaaggaagaggacttggttgtctgggttgaccctctggatgggactaaagaatataccgaaggttag

SEQ ID NO: 297209 - DNA, 387 bp, Artificial Sequence
  derived and/or modified sequence
atggccagcagcaacacagtgctgatgaggctggtggccagcgcctacagcatcgcccagaaggccggcatgattgtgagaagagtgattgctgagggggacctgggcatcgtggagaagacctgtgccacagacctgcagaccaaggctgaccggctggcccagatgagcatctgcagcagcctggccaggaagttccccaagctgaccatcatcggggaggaggacctgcccagcgaggaggtggaccaggagctgattgaggacagccagtgggaggagatcctgaagcagccctgccccagccagtacagcgccatcaaggaggaggacctggtggtgtgggtggaccccctggatggcaccaaggagtacacagagggctag

SEQ ID NO: 297210 - DNA, 387 bp, Artificial Sequence
  derived and/or modified sequence
atggccagcagcaacaccgtgctgatgcggctggtggccagcgcctacagtattgcacaaaaagctggcatgattgtacgcagagtgatcgcagagggggatctgggcatcgttgagaagacttgcgcaactgatctgcagacaaaagctgatcggttggcccaaatgtccatctgcagttctctggcccggaagttccctaagctaacaataattggagaagaggacctgccatctgaagaagtggatcaggagctgatagaagattcccagtgggaagagattttgaagcagccatgcccctcacaatatagcgccataaaggaagaggaccttgtggtgtgggtcgatccgttggatgggaccaaggaatacaccgagggatag

SEQ ID NO: 297211 - DNA, 387 bp, Artificial Sequence
  derived and/or modified sequence
atggccagcagcaatactgtgcttatgcggcttgtggcttcggcatattctattgcccagaaagcagggatgatagtgagaagagtgattgcggaaggagatttgggtattgttgaaaagacatgtgccacagatctgcagacaaaggccgatcgcctggcccagatgagtatttgcagctcactagcccgaaaatttcccaagctcacaatcatcggcgaagaagatctgcctagtgaggaagttgatcaggagctgatcgaagacagccagtgggaggaaattctgaaacagccctgccctagtcagtactccgctataaaggaagaagatttggtcgtgtgggtcgacccactcgacggcacaaaagaatacactgaggggtag

SEQ ID NO: 297212 - DNA, 561 bp, Artificial Sequence
  derived and/or modified sequence
gatgccatccttctcaaaagacttattgacagtgccaaagctcggtactggacacaacgagggacctgggtctacgataacgcgcttttgctcctcctgaagtgtctttggtccaacgttgttccaggtttgtcaccgtttctctccggccggtcagggcaagagccagagtgtaccatggcttccagtaacactgtgttgatgcggttggtagcctccgcatattctattgctcaaaaggcaggaatgatagtcagacgtgttattgctgaaggagacctgggtattgtggagaagacctgtgcaacagacctgcagaccaaagctgaccgattggcacagatgagcatatgttcttcattggcccggaaattccccaaactcacaattataggggaagaggatctgccttctgaggaagtggatcaagagctgattgaagacagtcagtgggaagaaatactgaagcaaccatgcccatcgcagtacagtgctattaaagaagaagatctcgtggtctgggttgatcctctggatggaaccaaggaatataccgaaggt

SEQ ID NO: 297213 - DNA, 473 bp, Artificial Sequence
  derived and/or modified sequence
ccagccgcaggggccacccgaacagtctctcctcctcacagaagcctggagctgggcatccaagaagaagcagcctcatttgttttctggtgtcatcgtaggtggccacctatggcttttgggaccaaaaagaagaatgtacttcatctggttgggctggattccctctgataagccttcccagttgactgaaagatgaggctaggctctagcaagttgaagtcaaaccagctccttcaagaagctttgagcagaatgaagtggggaggacccagcttccagcccaggaagcccactgtacctggagccatctgggataagactttgacccatgactcccatatccacagcctgtccatcctagcccatcccagtttatcctgtatcatttgagctgggattcccacatcctctgagttggaagtcccatctcaagtcttcaataaagactcttgaatattgaatcacattaa

SEQ ID NO: 297214 - protein, 169 aa, Artificial Sequence
  derived and/or modified sequence
PPEQSLLLTEAWSWASKKKQPHLFSGVIVGGHLWLLGFSPGAGGFCTTLPPSFLRVDDRATSSTTDSSRAPSSPRPPGSTSHCGISTRCTERCLCVLPLRTSQVPDVMAPQHDQEKFHDLAYSCLGKSFSMSNQDLYGYSTSSLALGLAWLSWETKKKNVLHLVGLDSL

SEQ ID NO: 297215 - protein, 188 aa, Artificial Sequence
  derived and/or modified sequence
  misc_feature (1)..(1): Xaa can be any naturally occurring amino acid
XAQRGPGKAGLTGGRERLERGARAARTDQHQRIQEEERDLTGSGDISPPQHPSRHSFSPGAGGFCTTLPPSFLRVDDRATSSTTDSSRAPSSPRPPGSTSHCGISTRCTERCLCVLPLRTSQVPDVMAPQHDQEKFHDLAYSCLGKSFSMSNQDLYGYSTSSLALGLAWLSWETKKKNVLHLVGLDSL

SEQ ID NO: 297216 - protein, 156 aa, Artificial Sequence
  derived and/or modified sequence
MFLTEDLITFNLRNFLLFQLWESSFSPGAGGFCTTLPPSFLRVDDRATSSTTDSSRAPSSPRPPGSTSHCGISTRCTERCLCVLPLRTSQVPDVMAPQHDQEKFHDLAYSCLGKSFSMSNQDLYGYSTSSLALGLAWLSWETKKKNVLHLVGLDSL

SEQ ID NO: 297217 - DNA, 879 bp, Artificial Sequence
  derived and/or modified sequence
ctcctcacagaagcctggagctgggcatccaagaagaagcagcctcatttgttttctggtgtcatcgtaggtggccacctatggcttttgggaatgtaaaaagggcagctctctggcatgttcctgactgaggatctcataacatttaacttgaggaacttcctccttttccagctttgggagtcaagcttctcacctggggcgggtgggttctgcaccaccctcccaccctccttcctccgtgtggacgatagagccacatccagcaccacggacagctcccgggcgccttcatctcctcgtcctccaggcagcacaagccattgtggaatctccaccaggtgtacagaacggtgcctctgcgtcctgccactcaggacctctcaagtccccgatgtgatggctcctcagcatgatcaggagaaattccatgatcttgcttattcctgtcttgggaagtccttctccatgtctaaccaagatctatatggctatagcaccagctctttggctcttggcttggcatggctaagttgggagaccaaaaagaagaatgtacttcatctggttgggctggattccctctgataagccttcccagttgactgaaagatgaggctaggctctagcaagttgaagtcaaaccagctccttcaagaagctttgagcagaatgaagtggggaggacccagcttccagcccaggaagcccactgtacctggagccatctgggataagactttgacccatgactcccatatccacagcctgtccatcctagcccatcccagtttatcctgtatcatttgagctgggattcccacatcctctgagttggaagtcccatctcaagtcttcaataaagactcttgaatattg

SEQ ID NO: 297218 - DNA, 510 bp, Artificial Sequence
  derived and/or modified sequence
cctccggagcaaagcctgctgctcacagaggcttggagctgggcatccaagaaaaagcagcctcacctcttcagcggcgtaatcgttgggggacacttgtggctgttgggtttcagccccggcgctgggggtttttgtacaaccctacctccaagtttcttacgggtagacgacagggccaccagcagcactacagattccagtcgggctccctccagtccgcggcctcctggatccacttctcactgtggaatttcaacgcggtgcactgaacgttgcctttgtgtcttgccgctccgcacttcacaggtcccagatgtgatggcacctcagcacgaccaggagaaattccatgacctggcctactcatgtttaggtaagtccttttcaatgagtaaccaggacctttatgggtatagcacatccagccttgcgctcggactggcttggctttcctgggagaccaagaaaaagaatgttctgcacttagttggcctcgactctctgtag

SEQ ID NO: 297219 - DNA, 567 bp, Artificial Sequence
  derived and/or modified sequence
tgagcacagaggggccccggtaaagcaggactgactgggggaagggagagactggagagaggcgctagagccgccaggacggatcagcaccagcgcatccaagaggaggagagggacttgactggctctggcgacatttctccacctcagcaccctagcaggcactctttctccccgggtgcaggtgggttttgcactacactgccaccaagctttttgagagtggacgatagagcaacaagcagtacaactgatagcagtcgcgcacccagcagtcctcgacccccgggatccaccagccactgcgggatttcaactcgctgtaccgagagatgtctctgcgtgttaccacttagaacgtcacaagtccctgatgtcatggccccccagcatgatcaagagaagttccacgatctggcttacagctgcttagggaagtcattctctatgtctaaccaggacctgtacggctattcaacttcatcgcttgctctcggacttgcctggctgtcatgggagaccaagaagaagaatgtgcttcacctcgtcggcctggactctctgtag

SEQ ID NO: 297220 - DNA, 471 bp, Artificial Sequence
  derived and/or modified sequence
atgttcctgacagaggatctgatcacttttaacttgagaaatttccttctctttcaactttgggagtcatcattctctcctggcgccggggggttctgcacgaccttacccccttccttcttacgagtggatgatagagctacgagctccaccacggactcatctcgtgcaccttcctctccgagaccccccggaagcacctctcactgcggcatttctacacgctgcaccgagagatgcctctgtgtcctgcccctccggactagccaggtccccgacgtgatggctccgcagcatgaccaagagaagttccacgaccttgcctattcttgcctgggcaagtcattctccatgtctaaccaggatctctacgggtacagtactagctccctggccctgggtttggcatggttaagctgggaaactaagaagaagaatgtgcttcacttggtgggattagattccctgtag

SEQ ID NO: 297221 - DNA, 510 bp, Artificial Sequence
  derived and/or modified sequence
cctcctgagcagagcctgctgctgacagaggcctggagctgggccagcaagaagaagcagccccacctgttctctggagtcatcgtgggcggccacctgtggctgctgggcttcagccctggggccggcggcttctgcaccaccctgccccccagcttcctgcgggtggatgaccgggccaccagcagcaccacagacagcagccgggcccccagcagcccccggcccccaggcagcaccagccactgcggcatcagcacccgctgcacagagcgctgcctgtgtgtgctgcccctgcggaccagccaggtgcctgatgtgatggccccccagcacgaccaggagaagttccatgacctggcctacagctgcctgggcaagagcttctccatgagcaaccaggacctgtatggctacagcaccagcagcctggccctgggcctggcctggctgtcctgggagaccaagaagaagaatgtgctgcacctggtgggcctggacagcctgtag

SEQ ID NO: 297222 - DNA, 567 bp, Artificial Sequence
  derived and/or modified sequence
tgagcccagaggggccctgggaaggccggcctgaccggcggccgggagcggctggagcggggggcccgggccgccaggacagaccagcaccagaggatccaggaggaggagcgggacctgactggaagtggggacatcagccccccccagcaccccagccgccacagcttcagccctggagctgggggcttctgcaccaccctgcccccatccttcctgcgggtggatgaccgggccaccagcagcaccacagacagcagccgggcccccagcagccccaggcctcctggcagcaccagccactgcggcatcagcacccgctgcacagagcgctgcctgtgtgtgctgcccctgcggaccagccaggtgcctgatgtgatggccccccagcacgaccaggagaagttccatgacctggcctacagctgcctgggcaagagcttctccatgagcaaccaggacctgtatggctacagcaccagcagcctggccctgggcctggcctggctgtcctgggagaccaagaagaagaatgtgctgcacctggtgggcctggacagcctgtag

SEQ ID NO: 297223 - DNA, 471 bp, Artificial Sequence
  derived and/or modified sequence
atgttcctgacagaagatctcatcaccttcaacctgaggaacttcctgctcttccagctgtgggagagcagcttcagccctggagctgggggcttctgcaccaccctgcccccatccttcctgcgggtggatgaccgggccaccagcagcaccacagacagcagccgggcccccagcagccccaggcctcctggcagcaccagccactgcggcatcagcacccgctgcacagagcgctgcctgtgtgtgctgcccctgcggaccagccaggtgcctgatgtgatggccccccagcacgaccaggagaagttccatgacctggcctacagctgcctgggcaagagcttctccatgagcaaccaggacctgtatggctacagcaccagcagcctggccctgggcctggcctggctgtcctgggagaccaagaagaagaatgtgctgcacctggtgggcctggacagcctgtag

SEQ ID NO: 297224 - DNA, 510 bp, Artificial Sequence
  derived and/or modified sequence
ccccccgagcagagcctgctgctgaccgaggcctggagctgggcctctaaaaagaaacaaccccaccttttctctggtgtgatcgtggggggtcacctctggctgctgggtttctctccgggtgctggtgggttctgtaccacactccccccttcattcctgagggtggatgatcgagctacttcttctaccaccgacagttccagggctccctcaagtcccagaccacctggaagcacttctcattgcgggatctccacccgctgcaccgaacggtgtctgtgtgtgctgcccttgcgtaccagtcaggtccctgacgttatggcgccccagcacgatcaggagaaatttcatgatttggcctactcctgcctcggaaaatcattttcaatgtccaatcaggacctctacggatacagcacatccagtctggcattgggcctagcctggttaagctgggaaactaagaagaagaatgtgttgcacctggttggactggattctctgtag

SEQ ID NO: 297225 - DNA, 567 bp, Artificial Sequence
  derived and/or modified sequence
tgagcccagcggggccccggcaaggccggcctgaccggcggccgggagaggctggagaggggggccagagcggcccgcactgatcagcaccaaaggatccaggaagaggagagggacctcactggctctggcgacatctcccctccgcaacatccttctagacatagtttcagtcccggagcaggtgggttttgtactactctgcccccctcatttttgagggtggatgatcgcgccacatcctctactaccgacagcagtagggcaccttccagtccaagacccccggggtcgaccagccactgtgggataagcacacggtgcaccgagagatgtctgtgcgtgctcccattgcggacgtctcaggtcccagacgtcatggcaccgcaacatgaccaagagaagttccacgacttggcttactcatgcttaggcaagtccttctcaatgtcaaatcaagatttatacgggtattcaacctcatcccttgccttgggcctggcatggctttcctgggaaaccaaaaaaaaaaacgtcttacacctggtcggtctggatagcttgtag

SEQ ID NO: 297226 - DNA, 471 bp, Artificial Sequence
  derived and/or modified sequence
atgttcctgaccgaggacctgatcaccttcaacctgcggaacttcctgctgtttcaactttgggagtcatcgttttcacctggtgccggcggtttctgcacaactcttcccccttccttcttgcgggtcgatgacagggcaacttctagtacaacagactccagccgcgccccttcttccccgagaccccccggctccacgtcacattgcgggatcagcactcgctgcactgagaggtgtctgtgcgtgctaccactccgcacctcacaggtaccagatgtgatggccccacagcacgatcaggagaagtttcatgaccttgcctatagttgtctcgggaaatcttttagtatgtctaaccaggacctctatgggtactctacgagctccctcgcgctggggctggcctggttgagctgggagaccaaaaagaagaacgtcttacacctagttggcctcgatagtctgtag

SEQ ID NO: 297227 - DNA, 510 bp, Artificial Sequence
  derived and/or modified sequence
cctcctgagcagagtctgttacttactgaagcttggtcttgggcatctaagaaaaaacaacctcatctgttcagtggcgtgatagtggggggacatctttggctgctgggtttcagtcctggagctgggggattctgtaccaccctacccccttcctttctcagggtcgacgacagagcgaccagctcaacaaccgactccagcagagcaccctcatcgcctcggccacctggtagcaccagccactgtggtatctcaactcggtgtaccgagcgctgcctctgcgtgctgccactccgcacaagccaggtcccagacgttatggcgccacagcacgaccaggagaagttccacgatttggcctatagttgtttggggaagagcttctctatgtcaaaccaggacctgtacggctactctaccagttccctcgcactggggctggcatggctgagttgggaaaccaaaaagaaaaacgttctgcacttagtaggcctggattccctgtag

SEQ ID NO: 297228 - DNA, 567 bp, Artificial Sequence
  derived and/or modified sequence
taggcccagcgaggtcctggcaaagccggactgacgggcggtcgggaacgtctcgaacggggtgcgagggccgctcgcacagaccagcaccaaagaattcaggaggaggagagggatctgacgggcagtggggacatttctccgccacagcacccttcacgacatagtttctcacccggagctggcggattttgtactaccctccctccttcgtttctgcgggtggacgatagagccacatcatctaccactgactccagcagggcaccctcatccccacggccaccgggatcaaccagccactgtggtatatcaactcgttgtacagagcggtgcctttgcgtgctgcctctccgcacatcccaggtccccgatgtgatggcccctcagcatgatcaggaaaagtttcatgatctggcctactcttgtctgggaaaatcattttccatgtctaatcaggatctctatgggtactcaacctcaagtctggctctcggcctcgcctggcttagttgggagacaaagaaaaaaaacgtcctccatttggtaggccttgattcgctgtag

SEQ ID NO: 297229 - DNA, 471 bp, Artificial Sequence
  derived and/or modified sequence
atgtttctcaccgaggatctaatcacattcaaccttcggaattttctgctgtttcagctttgggagtcatctttcagtccaggagctggagggttttgtacgacgcttcctccgagttttttacgcgtcgatgatagggctacttccagtacgactgactccagtagggccccaagttctccaaggcctccaggctccactagccactgtggcatttccacaagatgcaccgagagatgcttatgcgtgctgcctctcagaacaagtcaggttcccgacgtaatggctcctcagcacgatcaagaaaaattccacgacttagcctacagttgcctaggtaagagtttctccatgagtaaccaggatctgtatggttattccacgtcctctctggccctgggtctggcgtggctgagctgggaaacgaagaagaaaaacgtcctgcatctagtgggactcgacagtctctag

SEQ ID NO: 297230 - DNA, 652 bp, Artificial Sequence
  derived and/or modified sequence
ccacccgaacagtctctcctcctcacagaagcctggagctgggcatccaagaagaagcagcctcatttgttttctggtgtcatcgtaggtggccacctatggcttttgggcttctcacctggggcgggtgggttctgcaccaccctcccaccctccttcctccgtgtggacgatagagccacatccagcaccacggacagctcccgggcgccttcatctcctcgtcctccaggcagcacaagccattgtggaatctccaccaggtgtacagaacggtgcctctgcgtcctgccactcaggacctctcaagtccccgatgtgatggctcctcagcatgatcaggagaaattccatgatcttgcttattcctgtcttgggaagtccttctccatgtctaaccaagatctatatggctatagcaccagctctttggctcttggcttggcatggctaagttgggagaccaaaaagaagaatgtacttcatctggttgggctggattccctctgataagccttcccagttgactgaaagatgaggctaggctctagcaagttgaagtcaaaccagctccttcaagaagctttgagcagaatgaagtggggaggacccagcttccagcccaggaagcccactgtacctggagccatct

SEQ ID NO: 297231 - DNA, 867 bp, Artificial Sequence
  derived and/or modified sequence
ctgcgcagaggggcccggggaaagccggcctcacgggcgggagggagaggcttgagcgaggggctagagccgcgaggactgaccagcaccagaggatacaagaggaggagagagacctcactggttcgggcgacatttcacccccccagcaccccagtcggcacagcttctcacctggggcgggtgggttctgcaccaccctcccaccctccttcctccgtgtggacgatagagccacatccagcaccacggacagctcccgggcgccttcatctcctcgtcctccaggcagcacaagccattgtggaatctccaccaggtgtacagaacggtgcctctgcgtcctgccactcaggacctctcaagtccccgatgtgatggctcctcagcatgatcaggagaaattccatgatcttgcttattcctgtcttgggaagtccttctccatgtctaaccaagatctatatggctatagcaccagctctttggctcttggcttggcatggctaagttgggagaccaaaaagaagaatgtacttcatctggttgggctggattccctctgataagccttcccagttgactgaaagatgaggctaggctctagcaagttgaagtcaaaccagctccttcaagaagctttgagcagaatgaagtggggaggacccagcttccagcccaggaagcccactgtacctggagccatctgggataagactttgacccatgactcccatatccacagcctgtccatcctagcccatcccagtttatcctgtatcatttgagctgggattcccacatcctctgagttggaagtcccatctcaagtcttcaataaagactcttgaatattgaatcacatta

SEQ ID NO: 297232 - DNA, 510 bp, Artificial Sequence
  derived and/or modified sequence
ccccccgagcagagcctgctgctgaccgaggcctggagctgggccagcaagaagaagcagccccacctgttcagcggcgtgatcgtgggcggccacctgtggctgctgggcttcagccccggcgccggcggcttctgcaccaccctgccccccagcttcctgagagtggacgacagagccaccagcagcaccaccgacagcagcagagcccccagcagccccagaccccccggcagcaccagccactgcggcatcagcaccagatgcaccgagagatgcctgtgcgtgctgcccctgagaaccagccaggtgcccgacgtgatggccccccagcacgaccaggagaagttccacgacctggcctacagctgcctgggcaagagcttcagcatgagcaaccaggacctgtacggctacagcaccagcagcctggccctgggcctggcctggctgagctgggagaccaagaagaagaacgtgctgcacctggtgggcctggacagcctgtag

SEQ ID NO: 297233 - DNA, 567 bp, Artificial Sequence
  derived and/or modified sequence
tgagcccagagaggccccggcaaggccggcctgaccggcggcagagagagactggagagaggcgccagagccgccagaaccgaccagcaccagagaatccaggaggaggagagagacctgaccggcagcggcgacatcagccccccccagcaccccagcagacacagcttcagccccggcgccggcggcttctgcaccaccctgccccccagcttcctgagagtggacgacagagccaccagcagcaccaccgacagcagcagagcccccagcagccccagaccccccggcagcaccagccactgcggcatcagcaccagatgcaccgagagatgcctgtgcgtgctgcccctgagaaccagccaggtgcccgacgtgatggccccccagcacgaccaggagaagttccacgacctggcctacagctgcctgggcaagagcttcagcatgagcaaccaggacctgtacggctacagcaccagcagcctggccctgggcctggcctggctgagctgggagaccaagaagaagaacgtgctgcacctggtgggcctggacagcctgtag

SEQ ID NO: 297234 - DNA, 471 bp, Artificial Sequence
  derived and/or modified sequence
atgttcctgaccgaggacctgatcaccttcaacctgagaaacttcctgctgttccagctgtgggagagcagcttcagccccggcgccggcggcttctgcaccaccctgccccccagcttcctgagagtggacgacagagccaccagcagcaccaccgacagcagcagagcccccagcagccccagaccccccggcagcaccagccactgcggcatcagcaccagatgcaccgagagatgcctgtgcgtgctgcccctgagaaccagccaggtgcccgacgtgatggccccccagcacgaccaggagaagttccacgacctggcctacagctgcctgggcaagagcttcagcatgagcaaccaggacctgtacggctacagcaccagcagcctggccctgggcctggcctggctgagctgggagaccaagaagaagaacgtgctgcacctggtgggcctggacagcctgtag

SEQ ID NO: 297235 - protein, 296 aa, Artificial Sequence
  derived and/or modified sequence
MDVPGPVSRRAAAAAATVLLRTARVRRECWFLPTALLCAYGFFASLRPSEPFLTPYLLGPDKNLTEREEPKPDRLLVLKVLWNDFLMCYSSRPLLCWSVWWALSTCGYFQVVNYTQGLWEKVMPSRYAAIYNGGVEAVSTLLGAVAVFAVGYIKISWSTWGEMTLSLFSLLIAAAVYIMDTVGNIWVCYASYVVFRIIYMLLITIATFQIAANLSMERYALVFGVNTFIALALQTLLTLIVVDASGLGLEITTQFLIYASYFALIAVVFLASGAVSVMKKCRKLEDPQSSSQVTTS

SEQ ID NO: 297236 - DNA, 891 bp, Artificial Sequence
  derived and/or modified sequence
atggatgtcccgggacccgtctcaaggcgggcggctgccgccgccgcaaccgtgctgctgcgcaccgcaagggtgaggcgcgagtgctggtttctcccgacagccttgctgtgcgcctacgggtttttcgccagcctgcggccctccgagcccttcctgactccttacctcttgggtcccgacaaaaacttgactgagagagaggagccaaaaccggacagacttctggtcttgaaggttctgtggaatgatttcctcatgtgttactctagcaggcccctgctctgttggagcgtgtggtgggcactgagcacctgtggctactttcaggtggtgaactacacacagggcctctgggagaaggtgatgccatctcgatatgccgccatttacaacggaggagtggaagctgtcagcacactcctcggagctgtagcagtatttgcagtcgggtacatcaagatttcctggtccacatggggcgagatgacgttatccttgttttccctgctgattgccgccgcagtgtacataatggacaccgttggtaatatctgggtttgctacgcctcttatgtagtctttaggatcatctacatgctgcttatcaccattgccaccttccaaatcgccgccaatctgagcatggagcgctacgccttagtcttcggtgttaacaccttcatcgcgctcgcgcttcagacactgctgactctgattgtggtcgacgcctccggattaggcctggaaattacaacgcagttcctgatctacgcctcttattttgccctgatcgctgtagtgttcctggcaagcggggcagtaagcgtgatgaagaagtgtcgaaaactggaggacccacagagtagctctcaagtcaccacatcctag

SEQ ID NO: 297237 - DNA, 891 bp, Artificial Sequence
  derived and/or modified sequence
atggatgtgcccggccctgtgtccagaagagctgctgctgctgctgccaccgtgctgctgaggacagcccgggtgcggcgggagtgctggttcctgcccacagccctgctgtgtgcctacggcttctttgccagcctgcggcccagcgagcccttcctgaccccctacctgctgggccctgacaagaacctgacagagcgggaggagcccaagccagaccggctgctggtgctgaaggtgctgtggaatgacttcctgatgtgctacagcagccggcccctgctgtgctggagcgtgtggtgggccctgagcacctgtggctacttccaggtggtgaactacacccagggcctgtgggagaaggtgatgcccagccgctatgctgccatctacaacggcggcgtggaggccgtgtccaccctgctgggcgctgtggccgtgtttgctgtgggctacatcaagatctcctggagcacctggggcgagatgaccctgagcctcttcagcctgctgattgctgctgctgtgtacatcatggacacagtgggcaacatctgggtgtgctacgccagctatgtggtgttccgcatcatctacatgctgctgatcaccatcgccaccttccagattgctgccaacctgtccatggagagatatgccctggtgtttggagtgaacaccttcatcgccctggccctgcagaccctgctgaccctcatcgtggtggatgccagcggcctgggcctggagatcaccacccagttcctgatctatgccagctactttgccctgattgctgtggtgttcctggccagcggggctgtgtctgtgatgaagaagtgcaggaagctggaggacccccagagcagcagccaggtgaccaccagctag

SEQ ID NO: 297238 - DNA, 891 bp, Artificial Sequence
  derived and/or modified sequence
atggacgtgcccggccccgtgagccggcgggccgccgccgccgccgccactgttctgttgaggacagcccgcgtgaggcgggaatgttggtttttgcctacagccctgttgtgcgcctatggtttctttgcatcactgagacctagtgagccatttctgacaccttatcttctggggcctgataagaatctcaccgagcgagaggagccaaaacccgaccggctgctggtcctaaaggtgctgtggaatgactttctgatgtgttacagctcacgtcccttactctgttggtccgtttggtgggcgctttcaacatgcggctattttcaagtggtgaattatacccagggcctgtgggagaaagtcatgccaagtagatacgccgccatctacaacggtggagtggaggctgtgtctacgctgttgggagcggtcgccgtcttcgccgtggggtatatcaaaatctcatggtccacctggggagagatgacactgtccctgttcagcctcttaattgcagctgccgtctacatcatggacaccgtcggcaacatctgggtgtgttacgcaagctacgtcgtctttagaattatctatatgctgttgattacaatcgcgacgtttcagatcgctgccaatctatcaatggagcggtatgcactggttttcggcgtcaatactttcattgcgttggcgcttcaaacgctactcactctgatcgtagtggatgcatccggattaggattagagattacgacacaattcctgatctatgcgagttattttgcgttgatcgctgtggtttttctggcctccggggccgtaagcgtgatgaaaaaatgtagaaagttagaagatcctcagtctagctcccaggtgacgacatcctag

SEQ ID NO: 297239 - DNA, 891 bp, Artificial Sequence
  derived and/or modified sequence
atggatgtccccggtcctgtctctaggagagcggctgccgctgccgcaacagtgctgcttcgaacagcccgagtgcggagagaatgctggttcctcccaaccgccttactatgcgcttacggattttttgcctcactgcggccatcagagccattcctcactccatacttgttgggccctgacaagaacttgacggaaagggaggagcccaagccagaccggctgcttgtgctgaaagtgctgtggaatgattttctgatgtgttacagtagccggccactcctgtgctggtccgtgtggtgggcactctccacctgcggctatttccaggtagtcaactacacacaaggcctctgggagaaggtgatgcccagccgatacgcagcaatatataacggaggtgttgaggccgtgtcaactctgttgggtgcagtggcagtatttgccgtgggatacattaagatctcttggtcaacgtggggggaaatgaccttatcccttttttcattgctgatcgctgcagccgtgtacatcatggacaccgtggggaatatttgggtgtgttacgcatcctacgttgtgttcaggatcatatacatgttgttgattactatcgctaccttccagatcgcagccaacctatctatggaacgctacgccctggtgttcggcgtgaatacttttattgccctggcattacagaccctgctaaccctgatcgtggtggacgctagcggtctcggcctcgagattacaactcagtttctcatatacgcgtcctatttcgcactaattgctgttgtgttcctggcttccggagcagtcagtgtgatgaagaaatgcaggaagcttgaggatcctcagagttcttcccaggtgaccacctcctag

SEQ ID NO: 297240 - DNA, 3068 bp, Artificial Sequence
  derived and/or modified sequence
ggcagagggtgggccttaggacgggtctcccttaaactgggcgatcaggcagcgaccctagaggcgtctgtagggtaaagctgggggttctgtagccggaggcggcggcgagtccagaacgtcctggccttacagggagaaggcgtcactcgcggttacaagtgcctgaccctcactccagttggcggaggaggagaaggaaggggccgggccgggtcccctcccctcgcgccccggatggatgtgcccggcccggtgtctcggcgggcggcggcggcggcggccactgtgctcctgcggaccgctcgggtccgtcgcgaatgctggttcttgccgaccgcgctgctctgcgcctacggcttcttcgccagcctcaggccgtccgagcccttcctgaccccgtacctgctggggccggacaagaacctgaccgagagggaggaacccaagccagaccgtctccttgtattgaaagtactatggaatgatttcctgatgtgctactcctctcgccctcttctctgctggtctgtgtggtgggccctctctacctgtggctattttcaagttgtgaactacacacagggcctgtgggagaaagtgatgccttctcgctatgctgctatctataatggtggcgtggaggccgtttcaaccttactgggtgctgttgctgtgtttgcagttggttatataaaaatatcctggtcaacttggggagaaatgacattatctctcttttctctcctgattgctgctgcagtgtatatcatggacactgtgggtaacatttgggtgtgctatgcatcctatgttgtcttcagaatcatctacatgttactcatcacgatagcaacttttcaaattgctgcaaacctcagcatggaacgctatgccctagtatttggtgtaaataccttcattgccctggcactgcagacgctgctcactctaattgtggtagatgccagtggccttggattagaaattaccactcagtttttgatctatgccagttattttgcactcatcgctgtggttttcctggccagtggtgcagtcagtgttatgaagaaatgtagaaagctggaagatccacaatcaagttctcaagtaaccacttcataatatactgctgaagggcttcttcttatagcaagaactctgcacagcaactgcctggatgtgtttgattttttaaagcgtagacatatatttatgaatgtgcatttcttgacttcacagcagccacttgactaataccttgtgttccgggaataacatgatactattcagaggagccagaagtaaagtttatttcatggattatttatgagagctaatttaaggatgactttttttctgattcaaaagtgaacttgattttaaaaaccagtcaagagcaatcaaagcagcacatggtgttgtatacttcattagcaagtgagtttggtgttttataggtcacatatgtctgtatctacttagccagatgcttggcctggtgggaccagggctccacagaggccacaaaatgttgcaagtcatgatggatggaaatatgttctaacagcatctgcctctattcaatttaattcttatttctgtgttactcatgtacattggtctttctacatagttattctatcactggcaatatttgttctggtttagtgttctgtattttaaggtgtacgtatcatttctaattttaagttattttaaaaaaattcatcatatgaatgttcttggttcccattgtgacgattatttatttctgtaaaatttgtttagaagtacgtttttgcattattcatatgcttcccagagaagctcatttagttagaaaataaggcaagttttgaagcctgctaaatgaagagacttaagaaagcttaaggtacgcttgcttgtctttaaatcttcaatatgaaggactattaattccaagattaaaagttcatatataggctaaagatgtaactaggccatttgtatttgtattcccttttatttccaaaataaaatgaaaaatctttttttaataatttcatccctatttatagtttttatattaatttgtttttcttatccaagtaaagatgtcaataggaattgcattagtccaaggcctttttcataaactgagcctcttttcaattatttcaatgggacaggaactaggatagatgtgattcctgcatttttttaccttaaatctgcctttgtttctaaaggtagatcatcttgaatatttgcttaaaattgctagtgatttcattaccaagttacttgaaaaaatgttctatatgcatttaattctgaaatcagtctaccaaggggctgctagtatatgtcagacatgaaaactattttaaagctgactttgttgccttatcttgaaaagaatctagataggtgcttttaactggggtattaacttttttagaatgacacagctgaacagtgttaataatagtgtgtcaagattgcaaagtcgacatactcatttggtttaagcaggaatcctagaagcaaatggatggggataagaataggtcattttctattcaccatcctttactattaagggaaaggaaaagaacactagctaaggaagggaaagggaagtgatatcataaaagtagcaaccttcattttacattctgtctgtttttctttttttgctttgttttgtttgtgctaatttgggaattgtgtactccgaaacaagtagaaaagtgctgtttgagggattttattaaatctttttttaatggaatgtggtacaaattgttcatgttaccaaagcaatatttccctggaatttaattcaaagtttgtggcatacaacctgagccttttcttatataagacaagaatatgttcacatcttggtatgtggccatatttatagaatgctgaactcaatgtgcaagttgtactgtatgcagttttgtaaataagtgaaaataatttgttgtactttttattcaattctgtatagattataaaattatttttattaaataaatattttacagtatattttctctttttaatcaaaa

SEQ ID NO: 297241 - DNA, 891 bp, Artificial Sequence
  derived and/or modified sequence
atggacgtgcccggccccgtgagcagaagagccgccgccgccgccgccaccgtgctgctgagaaccgccagagtgagaagagagtgctggttcctgcccaccgccctgctgtgcgcctacggcttcttcgccagcctgagacccagcgagcccttcctgaccccctacctgctgggccccgacaagaacctgaccgagagagaggagcccaagcccgacagactgctggtgctgaaggtgctgtggaacgacttcctgatgtgctacagcagcagacccctgctgtgctggagcgtgtggtgggccctgagcacctgcggctacttccaggtggtgaactacacccagggcctgtgggagaaggtgatgcccagcagatacgccgccatctacaacggcggcgtggaggccgtgagcaccctgctgggcgccgtggccgtgttcgccgtgggctacatcaagatcagctggagcacctggggcgagatgaccctgagcctgttcagcctgctgatcgccgccgccgtgtacatcatggacaccgtgggcaacatctgggtgtgctacgccagctacgtggtgttcagaatcatctacatgctgctgatcaccatcgccaccttccagatcgccgccaacctgagcatggagagatacgccctggtgttcggcgtgaacaccttcatcgccctggccctgcagaccctgctgaccctgatcgtggtggacgccagcggcctgggcctggagatcaccacccagttcctgatctacgccagctacttcgccctgatcgccgtggtgttcctggccagcggcgccgtgagcgtgatgaagaagtgcagaaagctggaggacccccagagcagcagccaggtgaccaccagctag

SEQ ID NO: 297242 - protein, 135 aa, Artificial Sequence
  derived and/or modified sequence
MIPNGYLMFEDENFIESSVAKLNALRKSGQFCDVRLQVCGHEMLAHRAVLACCSPYLFEIFNSDSDPHGISHVKFDDLNPEAVEVLLNYAYTAQLKADKELVKDVYSAAKKLKMDRVKQHLLYFCLHSTSTSSLL

SEQ ID NO: 297243 - protein, 117 aa, Artificial Sequence
  derived and/or modified sequence
VCGDYLLSRMDVTSCISYRNFASCMGDSRLLNKVDAYIQEHLLQISEEEEFLKLPRLKLEVMLEDNVCLPSNGKLYTKVINWVQRSIWENGDSLEELMEEVSFKVNGIQPFLKIILL

SEQ ID NO: 297244 - DNA, 354 bp, Artificial Sequence
  derived and/or modified sequence
gtgtgcggcgactacctgctgagcagaatggacgtgaccagctgcatcagctacagaaacttcgccagctgcatgggcgacagcagactgctgaacaaggtggacgcctacatccaggagcacctgctgcagatcagcgaggaggaggagttcctgaagctgcccagactgaagctggaggtgatgctggaggacaacgtgtgcctgcccagcaacggcaagctgtacaccaaggtgatcaactgggtgcagagaagcatctgggagaacggcgacagcctggaggagctgatggaggaggtgagcttcaaggtgaacggcatccagcccttcctgaagatcatcctgctgtag

SEQ ID NO: 297245 - DNA, 354 bp, Artificial Sequence
  derived and/or modified sequence
gtctgtggtgactacctgctatccaggatggacgtcacctcatgtatcagctaccgcaactttgccagctgtatgggcgactcaaggcttctgaataaggttgacgcgtacatccaggaacacctgctacagatttcagaagaagaggagttcctgaagctcccgcgtttgaagctcgaagtgatgttggaggataatgtgtgtttaccctccaatgggaagttgtacacaaaggtgatcaattgggtacagagatcaatctgggaaaatggcgattcactggaggagctgatggaggaggtgtccttcaaagtgaatggaatccaacccttcctgaagattatactgttgtag

SEQ ID NO: 297246 - DNA, 354 bp, Artificial Sequence
  derived and/or modified sequence
gtgtgtggggactacctgctgagcaggatggatgtgaccagctgcatctcctacagaaactttgccagctgcatgggagacagccggctgctgaacaaggtggatgcctacatccaggagcacctgctgcagatcagcgaggaggaggagttcctgaagctgccccggctgaagctggaggtgatgctggaggacaacgtgtgcctgcccagcaatggcaagctgtacaccaaggtgatcaactgggtgcagaggagcatctgggagaatggagacagcctggaggagctgatggaggaggtgtccttcaaggtgaatggcatccagcccttcctgaagatcatcctgctgtag

SEQ ID NO: 297247 - DNA, 354 bp, Artificial Sequence
  derived and/or modified sequence
gtgtgcggcgactacctgctgagccggatggacgtgaccagctgcatctcatacaggaactttgcgtcttgcatgggcgactcaagactactgaacaaggtggacgcgtatattcaagagcatctcctacaaattagcgaagaggaagaatttctaaaactgccccgtctgaaactagaagtaatgttggaggacaatgtgtgtctaccttccaatggtaaactgtatactaaggtgatcaattgggtccagcgctccatctgggaaaacggggactccctggaagaactgatggaggaagtgtcctttaaagttaacggtatccaaccattcctcaaaatcattttactttag

SEQ ID NO: 297248 - DNA, 564 bp, Artificial Sequence
  derived and/or modified sequence
gtttgtggtgattatttactgtctagaatggatgttaccagctgcatctcttaccgaaattttgcaagttgtatgggagactcccgtttgttgaataaggttgatgcttatattcaggagcatttgttacaaatttctgaagaggaggagtttcttaagcttccaaggctaaagttggaggtaatgcttgaagataatgtttgcttgcccagcaatggcaaattatatacaaaggtaatcaactgggtgcagcgtagcatctgggagaatggagacagtctggaagagctgatggaagaggttagttttaaagtaaatgggattcaaccatttttaaaaattattttgctataacatgaaggattccctttcacttttattttataaccatgaccctaaagaatttaaattttgctataggtacccctaagctgagaaacagggggggtgtccaggtgagctgaatgaactgttcagtttggtcttctgcttttctttttttatttctttgcttattatgtgctgttaactttctttaaagtagcatgtaatttgctttagaaa

SEQ ID NO: 297249 - DNA, 354 bp, Artificial Sequence
  derived and/or modified sequence
gtctgtggagattatctcttgtcaagaatggatgtgaccagctgcattagctacagaaactttgcttcgtgcatgggggactctcgtctactcaacaaggtggacgcatatatacaggagcacttactacagatatccgaggaggaggagtttctgaaactgccccgtctgaagctcgaggtcatgcttgaagataatgtttgtctcccttccaacggaaagctgtacacaaaggtgatcaactgggttcagcgcagtatctgggagaatggcgattcgctggaggagttgatggaagaagtgagctttaaggtgaatggcatccagcccttcctgaagatcatcttgctgtag

SEQ ID NO: 297250 - protein, 310 aa, Artificial Sequence
  derived and/or modified sequence
MICKMASKADVLDVVVASTVQKDMAIMIEDEKALRETVRKLGVIDSERMDFELLPDDERQCVKCKTTCFMSAISCSCKPGLLVCLHHVKELCSCPPYKYKLRYRYTLDDLYPMMNALKLRAESYNEWALNVNEALEAKINKKKSLVSFKALIEESEMKKFPDNDLLRHLRLVTQDAEKCASVAQQLLNGKRQTRYRSGGGKSQNQLTVNELRQFVTQLYALPCVLSQTPLLKDLLNRVEDFQQHSQKLLSEETPSAAELQDLLDVSFEFDVELPQLAEMRIRLEQARWLEEVQQACLDPSSLTLDDMRVS

SEQ ID NO: 297251 - DNA, 447 bp, Artificial Sequence
  derived and/or modified sequence
atgggcagagccggccccagaagcaccgccgacaccagacccagagccaccgtgatcaccaccagaagacccagaccctggcagaagcccaccagccccagaagactgcacagaagaagacccagaggccagcccgccagcgagaacgccgccgagcccagccaggtggccatcagcaagggcaagagccccgactacgccaacggcggcaaggccgccatggacagcagagccagcgacgccatcaacaagagcaaggtggacaccagcgccagcaaccccagccagagaagacccagcagactgagaggcaagagaagcctggccctgccccccagactggagtgcctgttccccagcagctgcggcagcagaagagccaccagcagacccggcttcccccccctggagggcagccacctgggctgccagctgctgcccctgtag

SEQ ID NO: 297252 - DNA, 447 bp, Artificial Sequence
  derived and/or modified sequence
atgggccgggccggccccaggagcacagctgacacccggccccgggccaccgtcatcaccacccggcggccccggccctggcagaagcccaccagcccccggcggctgcacagaagaagaccccggggccagcctgcctctgaaaatgctgctgagcccagccaggtggccatcagcaagggcaagagcccagactatgccaacggcggcaaggccgccatggacagccgggccagtgatgccatcaacaagagcaaggtggacaccagcgccagcaaccccagccagaggcggcccagccggctgcggggcaagaggagcctggccctgcccccccggctggagtgcctcttccccagcagctgtggcagcagaagagccaccagcaggcctggcttcccccccctggagggcagccacctgggctgccagctgctgcccctgtag

SEQ ID NO: 297253 - DNA, 447 bp, Artificial Sequence
  derived and/or modified sequence
atgggccgggccggcccccggagcaccgccgacacccggccccgggctaccgtgatcaccaccagaaggcccagaccctggcagaaaccaacatcccctcgtcgcctgcatcgccgccggccacggggtcagccagcctctgagaatgcagccgagccctcacaggtggcgatttctaagggcaaatcccctgattatgcgaacgggggaaaagctgccatggactcccgggctagcgacgcaataaacaagagcaaggtcgatacatccgcttctaatccgtcccaacgaaggccaagcaggcttagaggtaagaggtccctggccctcccacctagactggaatgcctgtttccgtcttcatgtggaagtcgccgggcaacaagcaggccaggcttcccaccccttgaaggctcccacctaggctgccagcttctgccattgtag

SEQ ID NO: 297254 - protein, 1275 aa, Artificial Sequence
  derived and/or modified sequence
MGFAPGKAVGSHIRGHYERILNPYNLFLSGDSLRCLQKPNLTTDTKDKEYKPHDIPQRQSVQPSETCPPARRAKRMRAEAMNIKIEPEETTEARTHNLRRRMGCPTPKCENEKEMKSSIKQEPIERKDYIVENEKEKPKSRSKKATNAVDLYVCLLCGSGNDEDRLLLCDGCDDSYHTFCLIPPLHDVPKGDWRCPKCLAQECSKPQEAFGFEQAARDYTLRTFGEMADAFKSDYFNMPVHMVPTELVEKEFWRLVSTIEEDVTVEYGADIASKEFGSGFPVRDGKIKLSPEEEEYLDSGWNLNNMPVMEQSVLAHITADICGMKLPWLYVGMCFSSFCWHIEDHWSYSINYLHWGEPKTWYGVPGYAAEQLENVMKKLAPELFVSQPDLLHQLVTIMNPNTLMTHEVPVYRTNQCAGEFVITFPRAYHSGFNQGFNFAEAVNFCTVDWLPLGRQCVEHYRLLHRYCVFSHDEMICKMASKADVLDVVVASTVQKDMAIMIEDEKALRETVRKLGVIDSERMDFELLPDDERQCVKCKTTCFMSAISCSCKPGLLVCLHHVKELCSCPPYKYKLRYRYTLDDLYPMMNALKLRAESYNEWALNVNEALEAKINKKKSLVSFKALIEESEMKKFPDNDLLRHLRLVTQDAEKCASVAQQLLNGKRQTRYRSGGGKSQNQLTVNELRQFVTQLYALPCVLSQTPLLKDLLNRVEDFQQHSQKLLSEETPSAAELQDLLDVSFEFDVELPQLAEMRIRLEQARWLEEVQQACLDPSSLTLDDMRRLIDLGVGLAPYSAVEKAMARLQELLTVSEHWDDKAKSLLKARPRHSLNSLATAVKEIEEIPAYLPNGAALKDSVQRARDWLQDVEGLQAGGRVPVLDTLIELVTRGRSIPVHLNSLPRLETLVAEVQAWKECAVNTFLTENSPYSLLEVLCPRCDIGLLGLKRKQRKLKEPLPNGKKKSTKLESLSDLERALTESKETASAMATLGEARLREMEALQSLRLANEGKLLSPLQDVDIKICLCQKAPAAPMIQCELCRDAFHTSCVAVPSISQGLRIWLCPHCRRSEKPPLEKILPLLASLQRIRVRLPEGDALRYMIERTVNWQHRAQQLLSSGNLKFVQDRVGSGLLYSRWQASAGQVSDTNKVSQPPGTTSFSLPDDWDNRTSYLHSPFSTGRSCIPLHGVSPEVNELLMEAQLLQVSLPEIQELYQTLLAKPSPAQQTDRSSPVRPSSEKNDCCRGKRDGINSLERKLKRRLEREGLSSERWERVKKMRTP

SEQ ID NO: 297255 - protein, 1386 aa, Artificial Sequence
  derived and/or modified sequence
MGFAPGKAVGSHIRGHYERILNPYNLFLSGDSLRCLQKPNLTTDTKDKEYKPHDIPQRQSVQPSETCPPARRAKRMRAEAMNIKIEPEETTEARTHNLRRRMGCPTPKCENEKEMKSSIKQEPIERKDYIVENEKEKPKSRSKKATNAVDLYVCLLCGSGNDEDRLLLCDGCDDSYHTFCLIPPLHDVPKGDWRCPKCLAQECSKPQEAFGFEQAARDYTLRTFGEMADAFKSDYFNMPVHMVPTELVEKEFWRLVSTIEEDVTVEYGADIASKEFGSGFPVRDGKIKLSPEEEEYLDSGWNLNNMPVMEQSVLAHITADICGMKLPWLYVGMCFSSFCWHIEDHWSYSINYLHWGEPKTWYGVPGYAAEQLENVMKKLAPELFVSQPDLLHQLVTIMNPNTLMTHEVPVYRTNQCAGEFVITFPRAYHSGFNQGFNFAEAVNFCTVDWLPLGRQCVEHYRLLHRYCVFSHDEMICKMASKADVLDVVVASTVQKDMAIMIEDEKALRETVRKLGVIDSERMDFELLPDDERQCVKCKTTCFMSAISCSCKPGLLVCLHHVKELCSCPPYKYKLRYRYTLDDLYPMMNALKLRAESYNEWALNVNEALEAKINKKKSLVSFKALIEESEMKKFPDNDLLRHLRLVTQDAEKCASVAQQLLNGKRQTRYRSGGGKSQNQLTVNELRQFVTQLYALPCVLSQTPLLKDLLNRVEDFQQHSQKLLSEETPSAAELQDLLDVSFEFDVELPQLAEMRIRLEQARWLEEVQQACLDPSSLTLDDMRRLIDLGVGLAPYSAVEKAMARLQELLTVSEHWDDKAKSLLKARPRHSLNSLATAVKEIEEIPAYLPNGAALKDSVQRARDWLQDVEGLQAGGRVPVLDTLIELVTRGRSIPVHLNSLPRLETLVAEVQAWKECAVNTFLTENSPYSLLEVLCPRCDIGLLGLKRKQRKLKEPLPNGKKKSTKLESLSDLERALTESKETASAMATLGEARLREMEALQSLRLANEGKLLSPLQDVDIKICLCQKAPAAPMIQCELCRDAFHTSCVAVPSISQGLRIWLCPHCRRSEKPPLEKILPLLASLQRIRVRLPEGDALRYMIERTVNWQHRAQQLLSSGNLKFVQDRVGSGLLYSRWQASAGQVSDTNKVSQPPGTTSFSLPDDWDNRTSYLHSPFSTGRSCIPLHGVSPEVNELLMEAQLLQVSLPEIQELYQTLLAKPSPAQQTDRSSPVRPSSEKNDCCRGKRDGINSLERKLKRRLEREGLSSERWERVKKMRTPKKKKIKLSHPKDMNNFKLERERSYELVRSAETHSLPSDTSYSEQEDSEDEDAICPAVSCLQPEGDEVDWVQCDGSCNQWFHQVCVGVSPEMAEKEDYICVRCTVKDAPSRK

SEQ ID NO: 297256 - DNA, 933 bp, Artificial Sequence
  derived and/or modified sequence
atgatctgcaagatggcctctaaggctgacgtcctggatgttgtagtcgcctccaccgtacagaaagacatggcaatcatgatcgaagacgaaaaggccctaagagaaacggttaggaagctcggtgttatcgacagtgaacggatggactttgaactcctgcccgacgatgagagacagtgtgtcaaatgtaagacgacttgtttcatgagcgccattagttgcagttgtaaacctggcctcttggtgtgcctgcaccacgtgaaagagctctgctcctgcccgccctataaatacaagttgagatatcgctacacactcgatgacctctacccaatgatgaatgctctaaaactgcgcgctgagtcctacaatgagtgggcgcttaatgtcaacgaagctctggaggccaagattaataaaaaaaagtcccttgttagttttaaagccctgattgaggaaagcgagatgaagaagtttccagacaacgaccttctgcgacacctgcggctggtcacgcaggacgccgaaaagtgcgccagcgtcgcacagcagcttctgaacggtaagcggcagacacgatatcgatctggcggcgggaagagtcagaatcagctcaccgtgaacgagctgcgacaattcgtcacacagctgtatgccctaccctgcgtccttagccagaccccattattaaaagaccttctaaaccgcgtggaagacttccagcagcactctcagaagcttctgtctgaggagaccccttcagctgccgaactgcaggacttgctcgatgtttcttttgaattcgacgtggagctcccccagctggcagagatgcgtatccgtctggaacaggcgagatggctggaagaggtgcaacaggcatgcctcgatccctcatcattgaccctggacgatatgcgggtcagctag

SEQ ID NO: 297257 - DNA, 933 bp, Artificial Sequence
  derived and/or modified sequence
atgatctgcaagatggccagcaaggcagatgtgctggatgtggtggtggccagcacagtgcagaaggacatggccatcatgattgaagatgagaaggccctgcgggagaccgtgaggaagctgggcgtcatcgacagcgagaggatggactttgagctgctgcctgatgatgagcggcagtgtgtgaagtgcaagaccacctgcttcatgtctgccatcagctgcagctgcaagccaggcctgctggtgtgcctgcaccacgtgaaggagctgtgcagctgccccccctacaagtacaagctgcgctaccgctacaccctggatgacctgtaccccatgatgaatgccctgaagctgcgggcagagagctacaatgagtgggccctgaatgtgaatgaggccctggaggccaagatcaacaagaagaagagcctggtgtccttcaaggccctgattgaggagagcgagatgaagaagttcccagacaatgacctgctgcggcacctgcggctggtgacccaggatgctgagaagtgtgcctctgtggcccagcagctgctgaatggcaagaggcagacccgctacagaagtggcggcggcaagagccagaaccagctgactgtgaatgagctgcggcagtttgtgacccagctgtatgccctgccctgtgtgctgagccagacccccctgctgaaggacctgctgaacagagtggaggacttccagcagcacagccagaagctgctgtctgaggagaccccatctgctgctgagctgcaggacctgctggatgtgtcctttgaatttgatgtggagctgccccagctggccgagatgaggatccggctggagcaggcccgctggctggaggaggtgcagcaggcctgcctggaccccagcagcctgaccctggatgacatgagggtgtcctag

SEQ ID NO: 297258 - DNA, 933 bp, Artificial Sequence
  derived and/or modified sequence
atgatctgcaagatggccagcaaggccgacgtgctggacgtggtggtggcttccacggtgcagaaggatatggcaataatgatcgaggacgagaaagcgctccgggagactgtgaggaagttaggagtcatcgacagcgagagaatggatttcgagcttttgcctgatgacgagcgacagtgcgtgaagtgcaagaccacatgttttatgtcagctatttcctgcagttgtaagcctggactgcttgtgtgcctccaccacgtcaaggaattatgctcctgtcccccttacaaatataaactgaggtaccggtatactcttgatgacttgtatcctatgatgaatgcactgaagttaagagctgaatcttacaacgagtgggccctcaacgtgaatgaggctctggaggccaagatcaataagaaaaaatctctggttagcttcaaggcactgattgaagaaagcgagatgaagaagttccccgataatgatctcctgcgccacctgcgactggtaacccaggatgctgaaaagtgcgcgtctgtggctcagcaactgctaaatggaaaacgacaaaccaggtataggagtggtggagggaagtctcagaatcagctgactgtgaacgaacttcggcagtttgtaacacagctgtatgctcttccatgtgtcctgagtcagaccccgcttttaaaggatctcctgaaccgggtcgaagattttcagcagcactcccagaaactgctgtccgaggagacgcccagtgccgcggagctgcaagacctgctggatgtgtctttcgagttcgatgtggaactgccacaactggccgaaatgaggattcgacttgagcaagcccgctggctggaagaggtgcagcaggcttgcctagatccgtcaagcttgacactggacgacatgcgcgtcagctag

SEQ ID NO: 297259 - DNA, 933 bp, Artificial Sequence
  derived and/or modified sequence
atgatatgcaagatggccagcaaggccgacgtgctggatgtggtggtggccagtacagtacaaaaggacatggctattatgatcgaagacgagaaggcactgcgcgagactgtgagaaagctgggcgtcattgactcggaacggatggacttcgagttattaccagatgatgagagacagtgtgtgaaatgcaaaaccacctgcttcatgtcagcgatctcctgctcctgcaagccagggcttctggtttgccttcatcacgtgaaggaactttgttcttgccccccatacaagtataaacttcggtatcggtatacattagacgacctctatcctatgatgaacgccctcaagcttcgagcagagtcatacaatgagtgggcacttaatgtgaacgaagcgttagaggctaagatcaataagaaaaaatccctcgtgtctttcaaggccctaattgaggaaagtgagatgaaaaaattccctgataacgatttgctgcgacaccttagattggttactcaggacgcagagaagtgcgcttctgtcgctcagcaactgctgaatgggaaacggcagacacggtaccgttccgggggaggtaagagccagaatcagctgaccgttaacgaactgcgacaatttgtgacacagctgtatgcccttccatgcgtgctgtcccagaccccgctgctgaaggacctgctgaaccgcgtagaagacttccagcagcacagtcaaaagctcctgagcgaggagacgccatccgctgccgagctgcaagacctgctggacgtgtccttcgagtttgacgtcgagcttccccagctggctgaaatgcggatccggctggaacaggcaaggtggctggaagaagtgcagcaggcttgtctggatccaagcagcctgacgctcgatgacatgagggtgagctag

SEQ ID NO: 297260 - DNA, 933 bp, Artificial Sequence
  derived and/or modified sequence
atgatctgcaagatggccagcaaggccgacgtgctggacgtggtggtggccagcaccgtgcagaaggacatggccatcatgatcgaggacgagaaggccctgagagagaccgtgagaaagctgggcgtgatcgacagcgagagaatggacttcgagctgctgcccgacgacgagagacagtgcgtgaagtgcaagaccacctgcttcatgagcgccatcagctgcagctgcaagcccggcctgctggtgtgcctgcaccacgtgaaggagctgtgcagctgccccccctacaagtacaagctgagatacagatacaccctggacgacctgtaccccatgatgaacgccctgaagctgagagccgagagctacaacgagtgggccctgaacgtgaacgaggccctggaggccaagatcaacaagaagaagagcctggtgagcttcaaggccctgatcgaggagagcgagatgaagaagttccccgacaacgacctgctgagacacctgagactggtgacccaggacgccgagaagtgcgccagcgtggcccagcagctgctgaacggcaagagacagaccagatacagaagcggcggcggcaagagccagaaccagctgaccgtgaacgagctgagacagttcgtgacccagctgtacgccctgccctgcgtgctgagccagacccccctgctgaaggacctgctgaacagagtggaggacttccagcagcacagccagaagctgctgagcgaggagacccccagcgccgccgagctgcaggacctgctggacgtgagcttcgagttcgacgtggagctgccccagctggccgagatgagaatcagactggagcaggccagatggctggaggaggtgcagcaggcctgcctggaccccagcagcctgaccctggacgacatgagagtgagctag

SEQ ID NO: 297261 - DNA, 588 bp, Artificial Sequence
  derived and/or modified sequence
atgttgctgttgattaatgtaattctgaccctgtgggtgtcctgcgccaatgggcaagtgaagccgtgcgactttccagacattaaacatggggggctcttccacgagaatatgaggcggccttactttcctgtggcagtgggtaagtattatagctactactgcgatgaacactttgaaactcctagtggttcttactgggactacatccactgcactcagaatggctggtcgcccgccgttccctgcctccgcaagtgttatttcccctacctcgaaaatggatataatcagaattacggtcggaagttcgtccagggtaactccactgaggtggcttgtcaccccggttacggcttgccaaaagcccagaccaccgtgacctgcaccgaaaaggggtggtcccccaccccaaggtgtatacgggtgcggacatgttccaaaagcgacatcgagattgaaaacggatttattagtgagagttctagtatttacatcctgaataaagagattcaatataagtgcaagcccggatatgccacagctgacgggaatagcagcgatatggtattctgtatttcttattag

SEQ ID NO: 297262 - DNA, 588 bp, Artificial Sequence
  derived and/or modified sequence
atgctgctgctgatcaacgtcatcctgaccctgtgggtgtcctgtgccaacggccaggtgaagccctgtgacttcccagacatcaagcacggcggcctcttccacgagaacatgagaagaccctacttccctgtggccgtgggcaagtactacagctactactgtgatgagcactttgagaccccatctggcagctactgggactacatccactgcacccagaatggctggagccctgctgtgccctgcctgaggaagtgctacttcccctacctggagaatggctacaaccagaactacggcaggaagtttgtgcagggcaacagcacagaggtggcctgccaccctggctacggcctgcccaaggcccagaccaccgtgacctgcacagagaagggctggagccccaccccccgctgcatccgggtgaggacctgcagcaagagtgacattgaaattgaaaatggcttcatcagcgagagcagcagcatctacatcctgaacaaggagatccagtacaagtgcaagccaggctacgccacagcagatggcaacagcagtgacatggtgttctgcatctcctactag

SEQ ID NO: 297263 - DNA, 588 bp, Artificial Sequence
  derived and/or modified sequence
atgctgctgctgatcaacgtgatcctgaccctgtgggtgagctgcgcaaacggccaagtgaaaccctgcgactttccagacatcaagcatggaggcctattccatgagaacatgaggcgaccatatttcccagtggctgtgggaaaatattacagctattactgcgatgagcatttcgagacaccctctggctcctattgggattacatccactgtacgcagaacggctggtctcctgccgtgccgtgcctgcggaagtgctatttcccctacttggagaatggctacaatcagaactacggaaggaagtttgtccaaggtaactctactgaggtggcctgtcatcccggctatggcttgcccaaagcccagaccaccgtgacttgcacagagaaaggatggtcccctacacccaggtgcatcagggttcggacatgtagcaagagtgatatcgagatcgaaaacggctttattagtgagagctcatctatctacattctcaataaggagattcaatataagtgtaagcctggatacgccacggccgacggaaactcctctgacatggtattttgcattagctactag

SEQ ID NO: 297264 - DNA, 588 bp, Artificial Sequence
  derived and/or modified sequence
atgctcctgttgatcaacgtgatcttgaccctgtgggtgtcatgtgctaacggacaagtaaagccttgcgattttccggacatcaagcacgggggactgtttcatgagaatatgcgacgaccctatttccctgtggcagtgggcaagtattactcctactattgcgacgagcactttgaaaccccctccggctcgtattgggactatatacattgcactcagaatggctggagtccagcggttccttgtttgcgaaagtgttatttcccatatctggagaatggatacaatcaaaattacggcagaaagtttgtccaggggaattcaaccgaggtggcatgccaccccggatacgggctcccaaaggctcagaccacagtgacatgtaccgagaaaggctggtctccgaccccacgatgcatacgggtcaggacatgttctaaatccgatattgagatcgagaacggctttataagtgagagctcctccatttatatcctaaacaaagagattcaatataaatgcaagcccggatacgctacagctgacggtaacagcagtgacatggtcttctgtatttcttactag

SEQ ID NO: 297265 - DNA, 1462 bp, Artificial Sequence
  derived and/or modified sequence
aatgaaagatttcaaaccccaaacagtgcaactgaaacttttgtattagcatactactgagaatatctaacatgttgttactaatcaatgtcattctgaccttgtgggtttcctgtgctaatggacaagtgaaaccttgtgattttccagacattaaacatggaggtctatttcatgagaatatgcgtagaccatactttccagtagctgtaggaaaatattactcctattactgtgatgaacattttgagactccttcaggaagttactgggattacattcattgcacacaaaatgggtggtcaccagcagtaccatgtctcagaaaatgttattttccttatttggaaaatggatataatcaaaattatggaagaaagtttgtacagggtaactctacagaagttgcctgccatcctggctacggtcttccaaaagcgcagaccacagttacatgtacggagaaaggctggtctcctactcccagatgcatccgtgtcagaacatgctcaaaatcagatatagaaattgaaaatggattcatttccgaatcttcctctatttatattttaaataaagaaatacaatataaatgtaaaccaggatatgcaacagcagatggaaattcttcagatatggttttttgcatttcttattaagttttgcttcagatttttttttgtcttttctcctgttaattgccttcactctctttctgttctgtacttttctttgtatataaggattttttgaaaagattgtatatccctgttaacaaattgaaatctctattcactttaatagatttttacccccagttagcatatggttagtgagaagttgcagggtaagaagaaaacaatgttccctttcccaacacttttcctgattatagagaaaaaagcatgaacttgtataatgatctagtcctgtacagaatgagaaatattaattgctagactgagaatgttttggtggctaaagctaggaataactttttaagactgaagaatgatataagctatcaaatctaactcagttttcaaataacaggtttgcagagactggagaataaaaagtaaaaaattgttttattaattccagtgactaattctacttcatcaacatacatcataaataaaatttcaaaaataattgctgatatggtttggctgtgtcccacccaattttcaccttgaattatataatcaccatgcatcaaaggtagggccaggtggagataatggaatcatgggagcagtttccccataccccactcatggtagtaaatacatctcatgagatctaatggttttataaatgaaagttcccctggacaagttctcttgcctgccaccatgtaagatgtacctttgctactcattcaccttctgtcatgatggtgaggccttcccagcaatgtggaactgtgagtccattaaacctctttcctttataaatt

SEQ ID NO: 297266 - DNA, 588 bp, Artificial Sequence
  derived and/or modified sequence
atgctgctgctgatcaacgtgatcctgaccctgtgggtgagctgcgccaacggccaggtgaagccctgcgacttccccgacatcaagcacggcggcctgttccacgagaacatgagaagaccctacttccccgtggccgtgggcaagtactacagctactactgcgacgagcacttcgagacccccagcggcagctactgggactacatccactgcacccagaacggctggagccccgccgtgccctgcctgagaaagtgctacttcccctacctggagaacggctacaaccagaactacggcagaaagttcgtgcagggcaacagcaccgaggtggcctgccaccccggctacggcctgcccaaggcccagaccaccgtgacctgcaccgagaagggctggagccccacccccagatgcatcagagtgagaacctgcagcaagagcgacatcgagatcgagaacggcttcatcagcgagagcagcagcatctacatcctgaacaaggagatccagtacaagtgcaagcccggctacgccaccgccgacggcaacagcagcgacatggtgttctgcatcagctactag

SEQ ID NO: 297267 - protein, 254 aa, Artificial Sequence
  derived and/or modified sequence
MAIVQARAQSNQAQQYSGITLSKAGQGSGSRKPPIPLMETAEDWETERKKQAARGWRVSTVNERFDVATSLPRYFWVPNRILDSEVRRAFGHFHQGRGPRLSWHHPGGSDLLRCGGFYTASDPNKEDIRAVELMLQAGHSDVVLVDTMDELPSLADVQLAHLRLRALCLPDSSVAEDKWLSALEGTRWLDYVRACLRKASDISVLVTSRVRSVILQAAFSPRSPNTVWLPITSTARVGGSWTSLPDSAWGNWGQ

SEQ ID NO: 297268 - DNA, 765 bp, Artificial Sequence
  derived and/or modified sequence
atggccatcgtgcaggccagagcccagagcaaccaggcccagcagtacagcggcatcaccctgagcaaggccggccagggcagcggcagcagaaagccccccatccccctgatggagaccgccgaggactgggagaccgagagaaagaagcaggccgccagaggctggagagtgagcaccgtgaacgagagattcgacgtggccaccagcctgcccagatacttctgggtgcccaacagaatcctggacagcgaggtgagaagagccttcggccacttccaccagggcagaggccccagactgagctggcaccaccccggcggcagcgacctgctgagatgcggcggcttctacaccgccagcgaccccaacaaggaggacatcagagccgtggagctgatgctgcaggccggccacagcgacgtggtgctggtggacaccatggacgagctgcccagcctggccgacgtgcagctggcccacctgagactgagagccctgtgcctgcccgacagcagcgtggccgaggacaagtggctgagcgccctggagggcaccagatggctggactacgtgagagcctgcctgagaaaggccagcgacatcagcgtgctggtgaccagcagagtgagaagcgtgatcctgcaggccgccttcagccccagaagccccaacaccgtgtggctgcccatcaccagcaccgccagagtgggcggcagctggaccagcctgcccgacagcgcctggggcaactggggccagtag

SEQ ID NO: 297269 - DNA, 765 bp, Artificial Sequence
  derived and/or modified sequence
atggctatcgtgcaggcccgtgcacaaagcaaccaggctcaacagtatagtggaatcacactgagcaaggccggccaggggagcggaagtagaaaaccaccaatcccgttgatggagacggctgaggactgggagacagaaaggaaaaaacaggcagcccggggctggcgggtctcaaccgtaaacgagcgcttcgacgttgcgacaagtctaccccggtacttctgggtgccgaacagaatcctggatagcgaggtgaggagagcatttggacactttcaccagggtcggggccccaggctttcatggcatcacccaggtggttccgacctgcttagatgtgggggtttttatacagcgtccgatccgaataaagaagacattagggccgttgaactgatgctacaagccggtcattctgatgtggtgttagttgataccatggatgagctcccctcactggccgatgtgcagctcgcccacctacgcctcagagctttgtgcctgccagactccagcgtcgctgaagacaagtggctgagtgcactggagggcacacggtggcttgattatgtgagagcttgcctccgaaaagcttccgatatttcagttctggttacttcccgagtccgtagcgtgatcttgcaagctgcgttttcacctaggtcccctaacacggtctggctccccatcacctcgacagctcgggtggggggaagctggacaagtctgcccgactcagcatggggtaattggggccaatag

SEQ ID NO: 297270 - DNA, 765 bp, Artificial Sequence
  derived and/or modified sequence
atggccatcgtgcaggcccgggcccagagcaaccaggcccagcagtacagcggcatcaccctgagcaaggccggccagggcagcggcagcaggaagccacccatccccctgatggagacagctgaggactgggagacagagaggaagaagcaggccgcccggggctggagggtgtccacagtgaatgaaagatttgatgtggccaccagcctgccccgctacttctgggtgcccaaccgcatcctggacagcgaggtgagaagagccttcggccacttccaccagggccggggcccccggctgtcctggcaccaccctgggggcagtgacctgctgcgctgtggcggcttctacacagccagtgaccccaacaaggaggacatccgggctgtggagctgatgctgcaggccggccacagtgatgtggtgctggtggacaccatggatgagctgcccagcctggctgatgtgcagctggcccacctgcggctgcgggccctgtgcctgcctgacagctctgtggccgaggacaagtggctgagcgccctggagggcacccgctggctggactatgtgcgggcctgcctgaggaaggccagtgacatctctgtgctggtgaccagccgggtgcgcagcgtcatcctgcaggccgccttcagccccaggagccccaacacagtgtggctgcccatcaccagcacagcccgggtgggcggctcctggaccagcctgcctgattctgcctggggcaactggggccagtag

SEQ ID NO: 297271 - DNA, 765 bp, Artificial Sequence
  derived and/or modified sequence
atggccatcgtgcaggcccgggcccagagcaaccaggcccagcagtacagtgggataacccttagcaaggccggccagggctcaggctctcgcaaaccgcctattccacttatggagaccgccgaggattgggaaaccgagaggaagaaacaggccgcccgtggttggagagtctcaacggtaaatgagcgcttcgacgtcgcgacatccttgccacgatacttctgggtgcctaaccggatactggatagcgaggtgaggcgcgcttttgggcattttcatcaggggcgcggccctcgcttaagttggcaccacccaggggggtctgacctgctgcggtgcggggggttctacacagcttccgaccccaataaagaagacattagggccgtggaactcatgttgcaggcgggacactcagacgtcgtcctagtggatacgatggatgaactgccatctctcgcagacgtgcaactggctcatctccgcctccgcgctctttgcctgccagatagctccgtagctgaagacaaatggctgtcagccttggaaggaactcggtggctcgactatgtgagggcctgtcttaggaaagcctccgatattagcgttctggtgacctccagggtccgcagcgtcatcctccaggctgctttttccccacgttcacctaacacagtgtggcttcctatcacttccaccgctagggtgggcggatcgtggacttcgcttcctgattcggcctggggtaactggggtcaatag

SEQ ID NO: 297272 - DNA, 765 bp, Artificial Sequence
  derived and/or modified sequence
atggccattgtccaggcaagggcgcagtcgaatcaggcccaacagtattcaggtatcacactttccaaggctggtcaggggtccggcagtagaaagcccccaatcccactcatggagactgctgaagattgggaaacagaacgcaagaaacaggcagctcggggatggagggtgtccaccgttaatgagcgtttcgacgtggctactagccttcctaggtacttctgggtgcccaatcggatactggactcggaagtgcgccgagccttcgggcactttcaccaaggacgcggacctaggctgtcctggcaccatccgggaggatccgatcttctccggtgtgggggtttttataccgcatctgaccccaacaaagaagatattagggccgtagaattaatgctccaggcaggtcactcagatgtggtcctcgtcgacactatggatgagctaccctcattggcagatgtccagctggcccatctcaggttaagggccttgtgtctgccagattcatctgtggccgaggacaagtggctgagcgccctggagggtaccaggtggctggactatgtgagagcttgtctgagaaaggccagtgatatcagcgtcttggtaactagccgcgtccgttccgtgatcttacaggccgctttttcccctcgtagtcctaacaccgtgtggctgcccatcacgagcaccgctagagtagggggtagttggactagcttgcccgattccgcctggggcaattggggtcagtag

SEQ ID NO: 297273 - protein, 272 aa, Artificial Sequence
  derived and/or modified sequence
MWWGGRGQSFNIAPQKEEPEMGSVQENRMPEPRSRQPSSCLASRCLPGEQILAWAPGVRKGLEPELSGTLICTNFRVTFQPCGWQWNQDTPLNSEYDFALVNIGRLEAVSGLSRVQLLRPGSLHKFIPEEILIHGRDFRLLRVGFEAGGLEPQAFQVTMAIVQARAQSNQAQQYSGITLSKAGQGSGSRKPPIPLMETAEDWETERKKQAARGWRVSTVNERFDVATRLRCFSSSLIVSGSSSSSFQLILNSLSFSFLLFMTVSGFLTPLPS

SEQ ID NO: 297274 - protein, 354 aa, Artificial Sequence
  derived and/or modified sequence
MPEPRSRQPSSCLASRCLPGEQILAWAPGVRKGLEPELSGTLICTNFRVTFQPCGWQWNQDTPLNSEYDFALVNIGRLEAVSGLSRVQLLRPGSLHKFIPEEILIHGRDFRLLRVGFEAGGLEPQAFQVTMAIVQARAQSNQAQQYSGITLSKAGQGSGSRKPPIPLMETAEDWETERKKQAARGWRVSTVNERFDVATSLPRYFWVPNRILDSEVRRAFGHFHQGRGPRLSWHHPGGSDLLRCGGFYTASDPNKEDIRAVELMLQAGHSDVVLVDTMDELPSLADVQLAHLRLRALCLPDSSVAEDKWLSALEGTRWLDYVRACLRKASDISVLVTSRVRSVILQGSGVSPLP

SEQ ID NO: 297275 - DNA, 819 bp, Artificial Sequence
  derived and/or modified sequence
atgtggtggggcggcagaggccagagcttcaacatcgccccccagaaggaggagcccgagatgggcagcgtgcaggagaacagaatgcccgagcccagaagcagacagcccagcagctgcctggccagcagatgcctgcccggcgagcagatcctggcctgggcccccggcgtgagaaagggcctggagcccgagctgagcggcaccctgatctgcaccaacttcagagtgaccttccagccctgcggctggcagtggaaccaggacacccccctgaacagcgagtacgacttcgccctggtgaacatcggcagactggaggccgtgagcggcctgagcagagtgcagctgctgagacccggcagcctgcacaagttcatccccgaggagatcctgatccacggcagagacttcagactgctgagagtgggcttcgaggccggcggcctggagccccaggccttccaggtgaccatggccatcgtgcaggccagagcccagagcaaccaggcccagcagtacagcggcatcaccctgagcaaggccggccagggcagcggcagcagaaagccccccatccccctgatggagaccgccgaggactgggagaccgagagaaagaagcaggccgccagaggctggagagtgagcaccgtgaacgagagattcgacgtggccaccagactgagatgcttcagcagcagcctgatcgtgagcggcagcagcagcagcagcttccagctgatcctgaacagcctgagcttcagcttcctgctgttcatgaccgtgagcggcttcctgacccccctgcccagctag

SEQ ID NO: 297276 - DNA, 1065 bp, Artificial Sequence
  derived and/or modified sequence
atgcccgagcccagaagcagacagcccagcagctgcctggccagcagatgcctgcccggcgagcagatcctggcctgggcccccggcgtgagaaagggcctggagcccgagctgagcggcaccctgatctgcaccaacttcagagtgaccttccagccctgcggctggcagtggaaccaggacacccccctgaacagcgagtacgacttcgccctggtgaacatcggcagactggaggccgtgagcggcctgagcagagtgcagctgctgagacccggcagcctgcacaagttcatccccgaggagatcctgatccacggcagagacttcagactgctgagagtgggcttcgaggccggcggcctggagccccaggccttccaggtgaccatggccatcgtgcaggccagagcccagagcaaccaggcccagcagtacagcggcatcaccctgagcaaggccggccagggcagcggcagcagaaagccccccatccccctgatggagaccgccgaggactgggagaccgagagaaagaagcaggccgccagaggctggagagtgagcaccgtgaacgagagattcgacgtggccaccagcctgcccagatacttctgggtgcccaacagaatcctggacagcgaggtgagaagagccttcggccacttccaccagggcagaggccccagactgagctggcaccaccccggcggcagcgacctgctgagatgcggcggcttctacaccgccagcgaccccaacaaggaggacatcagagccgtggagctgatgctgcaggccggccacagcgacgtggtgctggtggacaccatggacgagctgcccagcctggccgacgtgcagctggcccacctgagactgagagccctgtgcctgcccgacagcagcgtggccgaggacaagtggctgagcgccctggagggcaccagatggctggactacgtgagagcctgcctgagaaaggccagcgacatcagcgtgctggtgaccagcagagtgagaagcgtgatcctgcagggcagcggcgtgagccccctgccctag

SEQ ID NO: 297277 - DNA, 819 bp, Artificial Sequence
  derived and/or modified sequence
atgtggtggggtggaaggggacagtctttcaatattgctccccagaaggaagaacctgaaatgggctccgtgcaggaaaaccgaatgcctgagcctcgcagccggcaacctagctcatgtctggcctctcggtgcctacccggcgagcagattctggcctgggccccaggcgtccggaaagggctggaacctgagttgagtggaaccctcatctgcactaacttcagggtgacattccagccctgcggttggcagtggaaccaggataccccgttaaattctgaatatgacttcgcacttgttaatatcggacgcctggaggctgtgtcgggactgagtcgcgtccaattgctgcgaccgggctctcttcacaagtttatcccagaggagatacttattcatggacgggacttcaggctcctgagggtgggctttgaagctggggggctggaaccgcaagcctttcaagtgacaatggcaatcgtccaggcacgcgcccagtctaaccaggcacagcagtattcagggatcactctgtctaaagccggacagggcagcggaagccgcaagcccccgatcccactgatggagaccgccgaggactgggagacagagcggaagaagcaggcagcccgtgggtggagagttagtacagtcaatgaacgattcgatgtggccacccgactccgctgttttagttcctcgcttatcgtgtccggcagcagtagtagttcctttcaactaattcttaactccctcagtttctcttttctcctattcatgacagtgtctggcttccttaccccgcttccatcgtag

SEQ ID NO: 297278 - DNA, 1065 bp, Artificial Sequence
  derived and/or modified sequence
atgcccgaaccccgcagtcggcagccatcatcctgtctggcaagccggtgcttgcccggcgagcagatcctggcttgggctccaggagtacgcaaaggcctcgagccggagctctccggaacgctcatctgtactaatttccgcgtcacttttcaaccgtgcggttggcagtggaaccaggatacccccctgaactcagagtacgatttcgccctggtaaacatcggaagacttgaggctgtcagcggactgagccgcgtccagctgctccgacctggatcattgcacaagttcatccctgaagaaatccttatccacggccgagacttcaggctactgcgggtgggcttcgaagcgggtggcctggaacctcaggccttccaggttaccatggctatcgtacaggcccgcgcccagtctaatcaagcacagcagtacagcgggatcacactctctaaggctgggcagggctcgggatcccgcaaaccaccaattcccctgatggagaccgcagaggattgggagactgagagaaaaaaacaggctgcgaggggttggcgggtgagtaccgtcaatgagcgtttcgacgttgctacctcacttccgcgctatttttgggtgcccaaccggattctcgacagcgaagtgaggagagcattcggacatttccaccaagggcgggggccacgcttgtcctggcaccaccccgggggtagcgatctgttacggtgtggaggcttttatactgcctcggatccgaataaagaggatattcgggccgtcgagctaatgttacaagccggacactctgacgtggttttggtggacacaatggatgagttgcctagtctagctgatgtgcaactggcccacctcaggctcagagcattgtgtctcccagattcttccgttgccgaagacaagtggcttagcgccttagaaggtactcggtggctcgactacgtgagggcttgcctgaggaaggcttcagacataagcgtgctagttacaagcagagtgcgctcagtcattctccagggctccggagtctccccactgccatag

SEQ ID NO: 297279 - DNA, 819 bp, Artificial Sequence
  derived and/or modified sequence
atgtggtggggcggccggggccagagcttcaacatcgccccccagaaggaggagcctgagatgggctctgtgcaggagaacaggatgcctgagcccaggagccggcagcccagcagctgcctggccagccgctgcctgcctggagagcagatcctggcctgggcccctggggtgaggaagggcctggagcctgagctgagcggcaccctcatctgcaccaacttccgggtgaccttccagccctgtggctggcagtggaaccaggacacccccctgaacagtgaatatgactttgccctggtgaacatcggccgcctggaggccgtgtctggcctgagccgggtgcagctgctgcggcccggcagcctgcacaagttcatccctgaggagatcctgatccacggccgggacttccggctgctgcgggtgggctttgaagctgggggcctggagccccaggccttccaggtgaccatggccatcgtgcaggcccgggcccagagcaaccaggcccagcagtacagcggcatcaccctgagcaaggccggccagggcagcggcagcaggaagccacccatccccctgatggagacagctgaggactgggagacagagaggaagaagcaggccgcccggggctggagggtgtccacagtgaatgaaagatttgatgtggccacccggctgcgctgcttcagcagcagcctgattgtgtctggcagcagcagcagcagcttccagctgatcctgaacagcctgtccttctccttcctgctcttcatgacagtgtctggcttcctgacccccctgcccagctag

SEQ ID NO: 297280 - DNA, 1065 bp, Artificial Sequence
  derived and/or modified sequence
atgcctgagcccaggagccggcagcccagcagctgcctggccagccgctgcctgcctggagagcagatcctggcctgggcccctggggtgaggaagggcctggagcctgagctgagcggcaccctcatctgcaccaacttccgggtgaccttccagccctgtggctggcagtggaaccaggacacccccctgaacagtgaatatgactttgccctggtgaacatcggccgcctggaggccgtgtctggcctgagccgggtgcagctgctgcggcccggcagcctgcacaagttcatccctgaggagatcctgatccacggccgggacttccggctgctgcgggtgggctttgaagctgggggcctggagccccaggccttccaggtgaccatggccatcgtgcaggcccgggcccagagcaaccaggcccagcagtacagcggcatcaccctgagcaaggccggccagggcagcggcagcaggaagccacccatccccctgatggagacagctgaggactgggagacagagaggaagaagcaggccgcccggggctggagggtgtccacagtgaatgaaagatttgatgtggccaccagcctgccccgctacttctgggtgcccaaccgcatcctggacagcgaggtgagaagagccttcggccacttccaccagggccggggcccccggctgtcctggcaccaccctgggggcagtgacctgctgcgctgtggcggcttctacacagccagtgaccccaacaaggaggacatccgggctgtggagctgatgctgcaggccggccacagtgatgtggtgctggtggacaccatggatgagctgcccagcctggctgatgtgcagctggcccacctgcggctgcgggccctgtgcctgcctgacagctctgtggccgaggacaagtggctgagcgccctggagggcacccgctggctggactatgtgcgggcctgcctgaggaaggccagtgacatctctgtgctggtgaccagccgggtgcgcagcgtcatcctgcagggcagcggcgtgagccccctgccctag

SEQ ID NO: 297281 - DNA, 819 bp, Artificial Sequence
  derived and/or modified sequence
atgtggtggggcggccggggccagagcttcaacatcgccccccagaaggaggaacctgagatgggctcagtccaggaaaacaggatgcctgagcctagatccagacagccctcaagctgcctggcgagccgttgtcttcccggagaacagatcttagcttgggctccgggcgtgcggaaaggactcgaacctgagctgtcaggcacactgatatgtacgaactttagagtcacctttcagccttgcggctggcagtggaatcaagatacgcccctaaactcagagtacgactttgcattggtaaacatagggaggctcgaagcggtcagcggcctgagccgggtccaactgcttcgccctggttcactgcacaaattcattccggaggaaatccttatccatggccgggatttcagactcctgagagtcggcttcgaggccgggggcttggagccccaggcctttcaggtcaccatggccattgttcaggctcgagctcagtcgaaccaagctcaacagtacagcggtatcacactcagtaaagccggtcagggctccggctcaagaaaaccacccatccccttaatggagactgccgaggattgggagaccgaacgcaaaaagcaggccgcccgcggatggagggtgtctactgtcaacgaacgctttgatgtagccactcgcctgaggtgcttctccagcagccttatagtgtctgggtccagttcatcctccttccagcttattcttaacagtctgtcctttagttttctcctttttatgaccgtgagcggattcctgaccccattgcccagctag

SEQ ID NO: 297282 - DNA, 1065 bp, Artificial Sequence
  derived and/or modified sequence
atgcccgagccccggagccggcagcccagcagctgcctggccagcaggtgcctacctggcgagcagattttagcatgggcaccaggagtccggaagggcctcgagccagagctatcaggcactttgatttgtaccaacttccgtgtaacatttcagccctgtggctggcagtggaatcaggatactccacttaacagtgaatacgattttgcactcgtaaacattggacggctcgaggctgtcagcggcctctcaagggtccagctgttgagaccaggcagtctccataagttcataccagaggagattcttatccacgggcgagatttccggctgctccgtgtcgggttcgaagccggaggattggaacctcaggctttccaggttactatggccattgtccaggctcgggcccagtcaaaccaggcgcaacagtactctggaatcacactgtcaaaggccggccagggatctgggtcccgaaagccccctattcctctcatggaaacagcagaagactgggaaacagagcggaaaaaacaggcagccagagggtggcgagtatctacggttaatgagagatttgacgtcgctactagtctgcctcgatatttctgggttccaaatcgcatcctggacagcgaagttaggagggcattcggccattttcaccagggaagggggccccgcctgtcgtggcaccacccagggggctccgacctcttgagatgcggcggattttacacagcctcagatccgaataaggaggacatccgggcggtcgagttgatgttgcaggcaggccactccgatgtggtgctcgtggatactatggacgagctccccagcttggccgacgtgcagctggcacacttgagactacgggccttgtgtctgccggatagctccgtggcagaagataaatggctgtcagccctagaaggcacccgctggcttgactacgttagggcctgtctgcgcaaagccagtgatatctccgtcctggtgacctcacgcgtgcgctccgttatactgcagggtagtggcgtgtccccactgccctag

SEQ ID NO: 297283 - DNA, 2689 bp, Artificial Sequence
  derived and/or modified sequence
catctctcccgccctctccagagtcgactgaagtttccgaggagacttctcaggctgggctggacacacctttccaaggacccccaaactctgctccgtgcacgtcaaatgctcctttcccttgtgtccaaccccctacccctctccctaacacccctcttctcaacaagactcagcctctccccgaggtgggtgagcatccttgaggtttcccacccttaactgctgtgtccccggatggagccagagaaatgtggtgggggggccggggccagagtttcaacattgccccccagaaggaggagccagagatggggtctgtccaggaaaataggatgccggagcccaggagtcgtcagcctagcagttgcctggcctccagatgcctcccaggggagcagatcctagcatgggccccaggggtgaggaagggcctggaaccagaattgtctggaaccctgatctgtaccaactttagggtcaccttccagccctgtggatggcagtggaatcaggacactcccttgaacagtgaatacgattttgccctggtcaacattggacgattagaggctgtgagcggcttgtcccgagtccagctcctccgtccagggtccctgcataaatttatccctgaggagattctgattcatggccgagacttccggctgctcagagttggttttgaggctggaggcctagagcctcaggcttttcaggtgaccatggccattgtccaagccagagctcagagcaatcaagcccaacagtattcggggataaccctgagcaaggctggccagggttctggctccagaaaaccaccaattcctctcatggagacagcggaagactgggagactgagcggaagaagcaggcagccagaggctggagggtcagcacggtcaacgagaggttcgacgtagccaccagcctcccccgttacttctgggtccctaaccgaattctggacagtgaggtcaggagagcatttggccactttcatcagggccgtggaccgcgcttgtcctggcatcaccctgggggcagtgatcttctccgctgtggaggcttctatacagccagtgaccctaacaaggaggatatcagagcagtggagttgatgctccaggctgggcattcagatgttgtcctggtagacactatggatgagctgcccagccttgcagatgtccaacttgcccacctgaggctgagggccctctgcctgcctgattcatctgtagctgaggataaatggctttcagccctggaaggaacacgatggctggactatgtcagggcttgtcttcgaaaggccagtgacatttcagtattagtgacatccagggttcgttctgtaatacttcaaggctccggtgtttctcctcttccttgattgtgtctggcagctcctccagcagtttccagctgattttgaattctctgagtttttccttcttgctcttcatgacagtgtcagggttcctgacacccttaccttcctgagaaataccccctgggagcgcggaaagcagagcggacagttaaactcctatacacaagtctacaccccaggatactcccagcctccagctgggaactcttttaacctgcagctgtctgtctgggactgggatttacgttatagcaatgcacagatactacaattccagaatcctggctatgacccagaacactgtccagattcctggctccctagaccacagccaagcttcatggttcctggaccccccagttctgtgtggctcttctctagaggagcattgacccccctgaatcagctctgtccttggcgggacagtccttccctgctggcagtctcttctcgttggctccctcgacctgctatctcctctgaaagcctggctgaccaggaatggggtctcccctcacattggggagcttgccctttacctccagggctgctgctgcctgggtatctgggaccccagatcaggctctggagacgctgctacctgaggggaaggcctgaggtccagatgggcctctcagctcccacaatctctggcctccaggatgagctatcccatcttcaggagttattacggaaatggacaccaagaatatctcctgaggatcactccaagaaaagagatccacataccattctcaatcccactgaaattgctggcattctcaaaggcagggcagagggggatctggggtagaggagggttctgtctaatcttttttttttttttttgtatctgcacttgcagcctcagctttcacacttcagcccttaagttcactaagaaggtctgagtttctgctgcagatagtggtgttaactgctccaactcttgtcttgcttagtttctacaaatatttttgcttcttgtcatttgaaggattaagaaacaaaaacaatccagaaattgatcggtttttttaggccaatcccatcccttctggataaccagatgttaaatcatgagatcagagatgctgttcatcagtcccaacaagatggcctagaaatcgcattctcacctcgccttgctgctgctttaattccaagttctatttcttcccttatagttttctatgggaatgaggcggatacaggaaacaccctatctcctctgtatttttgtagtggaatttctatttaaggggctcattaaagcatagtatttatac

SEQ ID NO: 297284 - DNA, 819 bp, Artificial Sequence
  derived and/or modified sequence
atgtggtggggaggtaggggccagtcgtttaacatcgccccacagaaagaggaaccagagatgggatcggtgcaagaaaaccggatgccggaaccgaggtcaaggcagccaagctcctgtctagcctctcggtgtctacctggcgagcagatccttgcctgggcccctggggtgagaaaagggctagagcctgagttgtcaggaacccttatctgcactaactttcgcgttaccttccagccttgcggctggcagtggaaccaagacacccctctcaattccgagtatgactttgcactcgtgaatattggacgtctggaagcagtgtcgggccttagtcgggttcagttgctcaggccgggaagcctgcataaatttattcctgaggagatactcattcacggcagggatttccggctgttgcgggttgggtttgaagcaggcggactggaaccccaggcattccaggtgaccatggctattgttcaagccagggcccagagcaatcaggcccagcagtactccggaataactctcagtaaggccggtcagggtagtggatcacggaaacctccgatcccattgatggagacagccgaagattgggagaccgagagaaaaaagcaagctgcacgcggatggagggtctcaaccgtcaatgagcgctttgacgtagccactagactgcgttgcttttctagttcattaattgtgagcgggagttcctcttcttcttttcaactgatcctgaactcgttgagcttcagcttcctgttgttcatgaccgtctccggctttctgactccactgccttcatag

SEQ ID NO: 297285 - DNA, 1065 bp, Artificial Sequence
  derived and/or modified sequence
atgccggagcctcgaagtagacagccctcttcctgcttggctagcaggtgtcttcctggggaacagatacttgcctgggcccctggtgtccgtaaggggctcgaaccagagctctcagggactctgatttgtactaacttccgggtaacctttcagccgtgcggctggcagtggaaccaggacacgcccttgaatagcgagtatgattttgcgttggtgaacattggtcgactggaggcagtcagcggactctctcgtgtgcagctgctcaggccagggtccttgcacaaattcataccagaggaaattttaattcacggcagagattttcgattgctgcgggtgggttttgaagcaggtggcctggaaccccaggcttttcaggtaaccatggctattgttcaagcgagagctcagtctaatcaagcccagcagtattccggtatcacgctctctaaagccggtcagggctctggtagccggaaaccaccaattccgctgatggagactgctgaagattgggagacagagcgaaaaaaacaggcggctaggggctggcgtgtgtcaaccgttaatgaaaggtttgacgttgcgacatcactgcccaggtacttttgggtacccaacaggatccttgactccgaggtaagaagggcgtttggtcattttcatcaggggaggggccctcggctcagctggcatcaccccggaggcagcgacctgctgagatgcgggggattttacaccgctagcgacccaaacaaggaagatattagggctgttgaactgatgttgcaagccggacattccgacgtggtgctcgttgataccatggacgagcttcccagccttgccgacgtccaattggcccatcttcggctaagagctctgtgtctccccgacagctcagtcgcagaggacaagtggctgagcgccttggagggtacaagatggctagactacgtgagagcttgcttgcggaaagccagtgacatcagcgtgctcgtcacaagccgcgtgcggagtgttatactccaaggtagtggcgtgtctccccttccatag

SEQ ID NO: 297286 - protein, 561 aa, Artificial Sequence
  derived and/or modified sequence
MSTERTSWTSLSTIQKIALGLGIPASATVAYILYRRYRESREERLTFVGEDDIEIEMRVPQEAVKLIIGRQGANIKQLRKQTGARIDVDTEDVGDERVLLISGFPVQVCKAKAAIHQILTENTPVSEQLSVPQRSVGRIIGRGGETIRSICKASGAKITCDKESEGTLLLSRLIKISGTQKEVAAAKHLILEKVSEDEELRKRIAHSAETRVPRKQPISVRREDMTEPGGAGEPALWKNTSSSMEPTAPLVTPPPKGGGDMAVVVSKEGSWEKPSDDSFQKSEAQAIPEMPMFEIPSPDFSFHADEYLEVYVSASEHPNHFWIQIVGSRSLQLDKLVNEMTQHYENSVPEDLTVHVGDIVAAPLPTNGSWYRARVLGTLENGNLDLYFVDFGDNGDCPLKDLRALRSDFLSLPFQAIECSLARIAPSGDQWEEEALDEFDRLTHCADWKPLVAKISSYVQTGISTWPKIYLYDTSNGKKLDIGLELVHKGYAIELPEDIEENRAVPDMLKDMATETDASLSTLLTETKKSSGEITHTLSCLSLSEAASMSGDDNLEDDYLL

SEQ ID NO: 297287 - protein, 557 aa, Artificial Sequence
  derived and/or modified sequence
MSTERTSWTSLSTIQKIALGLGIPASATVAYILYRRYRESREERLTFVGEDDIEIEMRVPQEAVKLIIGRQGANIKQTGARIDVDTEDVGDERVLLISGFPVQVCKAKAAIHQILTENTPVSEQLSVPQRSVGRIIGRGGETIRSICKASGAKITCDKESEGTLLLSRLIKISGTQKEVAAAKHLILEKVSEDEELRKRIAHSAETRVPRKQPISVRREDMTEPGGAGEPALWKNTSSSMEPTAPLVTPPPKGGGDMAVVVSKEGSWEKPSDDSFQKSEAQAIPEMPMFEIPSPDFSFHADEYLEVYVSASEHPNHFWIQIVGSRSLQLDKLVNEMTQHYENSVPEDLTVHVGDIVAAPLPTNGSWYRARVLGTLENGNLDLYFVDFGDNGDCPLKDLRALRSDFLSLPFQAIECSLARIAPSGDQWEEEALDEFDRLTHCADWKPLVAKISSYVQTGISTWPKIYLYDTSNGKKLDIGLELVHKGYAIELPEDIEENRAVPDMLKDMATETDASLSTLLTETKKSSGEITHTLSCLSLSEAASMSGDDNLEDDYLL

SEQ ID NO: 297288 - protein, 337 aa, Artificial Sequence
  derived and/or modified sequence
MTEPGGAGEPALWKNTSSSMEPTAPLVTPPPKGGGDMAVVVSKEGSWEKPSDDSFQKSEAQAIPEMPMFEIPSPDFSFHADEYLEVYVSASEHPNHFWIQIVGSRSLQLDKLVNEMTQHYENSVPEDLTVHVGDIVAAPLPTNGSWYRARVLGTLENGNLDLYFVDFGDNGDCPLKDLRALRSDFLSLPFQAIECSLARIAPSGDQWEEEALDEFDRLTHCADWKPLVAKISSYVQTGISTWPKIYLYDTSNGKKLDIGLELVHKGYAIELPEDIEENRAVPDMLKDMATETDASLSTLLTETKKSSGEITHTLSCLSLSEAASMSGDDNLEDDYLL

SEQ ID NO: 297289 - protein, 131 aa, Artificial Sequence
  derived and/or modified sequence
MSTERTSWTSLSTIQKIALGLGIPASATVAYILYRRYRESREERLTFVGEDDIEIEMRVPQEAVKLIIGRQGANIKQLRKQTGARIDVDTEDVGDERVLLISGFPVQVCKAKAAIHQILTENTPVSEQLSV

SEQ ID NO: 297290 - DNA, 1686 bp, Artificial Sequence
  derived and/or modified sequence
atgagcaccgagagaaccagctggaccagcctgagcaccatccagaagatcgccctgggcctgggcatccccgccagcgccaccgtggcctacatcctgtacagaagatacagagagagcagagaggagagactgaccttcgtgggcgaggacgacatcgagatcgagatgagagtgccccaggaggccgtgaagctgatcatcggcagacagggcgccaacatcaagcagctgagaaagcagaccggcgccagaatcgacgtggacaccgaggacgtgggcgacgagagagtgctgctgatcagcggcttccccgtgcaggtgtgcaaggccaaggccgccatccaccagatcctgaccgagaacacccccgtgagcgagcagctgagcgtgccccagagaagcgtgggcagaatcatcggcagaggcggcgagaccatcagaagcatctgcaaggccagcggcgccaagatcacctgcgacaaggagagcgagggcaccctgctgctgagcagactgatcaagatcagcggcacccagaaggaggtggccgccgccaagcacctgatcctggagaaggtgagcgaggacgaggagctgagaaagagaatcgcccacagcgccgagaccagagtgcccagaaagcagcccatcagcgtgagaagagaggacatgaccgagcccggcggcgccggcgagcccgccctgtggaagaacaccagcagcagcatggagcccaccgcccccctggtgacccccccccccaagggcggcggcgacatggccgtggtggtgagcaaggagggcagctgggagaagcccagcgacgacagcttccagaagagcgaggcccaggccatccccgagatgcccatgttcgagatccccagccccgacttcagcttccacgccgacgagtacctggaggtgtacgtgagcgccagcgagcaccccaaccacttctggatccagatcgtgggcagcagaagcctgcagctggacaagctggtgaacgagatgacccagcactacgagaacagcgtgcccgaggacctgaccgtgcacgtgggcgacatcgtggccgcccccctgcccaccaacggcagctggtacagagccagagtgctgggcaccctggagaacggcaacctggacctgtacttcgtggacttcggcgacaacggcgactgccccctgaaggacctgagagccctgagaagcgacttcctgagcctgcccttccaggccatcgagtgcagcctggccagaatcgcccccagcggcgaccagtgggaggaggaggccctggacgagttcgacagactgacccactgcgccgactggaagcccctggtggccaagatcagcagctacgtgcagaccggcatcagcacctggcccaagatctacctgtacgacaccagcaacggcaagaagctggacatcggcctggagctggtgcacaagggctacgccatcgagctgcccgaggacatcgaggagaacagagccgtgcccgacatgctgaaggacatggccaccgagaccgacgccagcctgagcaccctgctgaccgagaccaagaagagcagcggcgagatcacccacaccctgagctgcctgagcctgagcgaggccgccagcatgagcggcgacgacaacctggaggacgactacctgctgtag

SEQ ID NO: 297291 - DNA, 1674 bp, Artificial Sequence
  derived and/or modified sequence
atgagcaccgagagaaccagctggaccagcctgagcaccatccagaagatcgccctgggcctgggcatccccgccagcgccaccgtggcctacatcctgtacagaagatacagagagagcagagaggagagactgaccttcgtgggcgaggacgacatcgagatcgagatgagagtgccccaggaggccgtgaagctgatcatcggcagacagggcgccaacatcaagcagaccggcgccagaatcgacgtggacaccgaggacgtgggcgacgagagagtgctgctgatcagcggcttccccgtgcaggtgtgcaaggccaaggccgccatccaccagatcctgaccgagaacacccccgtgagcgagcagctgagcgtgccccagagaagcgtgggcagaatcatcggcagaggcggcgagaccatcagaagcatctgcaaggccagcggcgccaagatcacctgcgacaaggagagcgagggcaccctgctgctgagcagactgatcaagatcagcggcacccagaaggaggtggccgccgccaagcacctgatcctggagaaggtgagcgaggacgaggagctgagaaagagaatcgcccacagcgccgagaccagagtgcccagaaagcagcccatcagcgtgagaagagaggacatgaccgagcccggcggcgccggcgagcccgccctgtggaagaacaccagcagcagcatggagcccaccgcccccctggtgacccccccccccaagggcggcggcgacatggccgtggtggtgagcaaggagggcagctgggagaagcccagcgacgacagcttccagaagagcgaggcccaggccatccccgagatgcccatgttcgagatccccagccccgacttcagcttccacgccgacgagtacctggaggtgtacgtgagcgccagcgagcaccccaaccacttctggatccagatcgtgggcagcagaagcctgcagctggacaagctggtgaacgagatgacccagcactacgagaacagcgtgcccgaggacctgaccgtgcacgtgggcgacatcgtggccgcccccctgcccaccaacggcagctggtacagagccagagtgctgggcaccctggagaacggcaacctggacctgtacttcgtggacttcggcgacaacggcgactgccccctgaaggacctgagagccctgagaagcgacttcctgagcctgcccttccaggccatcgagtgcagcctggccagaatcgcccccagcggcgaccagtgggaggaggaggccctggacgagttcgacagactgacccactgcgccgactggaagcccctggtggccaagatcagcagctacgtgcagaccggcatcagcacctggcccaagatctacctgtacgacaccagcaacggcaagaagctggacatcggcctggagctggtgcacaagggctacgccatcgagctgcccgaggacatcgaggagaacagagccgtgcccgacatgctgaaggacatggccaccgagaccgacgccagcctgagcaccctgctgaccgagaccaagaagagcagcggcgagatcacccacaccctgagctgcctgagcctgagcgaggccgccagcatgagcggcgacgacaacctggaggacgactacctgctgtag

SEQ ID NO: 297292 - DNA, 396 bp, Artificial Sequence
  derived and/or modified sequence
atgagcaccgagagaaccagctggaccagcctgagcaccatccagaagatcgccctgggcctgggcatccccgccagcgccaccgtggcctacatcctgtacagaagatacagagagagcagagaggagagactgaccttcgtgggcgaggacgacatcgagatcgagatgagagtgccccaggaggccgtgaagctgatcatcggcagacagggcgccaacatcaagcagctgagaaagcagaccggcgccagaatcgacgtggacaccgaggacgtgggcgacgagagagtgctgctgatcagcggcttccccgtgcaggtgtgcaaggccaaggccgccatccaccagatcctgaccgagaacacccccgtgagcgagcagctgagcgtgtag

SEQ ID NO: 297293 - DNA, 1686 bp, Artificial Sequence
  derived and/or modified sequence
atgtcaactgagcggacaagctggactagcctgtcaacaatccagaaaatcgctctgggcctgggcatccctgcctctgccaccgtggcatacatcctgtacaggaggtacagagaatcaagggaagagcggctgacatttgtgggagaagacgacattgaaatcgagatgagagtgccacaggaagccgtgaagctgataatcggcagacagggcgctaacattaaacagctgcgcaaacaaaccggggctaggatcgacgtcgacaccgaggacgtgggtgatgaaagagtgctcctgatttctggattcccagtgcaggtctgcaaggccaaggccgccatccaccagattctgacggagaatacacctgtgtcagaacagttatcagtcccgcaacggtctgtcggacgcattattgggagggggggagagaccataaggtcaatctgtaaggcatcaggcgctaagataacatgcgataaagaatcggaggggacgctgttactcagtcgacttataaaaatctccgggacccagaaggaggtggcagctgccaaacatctcatcttggagaaggtctcagaggatgaagagctgcgcaagcggatagcgcattccgctgagacacgcgtgcctaggaagcagccgatctccgtcagacgtgaggatatgacggagccaggaggagctggcgaacccgccctctggaagaatacctccagttctatggagcccaccgccccgctagtgactccacccccaaaaggcggcggtgatatggccgtagttgtcagtaaggaaggtagctgggagaaaccttctgacgatagctttcagaagtctgaggcacaggccattccggaaatgcctatgtttgaaatccccagtccggatttttccttccatgccgatgagtacctcgaagtgtacgtgtccgcctcagagcaccccaaccacttctggatccaaattgtgggaagccggtccctgcagttggataaactggtgaatgaaatgacacagcactacgagaattctgtccccgaagatctgacagtgcatgtgggggacattgtggctgcccctcttcccacaaatggatcttggtaccgggcacgggttctcgggactcttgagaacggaaatctggacctctactttgttgattttggcgataacggggactgtccgttaaaggacctgcgagccctgcggtcagattttctctccctgcctttccaggcgatagagtgctcgctcgctcgtatagctccaagcggtgaccagtgggaggaagaggccctggacgaattcgatagactgacccattgcgcagactggaagcctctggttgctaaaatctccagttacgtccagacgggaatcagcacctggccaaagatctacctctacgacacctctaatgggaagaaattagacataggactcgaattggtgcataaaggctacgccatagagctgcccgaagatattgaagagaaccgggcagtgcccgatatgctcaaggatatggccacagagacagacgcctcactgagcactctcttgacggagaccaagaaatcttccggggagatcacacacaccctatcatgtctgtcgctgagcgaggcagccagtatgtcgggagatgataacttggaggacgactacctattatag

SEQ ID NO: 297294 - DNA, 1674 bp, Artificial Sequence
  derived and/or modified sequence
atgtcaaccgaacgaacgagctggacttcactgtccactattcagaagatcgctcttggactgggcattcctgcaagcgccacagttgcctacattctgtaccggcggtacagagagtctagggaggaaaggctgacctttgtgggtgaggacgatattgagatcgagatgagggtgcctcaggaggctgtcaagctgatcattggtcgacagggcgccaacattaagcaaactggtgcccgtatcgatgtggacactgaggacgtgggagatgagcgcgtgctgcttatttctgggttcccagtccaggtctgtaaggcaaaagccgcaatccaccagatcctgactgaaaatactccagtgtctgagcagcttagcgtacctcagaggagcgtaggccggattatcggccgcgggggtgagacaataagaagtatctgtaaggcttctggcgcaaagataacctgcgacaaagagtctgagggtaccctattactttctcggctcattaagatctccggtacgcagaaggaagtggctgccgccaagcatttaatcctcgagaaagtatctgaggacgaagaactacgtaaaaggatagcccatagcgctgagacaagggtgcccaggaaacaacccatttccgttcgccgcgaagatatgacagagccaggtggggccggcgagccggcactgtggaagaatacctcctcttctatggagcctacagctcctctggtcaccccgcccccgaaaggggggggggacatggcagtagtcgtgtccaaggagggtagttgggaaaaaccatctgatgattctttccagaaaagcgaagctcaagcaatccctgagatgccaatgtttgaaatccctagcccggacttcagcttccacgctgacgaatacctggaagtgtacgtctcggcctctgagcacccaaatcacttctggatccagatcgttggctcaagatccctacagctcgacaaactggtgaacgagatgactcaacattacgaaaatagcgtccccgaggatttaacagtacacgtcggcgatatcgtcgcggctcctcttccaactaacggatcctggtatcgggcacgcgtcctgggaacgttagaaaatggcaatttggatctctatttcgtcgattttggagacaacggcgactgtccactgaaagaccttagggccctgcgttcagactttttgtccctgccatttcaggctattgaatgctcattagcccgtatcgccccaagtggggatcagtgggaggaggaagcgctcgacgaattcgatcgcctaacccattgtgcagactggaaaccattggtggctaagatttcaagctatgtccagaccggcattagtacttggccaaagatatacctgtacgatacatccaatggaaagaagctggacattggtctggagcttgtgcataagggatacgcgatcgaactgcctgaagatatagaggagaacagagctgttcccgacatgcttaaggatatggcaacggagaccgatgcgtccttaagtaccctcctgacagaaactaagaaatcaagtggggagatcactcacactttgagctgcctttctctatcagaggccgcatctatgtccggtgacgataatcttgaagacgactacctgttgtag

SEQ ID NO: 297295 - DNA, 1686 bp, Artificial Sequence
  derived and/or modified sequence
atgagcacggaaaggacttcttggacctccctaagtactatccaaaagattgcgttggggttggggattcctgcctctgctactgttgcatatatcctgtatagacgctatagagaaagcagagaagagcggttgacgtttgtcggcgaggatgacattgaaatcgaaatgagagtcccacaggaggccgtgaagcttataattggacgccaaggagcgaacatcaaacagcttaggaaacagacaggggctaggattgacgttgacacagaggacgtgggagacgagcgcgtgttacttatctctggctttccagtgcaagtttgcaaagccaaagccgcaatccatcagatactgactgagaacacccccgtttccgagcagctttcggtgccgcagcgcagcgttgggcgcattatcggaaggggtggggaaaccataaggtcaatctgtaaagcctccggcgccaagattacatgcgacaaagagtcagaaggaaccttgctattaagtcggttgataaagataagcggcacacagaaagaggtggctgcagcaaaacaccttattctggagaaggtgtcagaagacgaggaactacgaaaaaggatcgcccattctgccgaaacccgagtgccacgcaagcaacctatttccgtccgtagagaagatatgacagagcccgggggagccggggagcccgccctttggaagaacacttccagcagcatggaacccacggcacccttagttacccccccaccaaagggtggcggtgacatggccgtcgtggtgtcaaaggaaggttcctgggaaaagcccagtgatgacagtttccagaaatcggaagcacaggcaattccagagatgccaatgttcgaaattcccagccctgatttctcctttcacgctgatgagtaccttgaagtttacgtttcagcctctgagcacccaaatcatttttggattcagattgtgggaagccggtccctgcagttagacaagctggttaatgaaatgactcagcattacgaaaactcagtgcctgaagatctgactgttcatgtgggtgatattgtcgccgccccgttacctacgaacggtagctggtatcgtgctcgggtactgggcaccctcgagaatggcaatctggacctatacttcgtggattttggcgataacggtgattgccctttaaaggacctgcgggctctcagaagcgacttcctctccctcccgtttcaagctattgaatgttccctggcccgtatcgcaccctcgggtgaccagtgggaagaagaagccctcgatgagttcgaccggctcacccactgtgccgattggaaacccctggtggctaagatctcaagttatgtgcaaacaggcatctctacttggccgaaaatttacctatacgatacctcaaacggaaagaagcttgatattgggctcgaacttgtgcacaaaggctacgcaatagaattgcccgaggacatcgaggagaatagggcagtcccggatatgctgaaggacatggcaacagaaaccgatgcatctctttccactttactcacagaaactaaaaaatcgtctggcgaaattactcacacactgtcctgtctcagcctgtctgaagctgcatcgatgtccggcgatgataatctggaagatgactacctgctgtag

SEQ ID NO: 297296 - DNA, 1686 bp, Artificial Sequence
  derived and/or modified sequence
atgagtacagagcgaactagctggacaagtctgagcaccatccagaagattgctctcggtctagggattcctgccagtgccactgtggcttatatcctgtatcggcgctatcgggagtccagagaggaaagactcacatttgttggcgaagacgatattgaaatcgaaatgcgagttcctcaggaagcagtaaagctgattatcggccgccaaggcgccaacatcaagcagctgagaaaacagactggcgccagaattgacgttgacaccgaggacgtgggagacgagagggttctactgatcagtggattccccgtccaggtgtgcaaagctaaagctgccatccaccaaattctgacagagaatacccctgttagcgaacagctgtctgtgcctcagaggagtgtggggcgcattattggacgcggcggggaaacgattagatccatttgtaaggccagtggggctaagatcacctgtgataaggagtccgaagggaccttgctgctgagtcgacttataaagatctctggtacccagaaggaagttgccgcggctaaacatctcatcctggaaaaggtgtcagaagacgaggaactgcgcaagcgcatagcccatagcgcggagactagagttcccagaaaacagcccatttcagtcaggcgagaggatatgaccgagccaggcggcgcaggagaaccagccctttggaaaaatacctctagttctatggagcccactgcaccactggtgactcctccacctaaggggggcggagacatggccgtcgtcgtgagtaaagaaggctcctgggagaaacccagtgacgattccttccagaagtcagaagcccaggcgatcccggagatgcccatgttcgaaatccctagtcctgactttagcttccacgccgatgaatacctggaggtctacgtctccgccagcgagcacccgaaccacttctggatccagatcgtggggtctagaagccttcagcttgataaactcgtgaacgagatgactcagcactacgagaattcagtcccagaagacctcaccgtgcacgtgggagatatagttgccgcaccactgccaacaaacggaagttggtatcgcgcccgcgtgttagggactctggaaaatggcaatctcgacctgtactttgtggactttggtgacaatggggactgtcctctgaaggatctccgtgcattgagatccgactttcttagcttaccgtttcaggccatcgaatgctctctggcaagaattgccccttccggcgaccagtgggaggaggaggcattggatgaattcgacaggttgacacattgcgccgactggaagccgctggtcgccaaaatcagttcctatgtgcagactgggatctccacttggcctaaaatctatctctatgacacgtcaaatggaaagaagctggacatcggcctcgaactggtccataaggggtatgccatcgagctgcccgaggatatagaagaaaatcgcgctgtccccgatatgctcaaggatatggcgaccgagaccgacgcctcattaagcacccttctcacagagaccaagaagagtagcggtgaaatcactcataccctgtcttgcctaagtctctccgaagcagcgagcatgtctggggacgataatctcgaggatgattacctgctctag

SEQ ID NO: 297297 - DNA, 1686 bp, Artificial Sequence
  derived and/or modified sequence
atgtccaccgagagaacttcctggacttctttgtccactatccagaaaattgccctaggactgggtattcctgcatctgctaccgttgcatacatcctgtaccgccggtaccgggagtcccgggaggaacgcctgaccttcgtcggggaagatgacattgagatcgagatgagggtgccacaggaggccgttaaattaatcattggtcgacagggggcaaatattaaacagcttcgaaagcagactggcgcaaggatcgacgtcgataccgaggatgtgggagacgagcgagtacttctgatttcaggcttcccagtgcaggtgtgcaaggccaaggccgccattcaccagattctcaccgaaaatacaccggtgagtgaacagctctctgtcccgcagagaagcgttggcaggatcattggacgtggaggtgagactattcgatcaatctgcaaggcatctggcgcaaagatcacctgcgacaaagagtccgagggtacactgctgctgagcagacttattaagatcagtgggacacagaaagaagtcgctgccgccaagcatctcatcttggaaaaagtctccgaagacgaggagcttagaaaacgaattgcccactctgccgagacacgtgtgccacgtaagcagcctatcagcgtccgacgcgaggatatgactgaaccaggaggcgcaggtgagcccgccttgtggaagaacaccagctccagtatggaacccactgctcctctggtgactccaccccctaaagggggtggcgatatggccgtggtcgtgagcaaagaaggcagctgggagaagcctagcgacgatagtttccaaaagtctgaagcgcaggccatccccgagatgcctatgttcgagattccaagccccgattttagctttcatgctgatgagtacttggaagtgtatgtgtcagcttctgagcaccccaaccacttctggatccagattgttggtagccgtagcctccagctcgacaagctggttaacgagatgacgcagcattacgaaaactcagtcccggaggatcttacagtgcacgtgggtgatatcgtggcggccccgctgcctaccaacgggtcttggtacagagccagagtgctgggaacacttgagaacggtaatctggatttgtattttgtcgacttcggggacaatggcgattgtcccttgaaggatcttagagcgcttcggtctgattttttgagcctgcccttccaggcaattgaatgctccctcgcacggatagctccttctggcgatcaatgggaggaagaggctctagatgagtttgatcggctgactcactgcgccgattggaaaccactggttgcgaaaatatcctcctacgttcaaactggtatctctacgtggcctaaaatctacttatacgacactagtaacggtaagaaactcgatatagggctggaactggtgcataagggctatgcaatcgagctcccagaggatattgaggaaaaccgggcagtgcctgatatgctaaaagatatggccactgagaccgacgccagtctttccaccctgctgaccgagacgaagaaatctagcggcgagattacacacacactcagctgcctgtccctatccgaagccgcctcaatgagtggagatgataatttagaggacgactatctgttgtag

SEQ ID NO: 297298 - DNA, 396 bp, Artificial Sequence
  derived and/or modified sequence
atgagcacggaacgcacgtcctggacgagtctgtctacgatccagaagatcgcgctaggactggggatccctgcaagcgctactgtagcttatatcttatatcgccgatatagggaaagccgtgaggaaagactgacgtttgtgggcgaggatgatatagagatcgagatgagagtcccccaggaggctgtcaaactcataatcggccgccagggagccaacataaaacagttgagaaagcagaccggagcacgcatagacgtggataccgaagatgttggagacgagagggtactgctgatatccggcttccccgtgcaagtgtgcaaggcgaaggcagccattcatcaaatcctgaccgagaacaccccggtgagcgaacagttgtccgtgtag

SEQ ID NO: 297299 - DNA, 1686 bp, Artificial Sequence
  derived and/or modified sequence
atgagcacagagaggacctcctggaccagcctgagcaccatccagaagatcgccctgggcctgggcatcccagccagcgccaccgtggcctacatcctgtaccgccgctaccgggagagccgggaggagcggctgacctttgtgggggaggatgacattgaaattgagatgagggtgccccaggaggccgtgaagctgatcatcggccggcagggcgccaacatcaagcagctgaggaagcagacaggagccagaattgatgtggacacagaagatgtgggagatgagcgggtgctgctgatcagcggcttccctgtgcaggtgtgcaaggccaaggccgccatccaccagatcctgacagagaacacccctgtgtctgagcagctgtctgtgccccagaggtctgtgggccgcatcatcggccggggcggggagaccatccgcagcatctgcaaggccagcggggccaagatcacctgtgacaaggagagcgagggcaccctgctgctgagccgcctcatcaagatcagcggcacccagaaggaggtggccgccgccaagcacctgatcctggagaaggtgtctgaagatgaggagctgaggaagagaattgcccacagcgctgagaccagggtgcccaggaagcagcccatctctgtgagaagagaggacatgacagagcccggcggggccggggagcccgccctgtggaagaacaccagcagctccatggagcccacagcccccctggtgaccccaccacccaagggcggcggggacatggctgtggtggtgtccaaggagggctcctgggagaagcccagtgatgacagcttccagaagtctgaggcccaggccatccctgagatgcccatgtttgagatccccagcccagacttctccttccacgcagatgagtacctggaggtgtatgtgtctgccagcgagcaccccaaccacttctggatccagatcgtgggcagccgcagcctgcagctggacaagctggtgaatgagatgacccagcactatgaaaattctgtgcctgaggacctgactgtgcacgtgggggacatcgtggccgcccccctgcccaccaacggctcctggtaccgggcccgggtgctgggcaccctggagaatggaaacctggacctgtactttgtggactttggagacaacggggactgccccctgaaggacctgcgggccctgcggagtgacttcctgagcctgcccttccaggccatcgagtgcagcctggcccgcatcgcccccagcggggaccagtgggaggaggaggccctggatgaatttgaccggctgacccactgtgccgactggaagcccctggtggccaagatcagcagctatgtgcagacaggcatcagcacctggcccaagatctacctgtatgacaccagcaatggcaagaagctggacatcggcctggagctggtgcacaagggctacgccatcgagctgcctgaagatattgaagaaaatagagctgtgcctgacatgctgaaggacatggccacagaaacagatgccagcctgagcaccctgctgacagagaccaagaagagcagtggagagatcacccacaccctgagctgcctgagcctgtctgaggccgcctccatgtctggagatgacaacctggaggatgactacctgctgtag

SEQ ID NO: 297300 - DNA, 1674 bp, Artificial Sequence
  derived and/or modified sequence
atgagcacagagaggacctcctggaccagcctgagcaccatccagaagatcgccctgggcctgggcatcccagccagcgccaccgtggcctacatcctgtaccgccgctaccgggagagccgggaggagcggctgacctttgtgggggaggatgacattgaaattgagatgagggtgccccaggaggccgtgaagctgatcatcggccggcagggcgccaacatcaagcagacaggagccagaattgatgtggacacagaagatgtgggagatgagcgggtgctgctgatcagcggcttccctgtgcaggtgtgcaaggccaaggccgccatccaccagatcctgacagagaacacccctgtgtctgagcagctgtctgtgccccagaggtctgtgggccgcatcatcggccggggcggggagaccatccgcagcatctgcaaggccagcggggccaagatcacctgtgacaaggagagcgagggcaccctgctgctgagccgcctcatcaagatcagcggcacccagaaggaggtggccgccgccaagcacctgatcctggagaaggtgtctgaagatgaggagctgaggaagagaattgcccacagcgctgagaccagggtgcccaggaagcagcccatctctgtgagaagagaggacatgacagagcccggcggggccggggagcccgccctgtggaagaacaccagcagctccatggagcccacagcccccctggtgaccccaccacccaagggcggcggggacatggctgtggtggtgtccaaggagggctcctgggagaagcccagtgatgacagcttccagaagtctgaggcccaggccatccctgagatgcccatgtttgagatccccagcccagacttctccttccacgcagatgagtacctggaggtgtatgtgtctgccagcgagcaccccaaccacttctggatccagatcgtgggcagccgcagcctgcagctggacaagctggtgaatgagatgacccagcactatgaaaattctgtgcctgaggacctgactgtgcacgtgggggacatcgtggccgcccccctgcccaccaacggctcctggtaccgggcccgggtgctgggcaccctggagaatggaaacctggacctgtactttgtggactttggagacaacggggactgccccctgaaggacctgcgggccctgcggagtgacttcctgagcctgcccttccaggccatcgagtgcagcctggcccgcatcgcccccagcggggaccagtgggaggaggaggccctggatgaatttgaccggctgacccactgtgccgactggaagcccctggtggccaagatcagcagctatgtgcagacaggcatcagcacctggcccaagatctacctgtatgacaccagcaatggcaagaagctggacatcggcctggagctggtgcacaagggctacgccatcgagctgcctgaagatattgaagaaaatagagctgtgcctgacatgctgaaggacatggccacagaaacagatgccagcctgagcaccctgctgacagagaccaagaagagcagtggagagatcacccacaccctgagctgcctgagcctgtctgaggccgcctccatgtctggagatgacaacctggaggatgactacctgctgtag

SEQ ID NO: 297301 - DNA, 396 bp, Artificial Sequence
  derived and/or modified sequence
atgagcacagagaggacctcctggaccagcctgagcaccatccagaagatcgccctgggcctgggcatcccagccagcgccaccgtggcctacatcctgtaccgccgctaccgggagagccgggaggagcggctgacctttgtgggggaggatgacattgaaattgagatgagggtgccccaggaggccgtgaagctgatcatcggccggcagggcgccaacatcaagcagctgaggaagcagacaggagccagaattgatgtggacacagaagatgtgggagatgagcgggtgctgctgatcagcggcttccctgtgcaggtgtgcaaggccaaggccgccatccaccagatcctgacagagaacacccctgtgtctgagcagctgtctgtgtag

SEQ ID NO: 297302 - DNA, 1686 bp, Artificial Sequence
  derived and/or modified sequence
atgagcaccgagcggaccagctggaccagcctgagcaccatccagaaaattgcgctgggtctgggcattcctgcttcagccactgtcgcgtatatcctgtataggagatacagggagagcagagaggagcggctcacctttgttggagaggatgatattgagatagagatgagagtgccgcaggaagccgttaagctgatcatcggacgccagggtgctaatattaaacaactgcggaaacagaccggcgcccgcatcgatgttgatactgaagacgtgggcgacgagagggtccttctgatcagcggattccccgtgcaggtttgtaaagctaaggctgcaattcatcagattctcacagaaaacaccccggtgtctgaacagctgtctgtgcctcagcgctccgtgggacgcatcatcggaaggggtggagagaccatcagatccatctgtaaagcatcgggcgccaagattacatgcgacaaggagtccgaggggacgctgctgctgtctaggttaataaagatcagcggtactcagaaggaagtggctgccgccaagcatcttattctggaaaaagtctccgaggacgaggagctccgaaagagaattgctcactccgctgaaacacgcgttccaaggaagcagccaatctcggtcaggcgcgaagacatgactgagccaggaggtgctggcgaacccgccctatggaaaaacaccagctcttccatggagccaaccgcccctctggtgacgcctcctcccaaaggcggtggcgacatggctgtggttgtgtcgaaagaggggtcctgggagaagcccagcgatgacagctttcagaagtccgaagcccaggctattcctgaaatgcccatgttcgaaatcccatccccagacttttcttttcacgcagacgagtacctggaggtatatgtctctgcttccgagcaccccaatcacttctggatccagattgtcggatctcggtcactgcaactggataagctggtgaatgaaatgactcagcactacgagaactctgtacccgaggatttaaccgtccatgtcggggacatagtggctgctccgctccctaccaatgggagttggtacagggcccgcgtgctcggaacgttagagaatgggaatctcgatctttactttgttgatttcggtgacaacggagattgccccctgaaagacctgcgtgccctgcggtctgacttcctgtctcttccgttccaagctatcgagtgctccttggccaggatcgccccaagcggcgatcagtgggaagaggaggctctggacgagttcgacagacttacccactgtgctgattggaagcctctggtggcaaagatcagctcctacgtgcagaccgggatctcgacctggcccaagatttatctgtacgatacctcaaatggaaagaagttggacatcggcctcgaactagtccacaaaggatacgcaatagagcttccggaggacatcgaagagaatcgagcggtgccagacatgctaaaagacatggccaccgaaactgacgcatccctgtctacattgctgactgagaccaagaaatctagtggggaaataacccatacccttagttgcctttctctgtctgaggctgcctctatgtcaggggacgacaacctggaggacgattatctgctgtag

SEQ ID NO: 297303 - DNA, 1674 bp, Artificial Sequence
  derived and/or modified sequence
atgagcaccgagcggaccagctggaccagcctgagcaccatccagaaaatcgccctggggctggggattcctgcctcagcgactgtggcatatatactctaccggagatatcgcgaaagccgggaagagaggctgacatttgttggcgaggatgacattgagatcgaaatgcgcgttccgcaggaagcagtgaagcttataatcgggagacagggagctaacatcaagcaaacaggcgcaaggattgatgtcgatactgaagacgtgggcgatgaacgagtcctcttgatctcagggttccccgtgcaggtgtgtaaagctaaggccgccatacatcagatccttactgagaacacgccggtcagcgagcagctgagcgtgccacagcgatccgtaggcaggatcatcggtcgggggggtgaaacaattcggagcatttgcaaggcttctggtgcaaagattacctgcgataaagagagcgaaggtacactcctgctttcacgcctgattaagataagcgggacgcagaaagaggttgctgctgcaaaacacttgattctggagaaggtgtccgaggacgaagagctacgaaaacgcatagcccacagcgctgagacaagagtgccccgcaaacagccaatctcggtgagaagggaggatatgacggagcccggtggggcgggagaaccagcactgtggaagaatacttcaagtagcatggagccaaccgcaccgctggtgactcctcctccaaagggtggaggagatatggcagtggtggtgtccaaggaagggagttgggagaagcccagcgatgactcttttcaaaagtcggaagcccaggctatcccagagatgccaatgtttgagattccaagccccgatttcagtttccacgccgatgagtatctggaggtgtatgtctccgcttctgaacaccctaaccacttttggatacagattgtggggtctagatccctgcagttggacaaactcgtgaatgagatgactcagcattatgaaaatagcgtcccggaagacttgacagtgcacgttggtgatattgttgccgccccattgcctaccaatgggagctggtatcgagcccgcgtcttaggtactcttgaaaacggcaaccttgacctttactttgtggactttggtgataatggcgactgcccactcaaggacttgcgtgccctgaggtccgacttcctaagtctccccttccaggcaatcgagtgttctctcgcaagaatcgctccgtcgggtgaccagtgggaggaagaggccctggatgagtttgacagactgacccactgcgccgactggaaacccctggtcgccaaaatctcctcctacgtccagacgggaattagcacctggccaaaaatatatctgtatgacacttccaatggaaagaaactggatataggacttgagctggttcacaaggggtatgctatcgagcttcccgaagacatcgaagagaaccgggcagtgcccgatatgctcaaagacatggccactgagaccgatgcaagtctgtctactctgctaaccgagactaagaagtcgtcaggtgaaattacgcacaccctctcctgtctttctctcagcgaagctgcctcaatgtctggagatgacaacctggaggatgattacctgctctag

SEQ ID NO: 297304 - DNA, 1686 bp, Artificial Sequence
  derived and/or modified sequence
atgagcaccgagcggaccagctggaccagcctgagcaccatccagaagatcgcccttggtcttggcatacctgcttccgccacagtagcctatatcctttaccggcggtatagagagtcacgcgaggaacggcttaccttcgtgggcgaggacgacatcgagatcgagatgcgtgttcctcaggaggctgtaaaactaattatcgggcggcagggggcgaatataaagcagctgcgaaaacaaactggagcccggattgacgtggatactgaggatgtgggagatgagagagtcctacttatctccggattcccagtgcaggtctgtaaggcgaaagccgccattcatcagattctaactgagaatacccccgtgtctgagcagctgagcgtaccgcagcgtagcgtgggccgaatcattggaagggggggtgaaaccatccgttccatctgcaaggcctctggcgccaaaataacctgcgacaaagagtcagaaggcactctcctcctgtcacgcctgattaagatctcaggaactcagaaagaagttgccgccgccaagcacctcatcttggagaaggtgtccgaagacgaagagctgcgaaagcggatcgcacactccgcagaaaccagagtgccacggaaacagcctatcagtgtcagacgcgaggatatgactgaaccgggcggcgccggggaaccagccctgtggaagaatacttctagctcaatggaacccacagctccattggttacaccaccaccaaaaggcgggggcgatatggcggtcgtggtgtctaaagaggggtcctgggagaagcccagtgatgacagcttccagaaaagtgaggctcaggctatccctgagatgccaatgtttgaaattcccagccccgactttagcttccatgccgacgagtacttggaagtgtatgtcagtgcttccgagcatcccaatcacttttggattcaaatcgtcgggtccagatcccttcagctcgataaattagtcaacgagatgacacagcattacgagaacagcgtgccagaagaccttaccgttcatgttggagatatcgttgcagcacccctgcccacgaacgggtcatggtaccgggcacgagtcctggggacactcgagaacggtaatctggatctgtattttgtggacttcggggacaacggagattgtcccttaaaggacctgcgggccctgcgatctgactttctgtccctcccttttcaggcgattgagtgcagcctggcccggattgcaccaagcggtgaccagtgggaggaggaggcccttgacgagtttgacagactaacacactgcgccgattggaagcccttggtggccaagatttctagctacgtccagaccggtatctccacctggcccaagatttatctatatgacactagcaacggcaagaaactcgatatcggactcgagctagtccacaaagggtatgctatagaattgcctgaggacattgaggaaaacagagcagtgccggatatgttgaaagacatggcaacagagacggacgcttcactgagtacgttgctgaccgaaaccaaaaaaagttctggcgaaatcacccataccctcagctgtctctccctctctgaagcggcaagcatgagcggggacgataatctggaagatgactacttactctag

SEQ ID NO: 297305 - DNA, 1686 bp, Artificial Sequence
  derived and/or modified sequence
atgagcaccgagcggaccagctggaccagcctgagcaccatccagaaaatagcccttggtctgggtattccagcctcagctactgtagcttatattctatacagaagatatcgcgagtcccgagaggaaagattgacattcgttggggaggatgacatagagatcgagatgcgcgtcccccaggaggccgtaaagcttatcatcggccgacagggcgccaatatcaaacagctccgcaagcagacaggggctaggatcgacgtagacaccgaagatgtcggcgacgagagagttctgctgatatcaggatttccagttcaggtgtgcaaagctaaagccgccatccaccagatccttacagaaaatacacccgtatcagagcagctatctgtgccccagcgatccgtcggcaggatcattggccgcggtggggaaactattcgctcaatttgcaaggcatccggagcgaagataacatgcgacaaagaatcagagggcactttgttgttaagtcggctgattaagatctcgggaacgcagaaagaagtggctgcggccaaacatcttattttggagaaggtttcagaggacgaagaattgcgaaaaagaatcgcacactccgcggagactcgcgtgccaagaaagcagcctatttctgtgagacgcgaagatatgaccgaaccagggggcgctggcgagcctgctctgtggaagaacacgtcgtccagcatggagccaactgcacctctggtgactcccccgccaaaaggagggggagacatggctgtcgtcgtaagtaaggaaggtagttgggagaaacccagcgacgattcgtttcaaaagagtgaagctcaggctattcccgaaatgcctatgtttgagataccctctccagacttctcattccatgccgacgagtatctggaggtgtacgtgagtgctagcgaacatccaaatcacttctggatccaaatcgtgggatctcgctcattacaactggataagttggtgaatgagatgacccaacattatgaaaatagcgtgcccgaggacctcaccgttcacgtgggggacattgtcgccgcccccctaccaactaatgggtcctggtaccgggcccgagttctcggaactcttgagaatggtaatctcgacctgtattttgtcgatttcggcgataacggcgattgcccgctgaaggatcttcgggccctcagatcagattttctgagtctccccttccaagccattgagtgttctttggctaggattgcaccatctggggaccagtgggaggaagaagcgctggatgagttcgaccgactgactcactgcgccgattggaaacctctggtggccaagatctccagctatgtgcaaaccggcatctccacctggcccaagatttatttgtatgatacaagcaatggaaagaagttggacataggtttagagcttgttcacaagggttatgctatcgaactccccgaggatattgaggagaaccgagcagtgccggatatgttgaaagatatggctacggagaccgatgcatccctgagcaccctgttgacggaaacaaaaaaatcgagtggcgaaattacccacactctcagttgcctcagcctcagcgaagcagcttccatgtccggcgacgataaccttgaggacgactacctgctctag

SEQ ID NO: 297306 - DNA, 1686 bp, Artificial Sequence
  derived and/or modified sequence
atgagcaccgagcggaccagctggaccagcctgagcaccatccagaaaatcgctctggggctgggcatccccgcgagtgccactgtggcctatatcctgtatcgcagataccgggagagtagggaggagagactcaccttcgtcggagaggacgatatagagatcgagatgagagtacctcaggaagccgtaaaactaatcatcggccgacagggtgccaacatcaaacaactgcgtaaacagactggggcgagaatcgatgtggatacagaagacgttggcgacgagagggtgctcctgatctctgggttcccagtgcaggtatgtaaagcaaaggctgccatccatcagatactcacagaaaatactcctgtctctgagcagctgtccgtgcctcagaggtccgtgggcagaatcattggcaggggcggggagacaatccgaagcatctgcaaggcatcgggtgccaaaattacttgtgacaaagagtcggagggcaccctgctgctgtcgaggctgatcaagatctctgggacacagaaggaggtcgcagcagccaaacatctcatacttgagaaagtgagcgaggatgaggaactgaggaaacgcatagctcattcggccgagacacgggtgcctcgaaaacagcctataagcgtgcgccgggaggatatgacggaaccgggtggagctggggagcccgctctttggaaaaacactagcagcagcatggagcctacagcccctctggttacacctccccccaagggagggggggacatggcggtcgtagtcagtaaggaaggttcctgggaaaaaccgtctgacgatagctttcagaagagcgaggcccaagctattccagaaatgcccatgttcgagatcccatctcccgacttttcttttcatgcggatgagtatttggaggtatatgtctctgccagcgaacatcctaaccacttctggatccagatcgtgggtagtagaagcctccagcttgacaaactggtaaatgagatgacccagcattacgaaaattctgtgcccgaggatctgaccgtgcacgttggagatattgtcgcagcccccctgccaacaaatgggagctggtaccgggcccgggtcctggggacactcgagaacggtaacctagacctgtatttcgtagacttcggcgataacggggactgccctctaaaagacttgcgcgctctgcgcagtgacttcttgtccctgccttttcaggcaattgagtgctcgctggccaggatcgccccttccggagatcagtgggaagaggaagctttagacgagttcgatcgactgacgcattgtgccgactggaagcccctcgtggccaaaatttcttcctacgtacaaacaggcatctctacatggccgaaaatctatctttatgatacatcaaatgggaagaaactcgatataggactggagttggttcacaagggttacgctatcgagttgccggaagatattgaggagaaccgggctgtgccggacatgctcaaggatatggccacagaaactgacgcgtccttatctactctcttgactgaaaccaaaaagtcttctggcgagattacacacaccctttcctgcctttccctaagtgaagcagcaagcatgagcggcgatgacaaccttgaggatgattatctgctgtag

SEQ ID NO: 297307 - DNA, 396 bp, Artificial Sequence
  derived and/or modified sequence
atgagcaccgagcggaccagctggaccagcctgagcaccatccagaagattgccctgggcctgggcatccccgccagcgccactgtagcatacattctgtaccggaggtacagagagtcacgcgaggaaaggctcaccttcgttggggaagacgatatcgaaattgaaatgagggtgcctcaggaggctgtcaaattgatcatcgggagacagggggctaacatcaaacagctcagaaagcagactggcgccagaatcgatgtggacaccgaagacgtcggtgacgagagagtattgctgatctccggattccccgtgcaggtatgtaaggctaaggccgccattcaccagatcttaacagaaaatacccctgtgtcagaacaactctcagtctag

SEQ ID NO: 297308 - DNA, 1686 bp, Artificial Sequence
  derived and/or modified sequence
atgtctacagaaaggaccagctggacctccttatcaaccatacaaaagattgccctcggactcggcatccctgcctctgccaccgtcgcttacatcctgtatcggagatatagagagtcaagggaggagcggctgacctttgttggcgaggacgatattgaaatcgagatgcgcgtcccacaagaagcggtcaagttgattatcggacggcagggtgctaatatcaagcagttgcggaaacagaccggcgcacgcatcgatgtggacactgaggacgtaggtgacgaacgagttctcctaatcagcggattccccgttcaggtgtgcaaggcaaaagctgcgattcatcagattttgacagagaatacgcccgtgtcggagcagctgagtgtgccccaacgcagcgttggccgaattatcggaagaggaggcgaaaccatacgatccatttgtaaagctagtggagcgaaaattacatgcgataaagagtcagaagggactcttctgctgagcaggctaatcaagatctctgggactcagaaagaagtagctgccgctaaacatctgatccttgagaaagttagtgaggacgaagaactgcggaagcgcattgcccattcagccgaaaccagagtccctcgcaaacaacctatatccgtgcgaagggaggatatgacagaacctgggggagcaggcgagccggcactgtggaaaaacacaagttctagtatggagcctacagctccgcttgtgacccctccgccaaaggggggtggggacatggccgtggttgtgtcgaaagagggttcctgggagaaacccagcgatgactcctttcagaagtctgaggcccaagctattcctgagatgcctatgttcgaaattcctagtcctgacttttcattccacgcagacgaatatttagaggtgtacgtgagtgccagtgaacatcctaaccacttctggatccagattgttggtagtaggagccttcaattagataaactggtaaatgagatgacccaacattatgaaaactccgtccccgaggaccttaccgtgcacgtgggggacatcgtcgccgctccactaccaacgaatgggagctggtaccgtgctagggtgctcggtacattagagaatggtaacttggacctgtactttgtcgattttggggacaatggagattgtcccctgaaagacttgcgggcactccgttcggatttcctttcactgcccttccaggctattgaatgttcccttgccagaatagccccttcgggggatcagtgggaagaagaggccttggatgaatttgaccgcctaacacattgcgccgattggaagcccctggttgccaaaatcagttcatatgtgcagacaggcatcagtacatggccaaagatttatctttatgacacgtccaatggcaagaaactggacatcggactagaactggtgcacaaaggttacgcaatcgagctccccgaggatatagaagaaaacagagctgtcccagatatgctgaaggatatggcgactgagaccgacgcgtcactgtctaccctgctgacggagaccaaaaaaagcagcggcgagatcacacataccttgtcttgcctgtctctgagcgaggccgcttctatgagcggagatgataacctggaggacgattacttactgtag

SEQ ID NO: 297309 - DNA, 1674 bp, Artificial Sequence
  derived and/or modified sequence
atgtccaccgaacggacctcatggacttccctcagcacaattcagaagattgctctcggcctaggaatccctgcatcggccacggtagcatatatactatatagaaggtatcgggagagcagggaggaaagactgactttcgttggcgaggacgatatagagatcgagatgcgagttccccaggaggccgtaaagctgatcattggaagacagggagccaatatcaagcagacgggcgcacggattgatgttgacacagaagacgttggagatgaaagagtcctgctcatctcaggttttccagtgcaagtgtgcaaggctaaggccgctatacaccagatcttgaccgaaaacactcccgtgagcgaacaactctctgtcccacagagatctgtgggcaggatcatcgggaggggaggtgagacaattcggtcgatttgtaaagcctccggcgctaagattacatgtgataaagagagcgaaggtacactgctgctgtcacgacttattaagattagcgggactcagaaggaggtagctgctgccaagcatcttatcctggaaaaagtcagtgaggatgaagagctgcggaaacggattgcccattctgccgagacaagggtaccacggaagcagcccatcagcgtcagacgcgaagacatgactgaacccggtggtgcaggagagccggcattgtggaagaatacctcttcttctatggaaccgacagcgcctctagtgaccccaccccctaaaggcggaggagatatggccgttgtggtgagcaaggaaggctcatgggagaagccctctgatgactcttttcagaaatctgaggcacaggccatcccagaaatgcctatgtttgagatcccatcacccgacttctctttccacgcagacgaatatctggaggtctacgtttctgcctctgaacatcccaaccacttttggatacagattgtcggttctagaagcctccaactcgacaagctcgtgaatgagatgactcagcactatgagaatagcgtgccggaggatttgaccgtgcatgtgggcgatatcgtggccgctccactgccgaccaacggctcctggtacagagccagagtgctggggacgttggagaacggcaacttggacctctactttgttgattttggtgacaacggggactgccccttaaaagacctgcgcgcacttcgcagcgacttcctgtctctgccattccaggccatcgagtgcagccttgccaggatcgctccgtccggtgaccagtgggaggaggaggctcttgatgagtttgatagacttacgcattgcgcagactggaaacccctggtggctaagatctccagctacgtgcaaactggcatctctacttggcccaaaatttatctgtatgacacatcaaacgggaagaaactagatattggcctcgagctggtccacaaaggctatgccattgaacttccagaggatatagaggaaaaccgagctgtaccagacatgctgaaagatatggctactgagacagacgctagtctgagtaccctccttacagaaaccaagaaaagctccggagaaattactcatacgttgtcatgtctgtccctgtccgaggctgcatctatgagcggtgacgacaatctggaggacgattacctcctttag

SEQ ID NO: 297310 - DNA, 1686 bp, Artificial Sequence
  derived and/or modified sequence
atgtcaacggaaagaactagctggacaagtctgtcaactattcagaagatcgccctgggcttgggaatcccggcaagtgcgaccgtggcctatattctttacaggcggtacagagaatcccgggaagaaagattgactttcgtaggcgaggatgacatcgagattgaaatgagagttcctcaggaggcagtcaagcttattataggcaggcagggagccaatattaagcagctcagaaaacaaacaggcgcacgaatcgacgtcgacaccgaggatgttggcgacgagagagtgctgctgatatctggattccccgttcaggtttgtaaggcgaaggcggcaattcatcagatactcacagagaacactccggtgtcagagcaattaagcgtgcctcagagatctgtagggcgaatcatcggtagaggaggtgaaaccattcggtcaatttgcaaggcttctggggctaagatcacatgtgataaggagtcagaaggcacgctgctgctgagccgactgattaagataagcggtactcagaaggaagtggcagccgcaaaacatctgatcttggagaaagtgtctgaagatgaagagctgagaaagagaattgcacactcagccgagacaagagttccccgaaagcaacctatcagcgttaggcgggaagacatgactgagcccggaggcgctggcgagccagcgttgtggaagaacacatcctcaagcatggaacccacggccccattagtgacgccaccccctaagggaggcggtgatatggctgtagttgtgagtaaagagggatcttgggagaagccctcagatgattccttccaaaaaagcgaggctcaggctatcccagaaatgcctatgttcgagatccctagtccggacttttcctttcacgccgatgagtatctggaggtttatgtgtctgcctctgagcatccaaatcacttttggatccagatcgtgggcagccggagcctgcaactagataagctggtcaacgaaatgacacaacactatgaaaatagtgtgcctgaagacctgacagtgcacgtgggtgatatcgtggccgcacccctcccaaccaatggctcctggtatagggccagagttctgggaaccttggagaacgggaacctggatctttatttcgtcgatttcggtgataacggagattgccctctcaaggatcttcgggcattaaggagcgattttctcagtctgccgtttcaggctattgaatgttctttggctcggatagctcccagcggtgaccagtgggaggaagaagccctggatgagtttgaccgactgacacactgtgccgattggaagccactcgtcgccaaaatctctagctatgtccagactggaatctcgacttggcctaaaatctatctgtatgatacatctaacgggaaaaaacttgatatcgggctggaattggtgcacaaaggatatgctattgaactgcccgaagatatcgaggagaatcgcgctgttcccgacatgctgaaggacatggccaccgaaactgatgcatcactgagcaccctcctgactgagactaaaaagtcatctggcgaaatcacacacaccttgtcctgtctgtctctttcagaggcagcaagcatgagtggcgacgacaacctggaggatgattacctgctttag

SEQ ID NO: 297311 - DNA, 1686 bp, Artificial Sequence
  derived and/or modified sequence
atgagcactgaacgaacctcctggacaagcctttcaaccatccagaagattgctcttggtctcggaatccctgccagtgctaccgtcgcatacatcctttatagacggtaccgtgagtccagagaggagagactcactttcgtcggagaagacgacatcgaaatagaaatgcgggtccctcaggaagctgtaaagctcattatcggcagacagggagccaacatcaagcagttgaggaaacagactggtgccagaatcgacgtggacacagaggacgtgggcgatgaaagggttctgcttatttctggatttcccgtccaggtgtgtaaggcgaaggccgcaatccaccagatccttactgaaaacactccagtcagtgaacaattgtctgtgcctcagaggtccgttggtagaattattgggaggggtggcgaaaccatccgcagcatctgtaaagcctccggcgctaagattacatgcgacaaagaatccgagggcaccttacttctgagccggctcatcaagattagcggaacccaaaaggaagtggccgcagcaaagcacctcatattagaaaaagtctctgaggacgaagaactgcggaagcgcattgctcattctgcagagacacgggtcccaagaaaacagcccatctccgtacggagggaggatatgactgagccaggaggcgctggtgaacccgctttatggaaaaatacaagtagcagtatggaacccacagccccattggtgacaccaccacctaaaggtggaggggacatggctgtcgtggtgtctaaggaggggagctgggagaaacccagtgacgacagcttccagaagtccgaggcccaagcaatccccgaaatgccaatgttcgagatcccatcccccgacttcagtttccatgccgatgagtaccttgaagtatacgtgtccgctagcgagcaccccaatcacttctggatccagatcgtgggctcacgcagtctgcagctcgacaaactagtcaatgaaatgacccagcactatgaaaacagcgtgcccgaggacttgacagtgcatgtgggcgatattgtcgccgctcctttacccacaaatggttcctggtacagggctagagtgctgggaacccttgagaacggaaatctggacctgtattttgttgactttggcgacaatggggattgccctctcaaggacttaagagctctccggtcagattttctgtcactgccgtttcaagctattgagtgttctctggctcggattgccccttcaggcgaccagtgggaagaagaagctctggatgaattcgataggctgactcactgcgcagattggaaacccctggtcgctaagatttctagctacgtgcagacaggtatctctacctggccaaagatctatctgtatgacaccagtaatggcaagaagctggacattggcctggaacttgtgcacaagggttacgcaatcgagctgcctgaagatatcgaggagaaccgtgctgtgccggacatgctcaaggacatggccactgaaacagatgcatcactgagtacattgctgacagagaccaagaagagctcaggagagatcacgcacaccctgtcatgtctgtcactgtcagaggcagcctcaatgtccggagatgataacctggaggacgattatctactctag

SEQ ID NO: 297312 - DNA, 1686 bp, Artificial Sequence
  derived and/or modified sequence
atgtcaaccgagaggacgagctggacatcactatccacgattcagaagattgcgttgggcctaggcattcctgcaagtgccacagtggcctacatcttgtaccgccgttatcgcgaatcccgcgaggaacgcttgactttcgttggcgaagatgacattgaaatcgagatgagggtaccacaggaagccgtgaaactgatcattggccgtcagggcgcaaatattaaacagcttagaaagcagactggtgcacggattgacgtcgataccgaagatgttggcgacgaacgcgtgctgttgatctccggtttcccagtacaagtgtgtaaagccaaagcagctattcaccaaatcctgaccgaaaatacaccggttagcgagcagctttccgttccacagaggagcgtcggaaggatcatcggaagaggcggtgagaccattagatccatctgcaaagcttcaggggcaaaaataacatgtgataaggagagtgagggcacactcttgctgtctcgactgatcaaaatttccggtactcagaaggaagtcgctgccgcaaaacatctaatcctcgagaaagtcagcgaagatgaggagctacggaagcgtatagcacattccgccgaaacacgcgtacctaggaaacagccaattagtgtccgcagggaggacatgacagagccgggtggcgcaggggagccagcactctggaaaaacacttcctcctcaatggagcccactgccccattagtgacaccaccacccaagggcggaggcgatatggctgttgtagttagtaaggagggatcatgggagaagcccagcgacgattcctttcagaagtccgaagctcaagctatccctgagatgccaatgttcgagattccatcacccgacttctccttccatgctgacgagtaccttgaggtctatgtcagcgcctctgaacacccaaatcatttctggatccagatcgtcgggtctcgatccctccagctggacaaattagtgaatgagatgacacagcactatgagaacagcgttcctgaagacctcacagtgcacgtgggggatatcgttgctgcacctttgcctactaacggcagctggtaccgcgcacgagtcctgggtacgctggagaacggtaatctggacttgtacttcgtggactttggggataacggagattgccctctcaaggatttgcgagctcttcgtagcgacttcctcagtctgcctttccaggcaattgagtgcagtctcgcccgtatcgcacccagtggcgaccagtgggaggaggaggcactcgacgaattcgaccgtctcacacactgcgctgactggaagcccctggtggcgaaaatctcctcttatgtccagacagggattagcacttggcccaaaatttatctgtatgacacgtccaatggcaaaaagttggacataggtcttgagctagtgcacaagggttacgctattgaattacccgaagacatagaagagaacagagctgtcccggacatgctgaaggatatggccaccgagacagacgcctccctatcgactctcctgaccgagactaagaagtcttcaggggagatcactcacaccctcagctgtcttagtctttcagaggcagcttccatgtctggagacgacaatctggaggacgattatctgctctag

SEQ ID NO: 297313 - DNA, 396 bp, Artificial Sequence
  derived and/or modified sequence
atgagcactgagcggacctcttggacctctctctctacaatccagaagattgcactcggacttggaatccctgcaagtgccactgtcgcctacatcttgtatcgccgttaccgcgagagtagggaagagaggttgacatttgttggggaagatgatatcgagattgaaatgagagtgccccaagaggctgtcaagctgatcatcggtcgccagggggctaatatcaaacagcttcggaaacagactggagccagaattgacgtggataccgaggatgtgggagatgagagagtgctcctgatctcgggctttcctgttcaggtatgtaaggctaaggccgctattcaccaaatccttacggagaatacaccggtcagcgagcagctgtccgtgtag

SEQ ID NO: 297314 - DNA, 3093 bp, Artificial Sequence
  derived and/or modified sequence
aagcaaacttccgcctgcggagacccgctcccttcctcgcccccacagaaacgccccccgccaccaccccctcccccggcgtaggccttcacgctgtcgcctcgacccgtttcctcgaatccccagggaagggtgggcccctggcgcccctatggcccgccgcccccttaccaccgcggtcggagcccgggtctcactctcctgccgctgtttcgggccacaccgtgtgtccgtgcctccgcaaaggaatagaagagtgggtcctcgctctctgcggcgcaccgcttgtcccttgacttcctgtccatctacaaagcctatttcatgttttccagaaagaaaacgttttccgtgtctcttgagtcctcatcgccatatgcggggcgggaccgatctatgcaaaagatcgcaagagaaaactgatggagcatcgcccatcatgaggctgctctcccgatggtcactgagttgtgttgtggcactgtctttgtacaaagacaccaatttttgcgaacggtgccactcatgattcaacgctctcatgcctcggtcccagctgctggagcgcagattttcctccaagggttagaagatagaaaactcctcggatataagtcaaagagtacagcagaaaatgtctactgaacggacttcttggacaagcctgtccaccattcagaaaatagccctgggccttgggatcccagccagtgcaacagttgcctatatcctataccgcaggtatagggaaagcagagaagagcggctgacatttgttggggaagatgacattgagatagagatgcgggttccccaggaggctgtgaaactcatcattggccggcaaggagccaatattaaacagctgcggaaacagacaggtgctcggattgatgtggacacagaggatgtaggcgatgagcgagtgctgcttatcagtggttttcctgttcaggtgtgcaaggccaaagcagcaatccatcagatcctgacagagaataccccagtgtctgagcagctttcagttccccagagatctgtgggcagaatcatagggagaggcggcgagacaattcgttctatctgtaaggcatctggagccaaaattacctgtgacaaagaatcagaagggacattactactatcaagacttataaaaatctcaggaacacagaaggaagtggcagcagccaagcatttgatactggagaaagtttcagaagatgaagaacttcggaagagaattgctcattctgcagaaaccagggtcccacgcaaacagccaatcagtgtgagaagagaagacatgacagagccaggtggagctggagagccagcattatggaaaaacaccagttctagcatggagccgactgcacccctggtgactcctccacccaaaggaggaggcgacatggctgtggtagtgtcaaaggaaggttcctgggagaaacctagtgatgacagctttcagaagtctgaagcccaggccatcccagagatgcccatgtttgaaatccccagtcctgacttcagttttcatgctgatgagtacctagaagtctacgtttctgcttctgagcaccctaaccacttctggatccagatcgttggctcccgcagcctgcaattggataagcttgtcaatgagatgacccagcactatgagaatagtgtgcctgaagacttgactgtgcatgtaggagacattgtagcagcacctttacctacaaatggttcctggtatcgagcccgggtcctcggcaccttggagaatgggaacttggacctctattttgttgactttggagataatggagattgcccactgaaggacctcagggctctcaggagtgacttcctaagccttccatttcaagcaatagaatgtagtctggcacggattgctccctcaggtgaccagtgggaagaggaagctttggatgagtttgatagactcactcattgtgctgactggaagcctctggtagccaagatctctagctatgtccagactgggatctcaacttggccaaagatctacttatatgatactagcaatgggaagaaacttgatattgggctagaattagtacacaaaggatacgcaattgagcttcctgaagacatagaagaaaacagagctgtcccagacatgttgaaggacatggccacagaaacagatgcctctctcagcacgttgctcactgagaccaaaaagagctctggagagataacacataccctgtcctgcctcagcttatcagaagctgcttccatgtctggtgatgataaccttgaagatgactacttactctgaagtctgggcttcagtttgctcagccatctgctttgctgtgatttggcataggaattggtgcatggaggagaggagtgtatgataaaggatccatgcagtccttcctttattacacatatagtctggcttgctgtggaccaaattaatattctcctcccatcagactacaaaaaaattggactaccacgctacaagtgtgtctcccccattccacctccggatccctccccaaccctccagtgtttgaatactgctgtgttacttccaggccgttcaacgtcaggctcagtcccctctaccagtcatgattcacattactactaggctgtatcctttttgaggctgggaaacagtcaggctttcgtcattggaagtgattctgcagacttctgactcaccttatcaggtgactctggttaaggaaagcttttgagtggtgaactcaaagactccagttgaatcaggaggcaaaggcaaaaattagcataattatatttaaaagcctcaggaagtgggaagagaatactgcctcccagcctcaattgctgatatgttattggagacaggcttttgaaactgctccagctatttctctgtaacctttagttaaaatataagtagaaaggagacaggaggctcaggaaattttctaaattgctagtataatatctatatgtatacacacatatacacccgtggagagagaggaagagtatacagtcctgtttgaatcatttggaggatttttttgctgaataaagttctcaagaaaa

SEQ ID NO: 297315 - DNA, 2751 bp, Artificial Sequence
  derived and/or modified sequence
ggtgtgagtgggaggcggcggcgctggtggctgcagctggggtgaggcgcgaggcggcgcactcgacggctgactggagcagcggtaaaggatataagtcaaagagtacagcagaaaatgtctactgaacggacttcttggacaagcctgtccaccattcagaaaatagccctgggccttgggatcccagccagtgcaacagttgcctatatcctataccgcaggtatagggaaagcagagaagagcggctgacatttgttggggaagatgacattgagatagagatgcgggttccccaggaggctgtgaaactcatcattggccggcaaggagccaatattaaacagacaggtgctcggattgatgtggacacagaggatgtaggcgatgagcgagtgctgcttatcagtggttttcctgttcaggtgtgcaaggccaaagcagcaatccatcagatcctgacagagaataccccagtgtctgagcagctttcagttccccagagatctgtgggcagaatcatagggagaggcggcgagacaattcgttctatctgtaaggcatctggagccaaaattacctgtgacaaagaatcagaagggacattactactatcaagacttataaaaatctcaggaacacagaaggaagtggcagcagccaagcatttgatactggagaaagtttcagaagatgaagaacttcggaagagaattgctcattctgcagaaaccagggtcccacgcaaacagccaatcagtgtgagaagagaagacatgacagagccaggtggagctggagagccagcattatggaaaaacaccagttctagcatggagccgactgcacccctggtgactcctccacccaaaggaggaggcgacatggctgtggtagtgtcaaaggaaggttcctgggagaaacctagtgatgacagctttcagaagtctgaagcccaggccatcccagagatgcccatgtttgaaatccccagtcctgacttcagttttcatgctgatgagtacctagaagtctacgtttctgcttctgagcaccctaaccacttctggatccagatcgttggctcccgcagcctgcaattggataagcttgtcaatgagatgacccagcactatgagaatagtgtgcctgaagacttgactgtgcatgtaggagacattgtagcagcacctttacctacaaatggttcctggtatcgagcccgggtcctcggcaccttggagaatgggaacttggacctctattttgttgactttggagataatggagattgcccactgaaggacctcagggctctcaggagtgacttcctaagccttccatttcaagcaatagaatgtagtctggcacggattgctccctcaggtgaccagtgggaagaggaagctttggatgagtttgatagactcactcattgtgctgactggaagcctctggtagccaagatctctagctatgtccagactgggatctcaacttggccaaagatctacttatatgatactagcaatgggaagaaacttgatattgggctagaattagtacacaaaggatacgcaattgagcttcctgaagacatagaagaaaacagagctgtcccagacatgttgaaggacatggccacagaaacagatgcctctctcagcacgttgctcactgagaccaaaaagagctctggagagataacacataccctgtcctgcctcagcttatcagaagctgcttccatgtctggtgatgataaccttgaagatgactacttactctgaagtctgggcttcagtttgctcagccatctgctttgctgtgtgagtgcagctatcatctatctgtagcaacaggaaagtaatgagggcgacagtggggcacttgctttgattccctctttcccatgccctgtcttaatatacttctctgcagctgctttcctgcagcttaacttgctctcagattgagcactttcaagctttttgtgtatttctgtctttggcaggatttggcataggaattggtgcatggaggagaggagtgtatgataaaggatccatgcagtccttcctttattacacatatagtctggcttgctgtggaccaaattaatattctcctcccatcagactacaaaaaaattggactaccacgctacaagtgtgtctcccccattccacctccggatccctccccaaccctccagtgtttgaatactgctgtgttacttccaggccgttcaacgtcaggctcagtcccctctaccagtcatgattcacattactactaggctgtatcctttttgaggctgggaaacagtcaggctttcgtcattggaagtgattctgcagacttctgactcaccttatcaggtgactctggttaaggaaagcttttgagtggtgaactcaaagactccagttgaatcaggaggcaaaggcaaaaattagcataattatatttaaaagcctcaggaagtgggaagagaatactgcctcccagcctcaattgctgatatgttattggagacaggcttttgaaactgctccagctatttctctgtaacctttagttaaaatataagtagaaaggagacaggaggctcaggaaattttctaaattgctagtataatatctatatgtatacacacatatacacccgtggagagagaggaagagtatacagtcctgtttgaatcatttggaggatttttttgctgaataaagttctcaagaaaatt

SEQ ID NO: 297316 - DNA, 2824 bp, Artificial Sequence
  derived and/or modified sequence
cggctgaagcgccgccggcggggctcactgtggtggtgtgagtgggaggcggcggcgctggtggctgcagctggggtgaggcgcgaggcggcgcactcgacggctgactggagcagcggtaaaggcgaggatggagaccgaaggatataagtcaaagagtacagcagaaaatgtctactgaacggacttcttggacaagcctgtccaccattcagaaaatagccctgggccttgggatcccagccagtgcaacagttgcctatatcctataccgcaggtatagggaaagcagagaagagcggctgacatttgttggggaagatgacattgagatagagatgcgggttccccaggaggctgtgaaactcatcattggccggcaaggagccaatattaaacagctgcggaaacagacaggtgctcggattgatgtggacacagaggatgtaggcgatgagcgagtgctgcttatcagtggttttcctgttcaggtgtgcaaggccaaagcagcaatccatcagatcctgacagagaataccccagtgtctgagcagctttcagttccccagagatctgtgggcagaatcatagggagaggcggcgagacaattcgttctatctgtaaggcatctggagccaaaattacctgtgacaaagaatcagaagggacattactactatcaagacttataaaaatctcaggaacacagaaggaagtggcagcagccaagcatttgatactggagaaagtttcagaagatgaagaacttcggaagagaattgctcattctgcagaaaccagggtcccacgcaaacagccaatcagtgtgagaagagaagacatgacagagccaggtggagctggagagccagcattatggaaaaacaccagttctagcatggagccgactgcacccctggtgactcctccacccaaaggaggaggcgacatggctgtggtagtgtcaaaggaaggttcctgggagaaacctagtgatgacagctttcagaagtctgaagcccaggccatcccagagatgcccatgtttgaaatccccagtcctgacttcagttttcatgctgatgagtacctagaagtctacgtttctgcttctgagcaccctaaccacttctggatccagatcgttggctcccgcagcctgcaattggataagcttgtcaatgagatgacccagcactatgagaatagtgtgcctgaagacttgactgtgcatgtaggagacattgtagcagcacctttacctacaaatggttcctggtatcgagcccgggtcctcggcaccttggagaatgggaacttggacctctattttgttgactttggagataatggagattgcccactgaaggacctcagggctctcaggagtgacttcctaagccttccatttcaagcaatagaatgtagtctggcacggattgctccctcaggtgaccagtgggaagaggaagctttggatgagtttgatagactcactcattgtgctgactggaagcctctggtagccaagatctctagctatgtccagactgggatctcaacttggccaaagatctacttatatgatactagcaatgggaagaaacttgatattgggctagaattagtacacaaaggatacgcaattgagcttcctgaagacatagaagaaaacagagctgtcccagacatgttgaaggacatggccacagaaacagatgcctctctcagcacgttgctcactgagaccaaaaagagctctggagagataacacataccctgtcctgcctcagcttatcagaagctgcttccatgtctggtgatgataaccttgaagatgactacttactctgaagtctgggcttcagtttgctcagccatctgctttgctgtgtgagtgcagctatcatctatctgtagcaacaggaaagtaatgagggcgacagtggggcacttgctttgattccctctttcccatgccctgtcttaatatacttctctgcagctgctttcctgcagcttaacttgctctcagattgagcactttcaagctttttgtgtatttctgtctttggcaggatttggcataggaattggtgcatggaggagaggagtgtatgataaaggatccatgcagtccttcctttattacacatatagtctggcttgctgtggaccaaattaatattctcctcccatcagactacaaaaaaattggactaccacgctacaagtgtgtctcccccattccacctccggatccctccccaaccctccagtgtttgaatactgctgtgttacttccaggccgttcaacgtcaggctcagtcccctctaccagtcatgattcacattactactaggctgtatcctttttgaggctgggaaacagtcaggctttcgtcattggaagtgattctgcagacttctgactcaccttatcaggtgactctggttaaggaaagcttttgagtggtgaactcaaagactccagttgaatcaggaggcaaaggcaaaaattagcataattatatttaaaagcctcaggaagtgggaagagaatactgcctcccagcctcaattgctgatatgttattggagacaggcttttgaaactgctccagctatttctctgtaacctttagttaaaatataagtagaaaggagacaggaggctcaggaaattttctaaattgctagtataatatctatatgtatacacacatatacacccgtggagagagaggaagagtatacagtcctgtttgaatcatttggaggatttttttgctgaataaagttctcaagaaaattttctaaaa

SEQ ID NO: 297317 - DNA, 2318 bp, Artificial Sequence
  derived and/or modified sequence
cggctgaagcgccgccggcggggctcactgtggtggtgtgagtgggaggcggcggcgctggtggctgcagctggggtgaggcgcgaggcggcgcactcgacggctgactggagcagcggtaaaggcgaggatggagaccgaaggatataagtcaaagagtacagcagaaaatgtctactgaacggacttcttggacaagcctgtccaccattcagaaaatagccctgggccttgggatcccagccagtgcaacagttgcctatatcctataccgcaggtatagggaaagcagagaagagcggctgacatttgttggggaagatgacattgagatagagatgcgggttccccaggaggctgtgaaactcatcattggccggcaaggagccaatattaaacagctgcggaaacagacaggtgctcggattgatgtggacacagaggatgtaggcgatgagcgagtgctgcttatcagtggttttcctgttcaggtgtgcaaggccaaagcagcaatccatcagatcctgacagagaataccccagtgtctgagcagctttcagttccccagagatctgtgggcagaatcatagggagaggcggcgagacaattcgttctatctgtaaggcatctggagccaaaattacctgtgacaaagaatcagaagggacattactactatcaagacttataaaaatctcaggaacacagaaggaagtggcagcagccaagcatttgatactggagaaagtttcagaagatgaagaacttcggaagagaattgctcattctgcagaaaccagggtcccacgcaaacagccaatcagtgtgagaagagaagacatgacagagccaggtggagctggagagccagcattatggaaaaacaccagttctagcatggagccgactgcacccctggtgactcctccacccaaaggaggaggcgacatggctgtggtagtgtcaaaggaaggttcctgggagaaacctagtgatgacagctttcagaagtctgaagcccaggccatcccagagatgcccatgtttgaaatccccagtcctgacttcagttttcatgctgatgagtacctagaagtctacgtttctgcttctgagcaccctaaccacttctggatccagatcgttggctcccgcagcctgcaattggataagcttgtcaatgagatgacccagcactatgagaatagtgtgcctgaagacttgactgtgcatgtaggagacattgtagcagcacctttacctacaaatggttcctggtatcgagcccgggtcctcggcaccttggagaatgggaacttggacctctattttgttgactttggagataatggagattgcccactgaaggacctcagggctctcaggagtgacttcctaagccttccatttcaagcaatagaatgtagtctggcacggattgctccctcaggtgaccagtgggaagaggaagctttggatgagtttgatagactcactcattgtgctgactggaagcctctggtagccaagatctctagctatgtccagactgggatctcaacttggccaaagatctacttatatgatactagcaatgggaagaaacttgatattgggctagaattagtacacaaaggatacgcaattgagcttcctgaagacatagaagaaaacagagctgtcccagacatgttgaaggacatggccacagaaacagatgcctctctcagcacgttgctcactgagaccaaaaagagctctggagagataacacataccctgtcctgcctcagcttatcagaagctgcttccatgtctggtgatgataaccttgaagatgactacttactctgaagtctgggcttcagtttgctcagccatctgctttgctgtatgttgcctgcaatgaactcgctgaagcatgctcagccctggaactggtgctaccagagttccgtagggaacctttactctttagaggttccctgatataaatcattcataagacttcctaccctggaaaatgagtaatgtctcattcttacctgcagtttgttactatgtataaaagtctttttctttaatatgcctttaagtcttacctgtttacagcccattctgatgggttctttgtcattctgttagtataacccagtacttttcctgctgcctggaatgccctcttctatgttacctattctgtccgttgagatcccccaacttgggccaaagccaagagatctatgtgccttctctggttttctccacatctatagcacctcaactgaaatatatggataaaaacagcctaacaaa

SEQ ID NO: 297318 - DNA, 1807 bp, Artificial Sequence
  derived and/or modified sequence
gcactcgacggctgactggagcagcggatataagtcaaagagtacagcagaaaatgtctactgaacggacttcttggacaagcctgtccaccattcagaaaatagccctgggccttgggatcccagccagtgcaacagttgcctatatcctataccgcaggtatagggaaagcagagaagagcggctgacatttgttggggaagatgacattgagatagagatgcgggttccccaggaggctgtgaaactcatcattggccggcaaggagccaatattaaacagctgcggaaacagacaggtgctcggattgatgtggacacagaggatgtaggcgatgagcgagtgctgcttatcagtggttttcctgttcagggagaggcggcgagacaattcgttctatctgtaaggcatctggagccaaaattacctgtgacaaagaatcagaagggacattactactatcaagacttataaaaatctcaggaacacagaaggaagtggcagcagccaagcatttgatactggagaaagtttcagaagatgaagaacttcggaagagaattgctcattctgcagaaaccagggtcccacgcaaacagccaatcagtgtgagaagagaagacatgacagagccaggtggagctggagagccagcattatggaaaaacaccagttctagcatggagccgactgcacccctggtgactcctccacccaaaggaggaggcgacatggctgtggtagtgtcaaaggaaggttcctgggagaaacctagtgatgacagctttcagaagtctgaagcccaggccatcccagagatgcccatgtttgaaatccccagtcctgacttcagttttcatgctgatgagtacctagaagtctacgtttctgcttctgagcaccctaaccacttctggatccagatcgttggctcccgcagcctgcaattggataagcttgtcaatgagatgacccagcactatgagaatagtgtgcctgaagacttgactgtgcatgtaggagacattgtagcagcacctttacctacaaatggttcctggtatcgagcccgggtcctcggcaccttggagaatgggaacttggacctctattttgttgactttggagataatggagattgcccactgaaggacctcagggctctcaggagtgacttcctaagccttccatttcaagcaatagaatgtagtctggcacggattgctccctcaggtgaccagtgggaagaggaagctttggatgagtttgatagactcactcattgtgctgactggaagcctctggtagccaagatctctagctatgtccagactgggatctcaacttggccaaagatctacttatatgatactagcaatgggaagaaacttgatattgggctagaattagtacacaaaggatacgcaattgagcttcctgaagacatagaagaaaacagagctgtcccagacatgttgaaggacatggccacagaaacagatgcctctctcagcacgttgctcactgagaccaaaaagagctctggagagataacacataccctgtcctgcctcagcttatcagaagctgcttccatgtctggtgatgataaccttgaagatgactacttactctgaagtctgggcttcagtttgctcagccatctgctttgctgtgatttggcataggaattggtgcatggaggagaggagtgtatgataaaggatccatgcagtccttcctttattacacatatagtctggcttgctgtggaccaaattaatattctcctcccatcagactac

SEQ ID NO: 297319 - DNA, 2768 bp, Artificial Sequence
  derived and/or modified sequence
gcggggctcactgtggtggtgtgagtgggaggcggcggcgctggtggctgcagctggggtgaggcgcgaggcggcgcactcgacggctgactggagcagcggatataagtcaaagagtacagcagaaaatgtctactgaacggacttcttggacaagcctgtccaccattcagaaaatagccctgggccttgggatcccagccagtgcaacagttgcctatatcctataccgcaggtatagggaaagcagagaagagcggctgacatttgttggggaagatgacattgagatagagatgcgggttccccaggaggctgtgaaactcatcattggccggcaaggagccaatattaaacagctgcggaaacagacaggtgctcggattgatgtggacacagaggatgtaggcgatgagcgagtgctgcttatcagtggttttcctgttcaggtgtgcaaggccaaagcagcaatccatcagatcctgacagagaataccccagtgtctgagcagctttcagttccccagagatctgtgggcagaatcatagggagaggcggcgagacaattcgttctatctgtaaggcatctggagccaaaattacctgtgacaaagaatcagaagggacattactactatcaagacttataaaaatctcaggaacacagaaggaagtggcagcagccaagcatttgatactggagaaagtttcagaagatgaagaacttcggaagagaattgctcattctgcagaaaccagggtcccacgcaaacagccaatcagtgtgagaagagaagacatgacagagccaggtggagctggagagccagcattatggaaaaacaccagttctagcatggagccgactgcacccctggtgactcctccacccaaaggaggaggcgacatggctgtggtagtgtcaaaggaaggttcctgggagaaacctagtgatgacagctttcagaagtctgaagcccaggccatcccagagatgcccatgtttgaaatccccagtcctgacttcagttttcatgctgatgagtacctagaagtctacgtttctgcttctgagcaccctaaccacttctggatccagatcgttggctcccgcagcctgcaattggataagcttgtcaatgagatgacccagcactatgagaatagtgtgcctgaagacttgactgtgcatgtaggagacattgtagcagcacctttacctacaaatggttcctggtatcgagcccgggtcctcggcaccttggagaatgggaacttggacctctattttgttgactttggagataatggagattgcccactgaaggacctcagggctctcaggagtgacttcctaagccttccatttcaagcaatagaatgtagtctggcacggattgctccctcaggtgaccagtgggaagaggaagctttggatgagtttgatagactcactcattgtgctgactggaagcctctggtagccaagatctctagctatgtccagactgggatctcaacttggccaaagatctacttatatgatactagcaatgggaagaaacttgatattgggctagaattagtacacaaaggatacgcaattgagcttcctgaagacatagaagaaaacagagctgtcccagacatgttgaaggacatggccacagaaacagatgcctctctcagcacgttgctcactgagaccaaaaagagctctggagagataacacataccctgtcctgcctcagcttatcagaagctgcttccatgtctggtgatgataaccttgaagatgactacttactctgaagtctgggcttcagtttgctcagccatctgctttgctgtgtgagtgcagctatcatctatctgtagcaacaggaaagtaatgagggcgacagtggggcacttgctttgattccctctttcccatgccctgtcttaatatacttctctgcagctgctttcctgcagcttaacttgctctcagattgagcactttcaagctttttgtgtatttctgtctttggcaggatttggcataggaattggtgcatggaggagaggagtgtatgataaaggatccatgcagtccttcctttattacacatatagtctggcttgctgtggaccaaattaatattctcctcccatcagactacaaaaaaattggactaccacgctacaagtgtgtctcccccattccacctccggatccctccccaaccctccagtgtttgaatactgctgtgttacttccaggccgttcaacgtcaggctcagtcccctctaccagtcatgattcacattactactaggctgtatcctttttgaggctgggaaacagtcaggctttcgtcattggaagtgattctgcagacttctgactcaccttatcaggtgactctggttaaggaaagcttttgagtggtgaactcaaagactccagttgaatcaggaggcaaaggcaaaaattagcataattatatttaaaagcctcaggaagtgggaagagaatactgcctcccagcctcaattgctgatatgttattggagacaggcttttgaaactgctccagctatttctctgtaacctttagttaaaatataagtagaaaggagacaggaggctcaggaaattttctaaattgctagtataatatctatatgtatacacacatatacacccgtggagagagaggaagagtatacagtcctgtttgaatcatttggaggatttttttgctgaataaagttctcaag

SEQ ID NO: 297320 - DNA, 568 bp, Artificial Sequence
  derived and/or modified sequence
attaacaattgatggcacaggatgagaagcccaaacttggaaggaccctccagggaaataagaggaaaccaagagaaagagggcacagaaaccaaggaaagagttttgtggagggagtggccaccttcctgctaccgcagagagatgggatataagtcaaagagtacagcagaaaatgtctactgaacggacttcttggacaagcctgtccaccattcagaaaatagccctgggccttgggatcccagccagtgcaacagttgcctatatcctataccgcaggtatagggaaagcagagaagagcggctgacatttgttggggaagatgacattgagatagagatgcgggttccccaggaggctgtgaaactcatcattggccggcaaggagccaatattaaacagctgcggaaacagacaggtgctcggattgatgtggacacagaggatgtaggcgatgagcgagtgctgcttatcagtggttttcctgttcaggtgtgcaaggccaaagcagcaatccatcagatcctgacagagaataccccagtgtctgagcagctttcagtt

SEQ ID NO: 297321 - protein, 152 aa, Artificial Sequence
  derived and/or modified sequence
  misc_feature (1)..(1): Xaa can be any naturally occurring amino acid
XLLLSAALSAGKVTIDSSYDIAKISQHLDFISIMTYDFHGAWRGTTGHHSPLFRGQEDASPDRFSNTICDFLRGATVHRILGQQVPYATKGNQWVGYDDQESVKSKVQYLKDRQLAGAMVWALDLDDFQGSFCGQDLRFPLTNAIKDALAAT

SEQ ID NO: 297322 - DNA, 459 bp, Artificial Sequence
  derived and/or modified sequence
taactgcttctgtctgccgccctcagcgcaggcaaggttaccatcgactcctcgtacgatatagccaaaatcagtcagcacctggatttcatttctatcatgacttacgattttcatggggcatggagagggacaacgggacaccacagcccactgtttaggggccaggaagacgcttctccagaccggttctcgaacaccatttgcgacttcctgcggggggctacagtgcatcggattctggggcagcaggtcccttatgccaccaagggcaatcagtgggttggttacgacgaccaggaatccgttaaaagtaaagtccaatacctcaaagataggcagctcgcaggggccatggtgtgggcgctggacctagacgacttccaaggctccttttgtggccaggatctacgcttccccctgacaaacgcgatcaaagacgctctcgcggcaacttag

SEQ ID NO: 297323 - DNA, 459 bp, Artificial Sequence
  derived and/or modified sequence
tgactgctgctgtctgctgccctgtctgctgggaaggtgaccatcgacagcagctatgacatcgccaagatcagccagcacctggacttcatcagcatcatgacctatgacttccatggagcctggaggggcaccaccggccaccacagccccctcttccggggccaggaggatgccagcccagaccgcttcagcaacaccatctgtgacttcctgcggggggccaccgtgcaccgcatcctgggccagcaggtgccctatgccaccaagggcaaccagtgggtgggctatgatgaccaggagagcgtgaagagcaaggtgcagtacctgaaggaccggcagctggccggggccatggtgtgggccctggacctggatgacttccagggcagcttctgtggccaggacctgcgcttccccctgaccaatgccatcaaggatgccctggccgccacctag

SEQ ID NO: 297324 - DNA, 459 bp, Artificial Sequence
  derived and/or modified sequence
tgactgctgctgagcgccgccctgagcgccggcaaggtgaccatcgactcgagctatgacatcgcaaagatctcacagcacctggatttcatcagcattatgacctacgatttccacggtgcatggcgtgggaccacgggccaccacagcccccttttccggggacaagaggacgcatctccggatcggttctcaaatacaatatgcgattttctccggggcgccacagtgcatcgcattctcgggcaacaggttccctatgctacaaaaggcaaccagtgggtggggtacgatgaccaggaatcagttaagagtaaggtacagtatctcaaagacaggcagctggcaggggccatggtttgggctctagacttagatgactttcaagggtccttttgtgggcaagatttaaggtttcccttaacaaatgcaattaaagacgccttagcggcaacctag

SEQ ID NO: 297325 - DNA, 459 bp, Artificial Sequence
  derived and/or modified sequence
taactgctgctctccgccgcactgtcagctgggaaggtgaccatagacagcagctacgatattgcaaagatctcccagcacctggattttatatcaatcatgacatatgacttccacggcgcatggaggggtacaaccgggcaccattcgcccctattccggggacaggaagacgcctcacccgaccgatttagcaataccatctgcgactttctgcggggtgccactgtccatcggattttggggcagcaggtgccgtacgccacaaagggtaaccagtgggtaggctacgatgaccaggaaagcgtgaagtctaaggttcagtatctcaaagatagacaactcgccggtgccatggtttgggctctggacttagatgacttccaggggagtttttgcggccaagatttgagattccctcttaccaatgctatcaaggatgcactggcggcaacgtag

SEQ ID NO: 297326 - DNA, 921 bp, Artificial Sequence
  derived and/or modified sequence
gctcctgctcagcgcagcactgtctgcggggaaggtcaccattgacagcagctatgacattgccaagatatcccaacacctggatttcattagcatcatgacctacgattttcatggagcctggcgtgggaccacaggccatcacagtcccctgttccgaggtcaggaggatgcaagtcctgacagattcagcaacactatctgtgacttcctccgcggagccacagtccatagaatcctcggccagcaggtcccctatgccaccaagggcaaccagtgggtaggatacgacgaccaggaaagcgtcaaaagcaaggtgcagtacctgaaggacaggcagctggcgggcgccatggtatgggccctggacctggatgacttccagggctccttctgtggccaggatctgcgcttccctctcaccaatgccatcaaggatgcactcgctgcaacgtagccctctgttctgcacacagcacgggggccaaggatgccccgtccccctctggctccagctggccgggagcctgatcacctgccctgctgagtcccaggctgagcctcagtctccctcccttggggcctatgcagaggtccacaacacacagatttgagctcagccctggtgggcagagaggtagggatggggctgtggggatagtgaggcatcgcaatgtaagactcgggattagtacacacttgttgattaatggaaatgtttacagatccccaagcctggcaagggaatttcttcaactccctgccccccagccctccttatcaaaggacaccattttggcaagctctatcaccaaggagccaaacatcctacaagacacagtgaccatactaattataccccctgcaaagcccagcttgaaaccttcacttaggaacgtaatcgtgtcccctatcctactt

SEQ ID NO: 297327 - DNA, 459 bp, Artificial Sequence
  derived and/or modified sequence
tgactgctgctgagcgccgccctgagcgccggcaaggtgaccatcgacagcagctacgacatcgccaagatcagccagcacctggacttcatcagcatcatgacctacgacttccacggcgcctggagaggcaccaccggccaccacagccccctgttcagaggccaggaggacgccagccccgacagattcagcaacaccatctgcgacttcctgagaggcgccaccgtgcacagaatcctgggccagcaggtgccctacgccaccaagggcaaccagtgggtgggctacgacgaccaggagagcgtgaagagcaaggtgcagtacctgaaggacagacagctggccggcgccatggtgtgggccctggacctggacgacttccagggcagcttctgcggccaggacctgagattccccctgaccaacgccatcaaggacgccctggccgccacctag

SEQ ID NO: 297328 - DNA, 423 bp, Artificial Sequence
  derived and/or modified sequence
atgcagagactgaacatcggctacgtgatcaacgtgaccacccacctgcccctgtaccactacgagaagggcctgttcaactacaagagactgcccgccaccgacagcaacaagcagaacctgagacagtacttcgaggaggccttcgagttcatcgaggaggcccaccagtgcggcaagggcctgctgatccactgccaggccggcgtgagcagaagcgccaccatcgtgatcgcctacctgatgaagcacaccagaatgaccatgaccgacgcctacaagttcgtgaagggcaagagacccatcatcagccccaacctgaacttcatgggccagctgctggagttcgaggaggacctgaacaacggcgtgacccccagaatcctgacccccaagctgatgggcgtggagaccgtggtgtag

SEQ ID NO: 297329 - DNA, 1765 bp, Artificial Sequence
  derived and/or modified sequence
ttacatttacagtgtagcaaaagagaaagtaactatgttgctgctggagatcaatgaagccgagtgaatgggggctgaatgtgcgagtccatagctgaagaggagcgccagatggtggaggaatacacttatttatgaagtggacttagtagttttaagcagaaccatgaaaacctctgtgacaactccctccagctccaagagtgccgggaggtggggggcggcgcatccgcggcctcgagcttgctacctcagcccatccccaccacccctgacatcgagaacgctgagctcacccccatcttgcccttcctgttccttggcaatgagcaggatgctcaggacctggacaccatgcagcggctgaacatcggctacgtcatcaacgtcaccactcatcttcccctctaccactatgagaaaggcctgttcaactacaagcggctgccagccactgacagcaacaagcagaacctgcggcagtactttgaagaggcttttgagttcattgaggaagctcaccagtgtgggaaggggcttctcatccactgccaggctggggtgtcccgctccgccaccatcgtcatcgcttacttgatgaagcacactcggatgaccatgactgatgcttataaatttgtcaaaggcaaacgaccaattatctccccaaaccttaacttcatggggcagttgctagagttcgaggaagacctaaacaacggtgtgacaccgagaatccttacaccaaagctgatgggcgtggagacggttgtgtgacaatggtctggatggaaaggattgctgctctccattaggagacaatgaggaaggaggatggattctggttttttttctttctttttttttttgtagttgggagtaagtttgtgaatggaaacaaacttgtttaaacactttatttttaacaagtgtaagaagactataacttttgatgccattgagattcacctcccacaaactgacaaattaaggaggttaaagaagtaatttttttaagccaacaataaaaatataatacaacttgtttctcccccttttccttttaagctatttgtagagtttatgactaaatagtctgtgcaggttcatagaccgaagatactacacactttaaaccaattaaaaagaaccaaaagtaaatagaaaagacattgaatcaccaaggcctgggatcaacctgggctgtccacacagaaaacaaaaacccaaccaaaccaagccctgttgtgctcactggtgcaaagagaagatcagggcagcttaagtggtctaagaatccttcaggcattctttaaggagaaaaaggatacctttgattttgtgtgtttcatgctctggattttttttttttttccttctctgggtttaagagattttttttgaaatagtgaggaactgaccattatatgccttcactggcttcttgtgcaataatatgatgttttaagtgtgcaaacaagttagagctggcagctgaatgatagacaaatagtgcaaatttgccagcttggagatagaaaggaattcaacaatatatcaaatactttccttcccacctttttccttttttttttttttttctgatttgattctggttacagtgccataaaccttgttacatatgtatatcagaatgtaagaaaaaaaaatttatttaaaaatatttttcgcaaaaaaaaaaaaaatcttggtgtgtttctgttgattgtgtaaaaatttattttcattatataaatgaaactgg

SEQ ID NO: 297330 - DNA, 2244 bp, Artificial Sequence
  derived and/or modified sequence
cttgtatggttgactttgagtgattcccaggatatttaccctgctattgtcttaccataatcttgatgtgtctagcctcttacaaatgagaaaatcctaccgaggaatttcccatttgtaatagtttgtcttggggagcaaagaggaggatagccaatgatcatgatgatctcctcttttctcacgcagagcaggtgttcatgataaaaagcaagtcttttgtgtcttcatgatctgaagagaggaaacaacacggatcaagatgatcctagacctcctaatcatggggatgattacaaggagttgcagaccctactctctattttgcagtgggtggagttgtggataggggtgacccatcagtcattgagaaatgaatctcctgggtgctacttgtgaaagtgaggatcctctctccctttcctgtggatgcagctgagattctggacagcctagacttcttcctcagtgtcagagtaagattgcctcaatggggcggggcaggacacactgctgacctcaccactgggcgccctgggcagccactgcgaggcctcgtcattttcgagttggtgagacaccgcggcagtcgacttggaagatgctctggtggtagaggtggacttagtagttttaagcagaaccatgaaaacctctgtgacaactccctccagctccaagagtgccgggaggtggggggcggcgcatccgcggcctcgagcttgctacctcagcccatccccaccacccctgacatcgagaacgctgagctcacccccatcttgcccttcctgttccttggcaatgagcaggatgctcaggacctggacaccatgcagcggctgaacatcggctacgtcatcaacgtcaccactcatcttcccctctaccactatgagaaaggcctgttcaactacaagcggctgccagccactgacagcaacaagcagaacctgcggcagtactttgaagaggcttttgagttcattgaggaagctcaccagtgtgggaaggggcttctcatccactgccaggctggggtgtcccgctccgccaccatcgtcatcgcttacttgatgaagcacactcggatgaccatgactgatgcttataaatttgtcaaaggcaaacgaccaattatctccccaaaccttaacttcatggggcagttgctagagttcgaggaagacctaaacaacggtgtgacaccgagaatccttacaccaaagctgatgggcgtggagacggttgtgtgacaatggtctggatggaaaggattgctgctctccattaggagacaatgaggaaggaggatggattctggttttttttctttctttttttttttgtagttgggagtaagtttgtgaatggaaacaaacttgtttaaacactttatttttaacaagtgtaagaagactataacttttgatgccattgagattcacctcccacaaactgacaaattaaggaggttaaagaagtaatttttttaagccaacaataaaaatataatacaacttgtttctcccccttttccttttaagctatttgtagagtttatgactaaatagtctgtgcaggttcatagaccgaagatactacacactttaaaccaattaaaaagaaccaaaagtaaatagaaaagacattgaatcaccaaggcctgggatcaacctgggctgtccacacagaaaacaaaaacccaaccaaaccaagccctgttgtgctcactggtgcaaagagaagatcagggcagcttaagtggtctaagaatccttcaggcattctttaaggagaaaaaggatacctttgattttgtgtgtttcatgctctggattttttttttttttccttctctgggtttaagagattttttttgaaatagtgaggaactgaccattatatgccttcactggcttcttgtgcaataatatgatgttttaagtgtgcaaacaagttagagctggcagctgaatgatagacaaatagtgcaaatttgccagcttggagatagaaaggaattcaacaatatatcaaatactttccttcccacctttttccttttttttttttttttctgatttgattctggttacagtgccataaaccttgttacatatgtatatcagaatgtaagaaaaaaaaatttatttaaaaatatttttcgcaaaaaaaaaaaaaatcttggtgtgtttctgttgattgtgtaaaaatttattttcattatataaatgaaactgg

SEQ ID NO: 297331 - DNA, 423 bp, Artificial Sequence
  derived and/or modified sequence
atgcaacgcctaaatatcgggtacgttatcaacgttactacacatttgccactttatcactatgaaaaaggtctgtttaactataaaagactgccagcaaccgattccaacaagcagaacttacgccagtatttcgaagaagctttcgaattcatcgaagaagcgcaccagtgcggcaaagggctgttaatacattgccaggctggcgttagccggagcgcaaccattgtgattgcgtatctcatgaaacatacaagaatgaccatgaccgacgcatataagttcgtgaaggggaaacgccctatcatctctccgaatcttaactttatgggccaactgttagagttcgaggaagatttgaacaatggggtgacaccgaggatcctgacgcccaagctcatgggggttgagaccgtagtttag

SEQ ID NO: 297332 - DNA, 423 bp, Artificial Sequence
  derived and/or modified sequence
atgcagcgcctgaatatcggctatgtcatcaatgtgaccacacacttgcccctgtaccattatgaaaagggactcttcaactacaaacgtctgcctgcgaccgacagcaacaagcagaatctgagacagtacttcgaagaagccttcgagtttattgaagaagcgcaccagtgtggcaagggactgctcatccactgtcaggctggagttagtcgatccgcgacgatcgtcatagcttatctcatgaaacacacacgcatgaccatgacagacgcctacaagtttgtgaagggtaagcgcccaattatctcacctaatctgaattttatggggcagctactagaattcgaagaagacctcaataacggcgtaaccccccgaatacttacccccaagcttatgggcgtggagaccgtcgtctag

SEQ ID NO: 297333 - DNA, 423 bp, Artificial Sequence
  derived and/or modified sequence
atgcagaggctgaacatcggctacgtgatcaacgtgaccacccacctgcccctgtaccactatgagaagggcctcttcaactacaagaggctgcctgccacagacagcaacaagcagaacctgcggcagtactttgaggaggcctttgagttcatcgaggaggcccaccagtgtgggaagggcctgctgatccactgccaggccggcgtgagccgcagcgccaccatcgtcatcgcctacctgatgaagcacaccaggatgaccatgacagatgcctacaagtttgtgaagggcaagaggcccatcatcagccccaacctgaacttcatgggccagctgctggagtttgaggaggacctgaacaacggggtgaccccccgcatcctgacccccaagctgatgggcgtggagaccgtggtgtag

SEQ ID NO: 297334 - DNA, 423 bp, Artificial Sequence
  derived and/or modified sequence
atgcagcggctgaacatcggctacgtgatcaacgtgaccacccacctccccctgtatcactatgagaaagggctcttcaattacaaacggctgcctgcgactgacagcaacaagcagaacctgagacagtactttgaagaagccttcgagttcattgaagaggcccaccagtgtggcaaaggtctgctcattcattgtcaggctggagtgtctagatcggcgacgatcgttatcgcctatctcatgaagcacactcgtatgaccatgaccgatgcttacaagtttgtcaagggcaagaggcctatcatcagccccaacctcaacttcatgggccagctcctggagtttgaggaagatctcaataacggtgtgacgcccagaatcttgactccaaaactaatgggtgtggagaccgtcgtttag

SEQ ID NO: 297335 - DNA, 423 bp, Artificial Sequence
  derived and/or modified sequence
atgcagcggctgaacatcggctacgtgatcaacgtgaccacccacttacccttgtaccactacgaaaagggcctgtttaattacaaacgactgccggcaacagatagcaacaaacagaacctcagacagtattttgaggaagcatttgagttcattgaagaggcgcatcagtgtggcaaggggctcctgatacactgccaggccggagtatctaggagcgccaccattgtgattgcctacctgatgaagcacacacggatgaccatgacagatgcatataaattcgtgaaggggaaaaggccaatcatttcccctaatttgaacttcatggggcagcttctggagttcgaagaggacctgaataatggagtgacccctcggattttgacgccaaaattgatgggtgtggagacagttgtgtag

SEQ ID NO: 297336 - DNA, 423 bp, Artificial Sequence
  derived and/or modified sequence
atgcagcgcctgaacatcgggtacgtcattaacgtcaccacccatctgccgctgtaccattacgagaaaggattattcaactataagcgcctgcctgctaccgactccaataagcaaaacctgcggcagtattttgaggaagcattcgagttcatcgaagaggcccaccagtgcggtaaggggctcttgattcactgccaagccggtgttagccgcagtgccacaatcgtgatagcttacttgatgaaacacacccggatgactatgaccgatgcttacaagtttgttaaaggaaaacgtcctataatcagccccaatctgaattttatgggtcagctgttggagttcgaagaagaccttaataatggcgtcacccctagaatcctgacacctaagctgatgggtgttgaaactgttgtgtag

SEQ ID NO: 297337 - DNA, 423 bp, Artificial Sequence
  derived and/or modified sequence
atgcagcgtctgaatattggctacgtgatcaatgttacaacacacctgcctctgtatcactatgagaagggactcttcaattataagaggctgcctgccacggacagcaacaagcaaaatctgcggcagtatttcgaggaagcatttgaatttattgaagaggcccaccagtgtggaaagggcttgctgatacattgtcaggcgggtgtgagcagatccgcgaccatcgtgatcgcctacctgatgaaacacactcggatgaccatgacagatgcatacaagtttgtgaaaggaaagagacccattatcagccctaatctgaattttatggggcagctcttagagttcgaggaggacctgaataacggtgtgacacctagaattctaacacccaaattaatgggcgtggagactgtggtgtag

SEQ ID NO: 297338 - protein, 341 aa, Artificial Sequence
  derived and/or modified sequence
MGTLPWLLAFFILGLQAWDTPTIVSRKEWGARPLACRALLTLPVAYIITDQLPGMQCQQQSVCSQMLRGLQSHSVYTIGWCDVAYNFLVGDDGRVYEGVGWNIQGLHTQGYNNISLGIAFFGNKIGSSPSPAALSAAEGLISYAIQKGHLSPRYIQPLLLKEETCLDPQHPVMPRKVCPNIIKRSAWEARETHCPKMNLPAKYVIIIHTAGTSCTVSTDCQTVVRNIQSFHMDTRNFCDIGYHFLVGQDGGVYEGVGWHIQGSHTYGFNDIALGIAFIGYFVEKPPNAAALEAAQDLIQCAVVEGYLTPNYLLMGHSDVVNILSPGQALYNIISTWPHFKH

SEQ ID NO: 297339 - DNA, 1026 bp, Artificial Sequence
  derived and/or modified sequence
atgggcacactgccctggctgctagctttcttcatattaggcttgcaagcctgggacacgcctacaatcgtgtcaagaaaggaatggggagcaaggcctttggcctgtcgagccttactgactttacccgtcgcctacatcataaccgatcagctgccagggatgcagtgtcagcagcagtcggtctgtagtcagatgctgcggggtttgcagagccactccgtttacaccatcggctggtgtgacgtggcttataactttcttgtgggagacgatgggcgtgtctatgaaggcgtcggctggaacatccaaggtctccatacacaggggtataacaacatttctctcggtattgcattttttggcaacaagatcggctcttccccttctccagctgcgcttagcgctgcagaaggcctgatctcatacgcaatacaaaaaggacatctcagcccacgctacatacaacctctcctgctgaaggaagagacctgcctcgatccccagcaccctgtgatgcctcgaaaggtctgccctaacattattaagcggtccgcatgggaggcccgagagactcattgtcctaaaatgaatctgcctgcaaagtacgtgataatcatccacacggcaggtacatcctgcaccgtgtctactgattgccagaccgtcgtaaggaatatccagtcattccacatggatacaagaaatttctgcgacatcggttatcatttcttggtgggccaggacgggggagtgtacgaaggcgtcggatggcacattcagggcagccacacatatggttttaatgatatcgcactcggtatagcgtttatcggctacttcgttgaaaagccacccaatgccgctgccttggaagcggcacaggacctgattcagtgcgccgtcgtggaaggatatcttacaccaaattacctgctcatgggtcattccgatgttgtgaatattctgtccccaggccaggcactgtacaacatcattagtacttggcctcacttcaagcattag

SEQ ID NO: 297340 - DNA, 1026 bp, Artificial Sequence
  derived and/or modified sequence
atgggaaccctaccatggctgctggcgttcttcatcctgggcttacaggcctgggacacacctactatcgtctcacgtaaggagtggggtgccagaccattggcatgcagggccctcctaacgctgcccgtggcttacattataacagatcagctaccaggtatgcaatgtcagcagcaaagtgtgtgtagccagatgctgcgagggctgcagtcacactctgtgtacactattgggtggtgcgacgtagcttataacttcctggttggcgatgacggacgcgtatacgagggggttgggtggaatatacaggggttgcacacccagggctacaataatatttccttgggcatcgcattcttcggcaataaaatcggatcctcaccctctccagccgcattaagcgcagccgagggactgattagctacgctatacagaaaggtcatctgtcacccagatacatccagcccctgctgctcaaggaagaaacctgcctggatccacagcatccagtaatgccccgaaaggtatgcccaaatattatcaaacgctctgcatgggaggcccgagaaacccattgtcccaaaatgaacttaccagccaagtacgttattataatacataccgccggaactagttgtaccgtgagcactgactgtcagaccgtagtcagaaatattcaaagcttccatatggacaccagaaacttctgcgacatcggttatcatttcctcgtgggccaagacggcggcgtgtacgaaggggttggatggcatatacagggttcccatacttacggctttaacgatatcgctcttggaattgccttcataggttactttgtggaaaagccacccaacgccgctgcccttgaagccgcccaagatctgattcagtgcgcagtcgtagagggatatctaactcccaactacctgcttatggggcattcagatgtggttaacatcttgagtcctggacaggccctgtataatattatctccacatggcctcacttcaagcattag

SEQ ID NO: 297341 - DNA, 1026 bp, Artificial Sequence
  derived and/or modified sequence
atggggacacttccttggttgttagctttcttcattctagggctacaggcttgggacactccaaccatagtcagtcggaaggagtggggcgctcgacctcttgcatgtagagcgctgctgacacttccagtcgcctacattattacagaccagcttccaggaatgcagtgccaacagcagtcagtttgtagtcagatgttgagagggttacagtcacattccgtgtatactattggctggtgcgatgtggcatataacttcctagtcggtgacgatggcagggtgtatgagggggtaggttggaatatccagggacttcatacacagggctataataacatttctctggggatcgccttttttgggaacaaaatcggtagctccccctcacccgccgccctgtccgcagccgagggactgatatcttacgcaattcaaaagggtcatctaagcccccgttatatccagccactcctgttgaaagaagagacatgcctcgatccacagcatccagttatgccacgaaaagtttgtccaaacatcattaaaaggtctgcatgggaagccagagaaacccactgtccaaaaatgaatctgccggctaagtacgtgataattatccatacggctggaactagctgcacggtgtcaaccgattgtcaaacagtcgtgcgtaatattcagtcatttcatatggatactcggaacttctgtgacataggctaccacttcctagtgggacaggatggaggcgtgtatgaaggagtcgggtggcacatccagggatctcatacctacggttttaatgacatcgctttaggtatcgccttcattgggtattttgtggagaagcctcccaatgccgctgcactcgaagctgctcaagacctaattcaatgtgccgtcgttgaaggatacttgacccctaattacctcctgatgggccatagcgatgtcgtcaatattctatctcctggccaagccctttacaatataatttctacatggccacattttaagcattag

SEQ ID NO: 297342 - DNA, 1173 bp, Artificial Sequence
  derived and/or modified sequence
cctctcttccagggctgccgtccacactctcccggtcagagtcctgggaccacatggggacgctgccatggcttcttgccttcttcattctgggtctccaggcttgggatactcccaccatcgtctcccgcaaggagtggggggcaagaccgctcgcctgcagggccctgctgaccctgcctgtggcctacatcatcacagaccagctcccagggatgcagtgccagcagcagagcgtttgcagccagatgctgcgggggttgcagtcccattccgtctacaccataggctggtgcgacgtggcgtacaacttcctggttggggatgatggcagggtgtatgaaggtgttggctggaacatccaaggcttgcacacccagggctacaacaacatttccctgggcatcgccttctttggcaataagataggcagcagtcccagccctgctgccttatcagctgcagagggtctgatctcctatgccatccagaagggtcacctgtcgcccaggtatattcagccacttcttctgaaagaagagacctgcctggaccctcaacatccagtgatgcccaggaaggtttgccccaacatcatcaaacgatctgcttgggaagccagagagacacactgccctaaaatgaacctcccagccaaatatgtcatcatcatccacaccgctggcacaagctgcactgtatccacagactgccagactgtcgtccgaaacatacagtcctttcacatggacacacggaacttttgtgacattggatatcacttcctggtgggccaggatggtggcgtgtatgaaggggttggatggcacatccaaggctctcacacttatggattcaacgatattgccctaggaattgccttcatcggctactttgtagaaaagcctccaaatgctgcagcgctggaggcggcccaggacctgatccagtgtgccgtggttgaggggtacctgactccaaactacctgctgatgggccacagtgacgtggtcaacatcctgtcccctgggcaggctttgtataacatcatcagcacctggcctcatttcaagcactgaaggaggccccactccctttgagactgccctccctcccctgctgggtctctccaaccctcaccagccaaggtggctcagcaccttgtgtccccct

SEQ ID NO: 297343 - DNA, 1026 bp, Artificial Sequence
  derived and/or modified sequence
atgggcaccctgccctggctgctggccttcttcatcctgggcctgcaggcctgggacacccccaccatcgtgagcagaaaggagtggggcgccagacccctggcctgcagagccctgctgaccctgcccgtggcctacatcatcaccgaccagctgcccggcatgcagtgccagcagcagagcgtgtgcagccagatgctgagaggcctgcagagccacagcgtgtacaccatcggctggtgcgacgtggcctacaacttcctggtgggcgacgacggcagagtgtacgagggcgtgggctggaacatccagggcctgcacacccagggctacaacaacatcagcctgggcatcgccttcttcggcaacaagatcggcagcagccccagccccgccgccctgagcgccgccgagggcctgatcagctacgccatccagaagggccacctgagccccagatacatccagcccctgctgctgaaggaggagacctgcctggacccccagcaccccgtgatgcccagaaaggtgtgccccaacatcatcaagagaagcgcctgggaggccagagagacccactgccccaagatgaacctgcccgccaagtacgtgatcatcatccacaccgccggcaccagctgcaccgtgagcaccgactgccagaccgtggtgagaaacatccagagcttccacatggacaccagaaacttctgcgacatcggctaccacttcctggtgggccaggacggcggcgtgtacgagggcgtgggctggcacatccagggcagccacacctacggcttcaacgacatcgccctgggcatcgccttcatcggctacttcgtggagaagccccccaacgccgccgccctggaggccgcccaggacctgatccagtgcgccgtggtggagggctacctgacccccaactacctgctgatgggccacagcgacgtggtgaacatcctgagccccggccaggccctgtacaacatcatcagcacctggccccacttcaagcactag

SEQ ID NO: 297344 - DNA, 1026 bp, Artificial Sequence
  derived and/or modified sequence
atgggaaccctcccttggttgcttgctttctttattctcggacttcaggcctgggatactcctaccatcgtttcgcgtaaggaatggggagccaggccactcgcttgtcgggccctgcttacactacccgtcgcttacataatcaccgatcaattgccaggcatgcagtgtcagcagcagagcgtatgttctcaaatgctgcgcggcctccagtctcattccgtgtacaccatcggttggtgtgacgtggcatacaacttccttgtgggcgatgatggcagggtttatgaaggagttggatggaacatacagggactgcatacacaagggtacaataatatctctctgggaatagcattcttcggcaataaaattggttcgtccccctcccccgccgccttgtcggcggcagagggtctgatctcctacgcaatacagaagggccatctctcccctcggtacattcaaccgctgcttctgaaagaagagacctgcctcgacccccagcaccccgtcatgcccagaaaagtgtgcccaaacatcattaaacgatctgcatgggaggccagagagacacattgcccaaagatgaacttacctgccaagtatgtaattattattcacacggcaggaacttcttgtactgtctcaactgattgtcagaccgtagtgcgtaatatacagagctttcatatggatacccgcaacttctgcgacataggctaccattttctggtgggtcaagatggaggcgtttacgagggggtggggtggcacattcaaggctcccacacttacgggttcaacgatattgcactgggcattgcatttattggctattttgtagaaaagcctcccaacgcagccgcactggaggccgctcaggacttaatacaatgtgcggtggtcgaaggctacctcacacctaactatctcctaatgggacattctgacgtggtcaatattctctcgcccggacaggctctatataatatcataagcacctggcctcactttaaacattag

SEQ ID NO: 297345 - DNA, 1026 bp, Artificial Sequence
  derived and/or modified sequence
atgggcaccctgccctggctgctggccttcttcatcctgggcctgcaggcctgggacacccccaccatcgtgtccaggaaggagtggggcgcccggcccctggcctgccgggccctgctgaccctgcctgtggcctacatcatcacagaccagctgcccggcatgcagtgccagcagcagagcgtgtgcagccagatgctgcggggcctgcagagccacagcgtgtacaccatcggctggtgtgatgtggcctacaacttcctggtgggagatgatggccgggtgtatgagggcgtgggctggaacatccagggcctgcacacccagggctacaacaacatcagcctgggcatcgccttctttggaaacaagattggcagcagccccagccctgctgccctgtctgctgctgagggcctcatctcctatgccatccagaagggccacctgagcccccgctacatccagcccctgctgctgaaggaggagacctgcctggacccccagcaccctgtgatgcccaggaaggtgtgccccaacatcatcaagaggtctgcctgggaggcccgggagacccactgccccaagatgaacctgcctgccaagtatgtgatcatcatccacacagctggcaccagctgcaccgtgtccacagactgccagacagtggtgaggaacatccagagcttccacatggacaccaggaacttctgtgacatcggctaccacttcctggtgggccaggatggaggagtgtatgaaggagtgggctggcacatccagggcagccacacctacggcttcaatgacatcgccctgggcatcgccttcatcggctactttgtggagaagcccccaaatgctgctgccctggaggccgcccaggacctgatccagtgtgctgtggtggagggctacctgacccccaactacctgctgatgggccacagtgatgtggtgaacatcctgagccctggccaggccctgtacaacatcatcagcacctggccccacttcaagcactag

SEQ ID NO: 297346 - DNA, 1026 bp, Artificial Sequence
  derived and/or modified sequence
atgggcaccctgccctggctgctggccttcttcatcctgggcctgcaggcatgggacacacccactattgtaagcagaaaagagtggggtgcacggcctctcgcatgtagggcacttctcacactgcctgtagcctacataataactgatcagctcccaggtatgcagtgtcagcagcaaagcgtgtgttctcagatgctccgagggctgcagagtcactcggtatacaccataggctggtgtgatgtcgcgtacaacttcctcgtgggagacgatggacgagtctacgaaggggtaggctggaacattcagggcctgcatacgcaagggtataataacatttcgcttggtatcgcttttttcggaaacaagattgggagtagcccatctcctgccgcactgtccgctgccgaagggctgatctcttacgccatccagaaagggcatctgtcaccaagatatatccagcccctcctcctcaaagaggaaacctgtctcgatccccaacaccccgtgatgccacgaaaggtctgtcctaacatcatcaaacgcagcgcatgggaagcccgtgagactcactgtcccaaaatgaacctgcccgccaaatacgtaatcatcatacacactgccggaacctcttgtacggtgagtacggactgccagacagttgtacggaatattcagtcctttcatatggatactcggaacttttgtgacattggatatcacttcctggtaggccaggacggcggcgtatatgaaggagtcggatggcacattcaggggagccacacctatggctttaacgacattgctctcggaatcgcctttatcggatactttgtggagaagccgcccaacgccgccgctctggaagctgcacaggatctgattcagtgtgccgttgtggaagggtacttgacaccgaactatctcttaatggggcactccgacgtggtgaatatcctgtcaccaggtcaagccctatacaacataataagcacgtggcctcattttaaacactag

SEQ ID NO: 297347 - RNA, 1026 nt, Artificial Sequence
  derived and/or modified sequence
augggaacccuaccauggcugcuggcguucuucauccugggcuuacaggccugggacacaccuacuaucgucucacguaaggaguggggugccagaccauuggcaugcagggcccuccuaacgcugcccguggcuuacauuauaacagaucagcuaccagguaugcaaugucagcagcaaaguguguguagccagaugcugcgagggcugcagucacacucuguguacacuauuggguggugcgacguagcuuauaacuuccugguuggcgaugacggacgcguauacgaggggguuggguggaauauacagggguugcacacccagggcuacaauaauauuuccuugggcaucgcauucuucggcaauaaaaucggauccucacccucuccagccgcauuaagcgcagccgagggacugauuagcuacgcuauacagaaaggucaucugucacccagauacauccagccccugcugcucaaggaagaaaccugccuggauccacagcauccaguaaugccccgaaagguaugcccaaauauuaucaaacgcucugcaugggaggcccgagaaacccauugucccaaaaugaacuuaccagccaaguacguuauuauaauacauaccgccggaacuaguuguaccgugagcacugacugucagaccguagucagaaauauucaaagcuuccauauggacaccagaaacuucugcgacaucgguuaucauuuccucgugggccaagacggcggcguguacgaagggguuggauggcauauacaggguucccauacuuacggcuuuaacgauaucgcucuuggaauugccuucauagguuacuuuguggaaaagccacccaacgccgcugcccuugaagccgcccaagaucugauucagugcgcagucguagagggauaucuaacucccaacuaccugcuuauggggcauucagaugugguuaacaucuugaguccuggacaggcccuguauaauauuaucuccacauggccucacuucaagcauuag

SEQ ID NO: 297348 - RNA, 1026 nt, Artificial Sequence
  derived and/or modified sequence
auggggacacuuccuugguuguuagcuuucuucauucuagggcuacaggcuugggacacuccaaccauagucagucggaaggaguggggcgcucgaccucuugcauguagagcgcugcugacacuuccagucgccuacauuauuacagaccagcuuccaggaaugcagugccaacagcagucaguuuguagucagauguugagaggguuacagucacauuccguguauacuauuggcuggugcgauguggcauauaacuuccuagucggugacgauggcaggguguaugaggggguagguuggaauauccagggacuucauacacagggcuauaauaacauuucucuggggaucgccuuuuuugggaacaaaaucgguagcucccccucacccgccgcccuguccgcagccgagggacugauaucuuacgcaauucaaaagggucaucuaagcccccguuauauccagccacuccuguugaaagaagagacaugccucgauccacagcauccaguuaugccacgaaaaguuuguccaaacaucauuaaaaggucugcaugggaagccagagaaacccacuguccaaaaaugaaucugccggcuaaguacgugauaauuauccauacggcuggaacuagcugcacggugucaaccgauugucaaacagucgugcguaauauucagucauuucauauggauacucggaacuucugugacauaggcuaccacuuccuagugggacaggauggaggcguguaugaaggagucggguggcacauccagggaucucauaccuacgguuuuaaugacaucgcuuuagguaucgccuucauuggguauuuuguggagaagccucccaaugccgcugcacucgaagcugcucaagaccuaauucaaugugccgucguugaaggauacuugaccccuaauuaccuccugaugggccauagcgaugucgucaauauucuaucuccuggccaagcccuuuacaauauaauuucuacauggccacauuuuaagcauuag

SEQ ID NO: 297349 - DNA, 450 bp, Artificial Sequence
  derived and/or modified sequence
atgagactgctgcccagaaccagcatccccagaagacagcccttcagcagatggagaaagcagaacctgaagacccccgtgagcctgaactgcagcagaagctgcaagctgctggagggcagaggcatgcccgccatcttcatcatcgccctgcccccccccaacaccatcggcggccccgccctgatcatcagcctgcaggtgtaccccgccgcccccgagagacagagacccgccagaagaggccacgacgacggcggcggcttcgtgaagaccaagatgggcatctgcagagagaagaaggagagaagcgactgctactgcgtgtacatcgagagagaggacatcagagacagcatcctgaagaagacctgcaccctgaacaactgcttcgccgagatgctgctgatctgcagcttcgcccccgccaccctgccccagcccctgtag

SEQ ID NO: 297350 - DNA, 450 bp, Artificial Sequence
  derived and/or modified sequence
atgaggctgctaccccgaacgtctatcccgaggaggcagcctttctctagatggaggaagcagaatctgaagactcccgttagcctgaactgctcaaggtcgtgcaagctactcgagggccggggaatgcctgctatttttatcatcgcactgccgccaccaaacacaataggcggcccagcactaattattagtttgcaggtgtaccctgccgcccctgagcggcagcgccccgctcgccgcggccatgatgacgggggcgggtttgtgaaaactaaaatggggatttgccgggagaagaaggaacgttctgactgctattgtgtgtacattgagcgggaggacattagggactctattttgaagaaaacatgcacgctcaataattgttttgcggaaatgcttttaatctgtagcttcgccccagcaacactcccgcaacccctttag

SEQ ID NO: 297351 - DNA, 450 bp, Artificial Sequence
  derived and/or modified sequence
atgcgcctgctcccacggaccagtatcccacggcgtcagcccttcagccgatggcgtaagcagaatctgaaaactccagtaagtctcaattgttcgcgcagctgcaagctcctggagggaagaggaatgccagcaatctttatcatagcattacctcctcctaatactatcggcggacctgcactaattatttcattgcaggtttatcccgcagccccagagcggcaaagacccgcacggaggggacatgatgatggaggaggttttgtaaaaacaaaaatgggcatctgccgggagaagaaagagaggtcggattgttattgtgtgtatatcgaacgggaagatatccgcgatagcatcctgaaaaaaacatgtacactgaacaattgcttcgcagagatgcttttgatctgtagctttgccccagctacactgcctcaacctctgtag

SEQ ID NO: 297352 - DNA, 1290 bp, Artificial Sequence
  derived and/or modified sequence
atgctgcctaggttgctgctccttatctgtgccccactgtgtgagcccgccgagctgttcctgatcgcctcacccagccaccccacagagggatctcctgttacactcacctgcaagatgccattccttcagagttctgacgcacagttccagttctgtttcttccgggatacgagagccttgggccctgggtggtcatcctcccctaaactccagatcgctgccatgtggaaggaagacacggggtcctattggtgcgaggcccaaacgatggctagtaaagttttgaggtctaggaggagccagatcaatgtacatcgggtgcctgtggccgatgtgtctctggaaacccagcctccaggtggtcaggttatggagggtgatcgcctcgttctcatttgcagcgtcgcaatgggcacaggagacataaccttcctctggtataaaggtgccgttggattaaatctgcagtcaaagacccagcggagcctgaccgctgaatatgagatcccatcagtgcgtgaatctgacgccgaacaatattattgcgtggccgaaaacggatatggcccctccccaagcgggctggtcagcatcacagttcggatccccgtctctagaccaattctgatgcttcgcgcgcccagagctcaggcggccgttgaggatgtgctcgaattacactgcgaagcactgaggggatcccctccaattttgtactggttttatcatgaggatataacgctaggcagtaggtctgccccctctggaggcggggcctctttcaacctgtccttgacagaagagcacagcggtaattactcttgcgaagccaacaacggacttggcgcacagaggtcagaggcggtgaccctgaatttcaccgttccaacgggggctagatctaaccatttaacttcaggggtcatagaggggttgttgagtacactagggcctgccactgttgctctgctattttgctacggccttaagcggaagattggtcgaagatcagcgcgcgacccgctgagatctctcccctcacctctgccacaggagttcacatatctgaatagtcctacacccggacagctgcagccaatttatgaaaacgtcaatgtcgtgtctggggacgaagtgtattcactggcttattacaaccagccagagcaggagagcgtggctgccgagacactgggcacccatatggaggataaagtctccttggacatttactcccgcctacgaaaggccaatatcactgatgtagattacgaagatgcaatgtag

SEQ ID NO: 297353 - DNA, 1290 bp, Artificial Sequence
  derived and/or modified sequence
atgctgccccggctgctgctgctgatctgtgcccccctgtgtgagcctgctgagctgttcctgattgccagccccagccaccccacagagggcagccctgtgaccctgacctgcaagatgcccttcctgcagagcagtgatgcccagttccagttctgcttcttccgggacacccgggccctgggccctggctggagcagcagccccaagctgcagattgctgccatgtggaaggaggacaccggcagctactggtgtgaggcccagaccatggccagcaaggtgctgcggagcagaagaagccagatcaacgtgcaccgggtgcctgtggctgatgtgtccctggagacccagcccccaggcggccaggtgatggagggggaccggctggtgctgatctgcagcgtggccatgggcaccggggacatcaccttcctgtggtacaagggagctgtgggcctgaacctgcagagcaagacccagaggagcctgacagcagaatatgagatccccagcgtgcgggagagtgatgctgagcagtactactgtgtggccgagaatggctacggccccagccccagcggcctggtgtccatcaccgtgcgcatccctgtgtcccggcccatcctgatgctgcgggccccccgggcccaggccgctgtggaggatgtgctggagctgcactgtgaggccctgcggggcagcccccccatcctgtactggttctaccacgaggacatcaccctgggcagccgcagcgcccccagcggcggcggggccagcttcaacctgagcctgacagaggagcacagcggcaactacagctgtgaggccaacaacggcctgggcgcccagaggtctgaggccgtgaccctgaacttcaccgtgcccaccggggcccggagcaaccacctgaccagcggggtcatcgagggcctgctgagcaccctgggccctgccaccgtggccctgctcttctgctacggcctgaagaggaagattggccgccgcagcgcccgggaccccctgcggagcctgcccagccccctgccccaggagttcacctacctgaacagccccaccccaggccagctgcagcccatctatgaaaatgtgaatgtggtgtctggagatgaggtgtacagcctggcctactacaaccagcctgagcaggagagcgtggccgctgagaccctgggcacccacatggaggacaaggtgtccctggacatctacagccggctgaggaaggccaacatcacagatgtggactatgaagatgccatgtag

SEQ ID NO: 297354 - DNA, 1290 bp, Artificial Sequence
  derived and/or modified sequence
atgctgccccggctgctgctgctgatctgcgcccccctgtgcgagcccgccgagctgttcctaatcgcaagccccagccacccgaccgaaggctctcctgtaaccctcacttgtaaaatgccttttttacaaagtagcgatgcccagttccagttttgtttctttagagacactagggccctgggtcctggctggtccagcagccctaagttacagatcgccgccatgtggaaagaagacactggaagctactggtgtgaggcccagaccatggcaagcaaggtgttgcgcagtaggagaagccaaatcaatgtacaccgtgtgccagtggccgatgtctcactggagacacagcctcccgggggccaggttatggaaggtgaccgcctggtgcttatctgctccgtggccatgggcactggggatatcaccttcctgtggtataaaggggccgtcgggctgaatctgcaatctaagacacagagatccctgacagccgagtatgaaattccctctgtgagagaaagcgatgctgaacagtactactgcgtggctgagaatgggtacggtccgagccccagtggcctggtgagtatcactgtgcggataccagttagccggccgattcttatgttgagagcccctagggcccaggcagctgtggaagatgtccttgaacttcactgcgaggccttgcgcggcagccccccaatactttactggttctaccatgaggacattactctgggctcaagatcggctcccagcggaggtggcgccagttttaacctgagtctgacagaagagcattctggcaattattcctgcgaagctaataatggacttggcgcccaacgctcagaggccgtgactttgaacttcacggtgccaaccggagctcggtccaaccacctcactagtggcgtgatagagggcctactctccacccttggccccgcaacagtcgcactcctattttgctacggtctcaaaagaaagatcggaaggcggtccgcgcgggaccctctgaggtctcttcccagtcccctgccgcaggagttcacttacctgaactcaccgaccccagggcagttgcaacctatctacgagaatgtgaatgtggtgagtggcgatgaagtgtattccctcgcatattacaatcagccggagcaagagtccgttgccgctgagacacttggtacccacatggaagacaaagtgtccctggacatctatagtcgccttcggaaggctaacatcactgacgtggactatgaggatgctatgtag

SEQ ID NO: 297355 - DNA, 1290 bp, Artificial Sequence
  derived and/or modified sequence
atgctgccaagactcctgctgctgatttgtgcacccctctgcgagcccgctgagttgtttttaatcgcatcaccttctcaccccacggagggctctccagtaaccctgacttgtaaaatgccattcttgcaaagcagtgatgcccaatttcagttctgcttcttccgcgacactagagcattagggcctggctggtcctcctccccgaagttgcagatcgcagccatgtggaaagaggatacaggcagttactggtgtgaagcccaaaccatggcaagcaaagtcctgagatcaagacggtcccagatcaatgtgcatagagtacccgtcgcggacgtatcactggagacccagccccctggtggccaggtcatggagggagatagacttgtcctgatttgtagcgtcgctatgggcacaggcgatattacatttctttggtacaaaggggcagttggactgaacctccagagcaagacgcagcgctccctgactgccgaatatgaaatcccctcagtccgtgagagcgatgccgaacagtactactgtgtggctgaaaatgggtacgggcctagtccctctggcttggttagtataaccgtaaggatacctgtgtcccggccaattctaatgttgagggcccctcgcgcacaagccgcagtggaagatgtattggagctgcactgtgaggccctaaggggctcccctccaatcctttactggttctaccatgaagacattacacttggcagtagatctgctccaagcgggggtggggcatcctttaatctgagtcttacggaggagcactctggaaattactcgtgcgaggcgaataacgggctgggcgcacaaagaagtgaggcagtaaccctgaattttacagttcctaccggtgcgagatctaaccatctgacaagtggagtgatcgaagggcttctgtctacactcggtcctgcaaccgtcgctctgctcttttgctacggtttgaagcggaagataggcagaagatccgctagggaccctcttaggagtctgccttctcccttgccacaggagtttacttatttgaactcacctactccaggccagctacagcccatctacgaaaatgtgaatgtagtttcgggtgatgaggtttattctctggcctactacaaccagccggaacaggagtcagttgccgctgaaactctcggaactcatatggaagataaggtgtccctggatatatactcaagacttaggaaggcgaatatcactgatgtggactacgaggatgcaatgtag

SEQ ID NO: 297356 - DNA, 1290 bp, Artificial Sequence
  derived and/or modified sequence
atgctgcccagactgctgctgctgatctgcgcccccctgtgcgagcccgccgagctgttcctgatcgccagccccagccaccccaccgagggcagccccgtgaccctgacctgcaagatgcccttcctgcagagcagcgacgcccagttccagttctgcttcttcagagacaccagagccctgggccccggctggagcagcagccccaagctgcagatcgccgccatgtggaaggaggacaccggcagctactggtgcgaggcccagaccatggccagcaaggtgctgagaagcagaagaagccagatcaacgtgcacagagtgcccgtggccgacgtgagcctggagacccagccccccggcggccaggtgatggagggcgacagactggtgctgatctgcagcgtggccatgggcaccggcgacatcaccttcctgtggtacaagggcgccgtgggcctgaacctgcagagcaagacccagagaagcctgaccgccgagtacgagatccccagcgtgagagagagcgacgccgagcagtactactgcgtggccgagaacggctacggccccagccccagcggcctggtgagcatcaccgtgagaatccccgtgagcagacccatcctgatgctgagagcccccagagcccaggccgccgtggaggacgtgctggagctgcactgcgaggccctgagaggcagcccccccatcctgtactggttctaccacgaggacatcaccctgggcagcagaagcgcccccagcggcggcggcgccagcttcaacctgagcctgaccgaggagcacagcggcaactacagctgcgaggccaacaacggcctgggcgcccagagaagcgaggccgtgaccctgaacttcaccgtgcccaccggcgccagaagcaaccacctgaccagcggcgtgatcgagggcctgctgagcaccctgggccccgccaccgtggccctgctgttctgctacggcctgaagagaaagatcggcagaagaagcgccagagaccccctgagaagcctgcccagccccctgccccaggagttcacctacctgaacagccccacccccggccagctgcagcccatctacgagaacgtgaacgtggtgagcggcgacgaggtgtacagcctggcctactacaaccagcccgagcaggagagcgtggccgccgagaccctgggcacccacatggaggacaaggtgagcctggacatctacagcagactgagaaaggccaacatcaccgacgtggactacgaggacgccatgtag

SEQ ID NO: 297357 - DNA, 3111 bp, Artificial Sequence
  derived and/or modified sequence
actggcctggcccgcggcaggaagccccggcgtgagacactttcggattccgtgacaacggcgggattaaacgtttttcttctcctttgctactgaacctatgctgtgacttagaacataagaaactccaagagggtgtagggattgtcttagctgtctccctcctccgccggcaccgctgaaggcagcccctatggagggcgctaaacctcggggccctgggtttctatgacgacaaacaggcgttccagcaaaggaggaagtgagcggatgctgggcgggactatgtggcagcctgcaagtcccagtgcggcgctgatttgtgtctaaattagctttccggaggactatttcaaattactaaagagataggaggcattgtttattatgtctctcccgaaaacgccctccaccccgctaaactctacatcaacatctgagagcaaaaagttaaaagtgtctgtagccaaggaagggacaagaggacttcctgagctaaaggagaaaaaaaatatggtggatcgttcaaaactccttcctacttcccttcagaatgagttcattcccaaagaagttcttctttctctgacctatgcggccaatgctggtccttgtcctgaaaacttactacctcctaagaaaattaaaaccccaaagggcactcttccacgccttgtagaccatgtctggcatcaccctgttcgaaggaataaattcaaatacctgattgaccatcccgtctccctcacaggagctggaagggatatttcttttctgtacgatgtaacatatgccaaaggacagactagggagaaggcagtttgtcccccacatttggcccgttcattacagtcacatgatggtgtcattgtgccccataagccaaagacactaacagatactttgattcctgaagaatttcatattgtgtcaagtacaggagtttcaggtttggagtgttatgatgacaaatacactactctcctcacagatagtgaaaacaggctattgctcttcccatccatgaaacctaataaaagagtagaagtggcccagctgaatgatgtgatggatactatgctagagagggctggtgtggaaaatcaggaatatacaggaccaacgaagatgcacaaactactacatatattgaagaaggaacagaccatttacaacatgatatttcatgaacttattcgacaagtcagtgtggactgtgcagacagaggagaacttctgtctaaagtcagagagaggtatgtgcaaatgcttgaccagattgctcggcagatgattgatttctacaaagacttggtaactcagcgagtgatggaccagcgcattttagaagaattgtataatttcaagcatgttattgaagaactgaccagggaactgtgtctagttcgggcacatgatgtgaaattaacaaaggaaacagaaaaagcccacaaggatttggcacaagctcttttaaatgcggaaaagaatgccaaaatagtagaagaatatcatgacttatatacattacaaagagaaaggatggagaatgatatgaaaaagttagtggcagaaagagatatctggagctcagccacatatgaattggccctgaaggtgattgaaagaaatagagtcatattggctagaagactttaccttaatgaaaaaggctggaataaatacactaagcatttcatcatactgctatcaaacaaggacactgaagaccttgcactgttgcagaagttgacacaaaaatggagaaacttagtgaataaacttaaacaagaggtagaacaaatggaagagtctacaagcgagacactgaaaattgttaaggatgggcttatcaaatggcaggagttcttcaatgaaaaagacattttatcccctaataagggaaatatatttaattcagttcttttagacttcaaacagtggcagaagatcctgaatgagaaaaaagaagagtttactggggatgttctactgtcaaaatacgatactctcaagattattaaacatttacaggaaaactgggcagatattgggcttgggatatttaatcggcataaaagtttggagggggagatgccatcagagcgacagtacatggaggaaattatcaaaaacatacaaaaactctacaaagaatatgaaataagaataaatggggacaatggttactccaaaattcttccaagtttgattagttctcttgacttctgttctttcaagttggaaaacctggagtttcctgatacgcctcttgaagaatggcaggaaatagatgaaaaaattaatgaaatgaaatcacacttggatatattgttaaaccttactggtattgttccacagcacatagatgtggattctgtttcggtactccaagcgtatatatttaacatgattcaacaatggcttttgaagataggcaatgaaattaacaacggtaacattgaacttcagcaccacatggatgagttacatatatctatgatccagtggatggtaaacttgctgattttaatgatacccaactttactgaccaagactgtctcctaaagttggaggaggaaagtgctgagaaacatgatataggagttgcgcgattggagctagatgcgattgaactgacaaggaagttgtaccaatactccagctatttgagcagttgttgcaaagggatggtaacagcaatggctctgagtaaatccactaactcacacaaaaatgctactgaagacctttatgaggtggataagttgaagaaagaatgttatgaatggatcaacacatgctcttgcctcctttctaatatcaaaggcagaaaaattacattattgacatatgaagaaatagagcggctacttgaagaggaggctgtaaaagaattcattgagcctgaaatagacgagtcttttaaagaagatgaagaagaaagtaaggaggataggaaacttcaggaggaaaataaagagagagcagaagaacaaccttcaacatctacagagaaggaaaaactcattcgattcattggagaagatgaaaatgttcattccaaacctctatttgaaacagatgtgttgtcttcctggaagaacatt

SEQ ID NO: 297358 - protein, 655 aa, Artificial Sequence
  derived and/or modified sequence
MSLPKTPSTPLNSTSTSESKKLKVSVAKEGTRGLPELKEKKNMVDRSKLLPTSLQNEFIPKEVLLSLTYAANAGPCPENLLPPKKIKTPKGTLPRLVDHVWHHPVRRNKFKYLIDHPVSLTGAGRDISFLYDVTYAKGQTREKAVCPPHLARSLQSHDGVIVPHKPKTLTDTLIPEEFHIVSSTGVSGLECYDDKYTTLLTDSENRLLLFPSMKPNKRVEVAQLNDVMDTMLERAGVENQEYTGPTKMHKLLHILKKEQTIYNMIFHELIRQVSVDCADRGELLSKVRERYVQMLDQIARQMIDFYKDLVTQRVMDQRILEELYNFKHVIEELTRELCLVRAHDVKLTKETEKAHKDLAQALLNAEKNAKIVEEYHDLYTLQRERMENDMKKLVAERDIWSSATYELALKVIERNRVILARRLYLNEKGWNKYTKHFIILLSNKDTEDLALLQKLTQKWRNLVNKLKQEVEQMEESTSETLKIVKDGLIKWQEFFNEKDILSPNKGNIFNSVLLDFKQWQKILNEKKEEFTGDVLLSKYDTLKIIKHLQENWADIGLGIFNRHKSLEGEMPSERQYMEEIIKNIQKLYKEYEIRINGDNETGSHRVAQAGLKLLGSSDHPTSAPQSAGIRGIIHRTWPWVNFYIVCEVTPKFFQV

SEQ ID NO: 297359 - protein, 78 aa, Artificial Sequence
  derived and/or modified sequence
MSLPKTPSTPLNSTSTSESKKLKVSVAKEGTRGLPELKEKKNMVDRSKLLPTSLQNEFIPKEVLLSLTYAANAGPCPE

SEQ ID NO: 297360 - protein, 125 aa, Artificial Sequence
  derived and/or modified sequence
MSLPKTPSTPLNSTSTSESKKLKVSVAKEGTRGLPELKEKKNMVDRSKLLPTSLQNEFIPKEVLLSLTYAANAGPCPENLLPPKKIKTPKGTLPRLVDHVWHHPVRRNKFKYLIDHPVSLTGAGR

SEQ ID NO: 297361 - protein, 896 aa, Artificial Sequence
  derived and/or modified sequence
MVDRSKLLPTSLQNEFIPKEVLLSLTYAANAGPCPENLLPPKKIKTPKGTLPRLVDHVWHHPVRRNKFKYLIDHPVSLTGAGRDISFLYDVTYAKGQTREKAVCPPHLARSLQSHDGVIVPHKPKTLTDTLIPEEFHIVSSTGVSGLECYDDKYTTLLTDSENRLLLFPSMKPNKRVEVAQLNDVMDTMLERAGVENQEYTGPTKMHKLLHILKKEQTIYNMIFHELIRQVSVDCADRGELLSKVRERYVQMLDQIARQMIDFYKDLVTQRVMDQRILEELYNFKHVIEELTRELCLVRAHDVKLTKETEKAHKDLAQALLNAEKNAKIVEEYHDLYTLQRERMENDMKKLVAERDIWSSATYELALKVIERNRVILARRLYLNEKGWNKYTKHFIILLSNKDTEDLALLQKLTQKWRNLVNKLKQEVEQMEESTSETLKIVKDGLIKWQEFFNEKDILSPNKGNIFNSVLLDFKQWQKILNEKKEEFTGDVLLSKYDTLKIIKHLQENWADIGLGIFNRHKSLEGEMPSERQYMEEIIKNIQKLYKEYEIRINGDNGYSKILPSLISSLDFCSFKLENLEFPDTPLEEWQEIDEKINEMKSHLDILLNLTGIVPQHIDVDSVSVLQAYIFNMIQQWLLKIGNEINNGNIELQHHMDELHISMIQWMVNLLILMIPNFTDQDCLLKLEEESAEKHDIGVARLELDAIELTRKLYQYSSYLSSCCKGMVTAMALSKSTNSHKNATEDLYEVDKLKQPSTSTEKEKLIRFIGEDENVHSKPLFETDVLSSWRESAKQGTLAQKYLEAMAVIEHMQEKLLEVENRARQAEEKFEDAYEKLHHTLIKNKDLEELVMTSRKESKEEKENQDEREVKEEEEQQEEEEVRSAENSSKSPKKGH

SEQ ID NO: 297362 - DNA, 2691 bp, Artificial Sequence
  derived and/or modified sequence
atggtggacagaagcaagctgctgcccaccagcctgcagaacgagttcatccccaaggaggtgctgctgagcctgacctacgccgccaacgccggcccctgccccgagaacctgctgccccccaagaagatcaagacccccaagggcaccctgcccagactggtggaccacgtgtggcaccaccccgtgagaagaaacaagttcaagtacctgatcgaccaccccgtgagcctgaccggcgccggcagagacatcagcttcctgtacgacgtgacctacgccaagggccagaccagagagaaggccgtgtgccccccccacctggccagaagcctgcagagccacgacggcgtgatcgtgccccacaagcccaagaccctgaccgacaccctgatccccgaggagttccacatcgtgagcagcaccggcgtgagcggcctggagtgctacgacgacaagtacaccaccctgctgaccgacagcgagaacagactgctgctgttccccagcatgaagcccaacaagagagtggaggtggcccagctgaacgacgtgatggacaccatgctggagagagccggcgtggagaaccaggagtacaccggccccaccaagatgcacaagctgctgcacatcctgaagaaggagcagaccatctacaacatgatcttccacgagctgatcagacaggtgagcgtggactgcgccgacagaggcgagctgctgagcaaggtgagagagagatacgtgcagatgctggaccagatcgccagacagatgatcgacttctacaaggacctggtgacccagagagtgatggaccagagaatcctggaggagctgtacaacttcaagcacgtgatcgaggagctgaccagagagctgtgcctggtgagagcccacgacgtgaagctgaccaaggagaccgagaaggcccacaaggacctggcccaggccctgctgaacgccgagaagaacgccaagatcgtggaggagtaccacgacctgtacaccctgcagagagagagaatggagaacgacatgaagaagctggtggccgagagagacatctggagcagcgccacctacgagctggccctgaaggtgatcgagagaaacagagtgatcctggccagaagactgtacctgaacgagaagggctggaacaagtacaccaagcacttcatcatcctgctgagcaacaaggacaccgaggacctggccctgctgcagaagctgacccagaagtggagaaacctggtgaacaagctgaagcaggaggtggagcagatggaggagagcaccagcgagaccctgaagatcgtgaaggacggcctgatcaagtggcaggagttcttcaacgagaaggacatcctgagccccaacaagggcaacatcttcaacagcgtgctgctggacttcaagcagtggcagaagatcctgaacgagaagaaggaggagttcaccggcgacgtgctgctgagcaagtacgacaccctgaagatcatcaagcacctgcaggagaactgggccgacatcggcctgggcatcttcaacagacacaagagcctggagggcgagatgcccagcgagagacagtacatggaggagatcatcaagaacatccagaagctgtacaaggagtacgagatcagaatcaacggcgacaacggctacagcaagatcctgcccagcctgatcagcagcctggacttctgcagcttcaagctggagaacctggagttccccgacacccccctggaggagtggcaggagatcgacgagaagatcaacgagatgaagagccacctggacatcctgctgaacctgaccggcatcgtgccccagcacatcgacgtggacagcgtgagcgtgctgcaggcctacatcttcaacatgatccagcagtggctgctgaagatcggcaacgagatcaacaacggcaacatcgagctgcagcaccacatggacgagctgcacatcagcatgatccagtggatggtgaacctgctgatcctgatgatccccaacttcaccgaccaggactgcctgctgaagctggaggaggagagcgccgagaagcacgacatcggcgtggccagactggagctggacgccatcgagctgaccagaaagctgtaccagtacagcagctacctgagcagctgctgcaagggcatggtgaccgccatggccctgagcaagagcaccaacagccacaagaacgccaccgaggacctgtacgaggtggacaagctgaagcagcccagcaccagcaccgagaaggagaagctgatcagattcatcggcgaggacgagaacgtgcacagcaagcccctgttcgagaccgacgtgctgagcagctggagagagagcgccaagcagggcaccctggcccagaagtacctggaggccatggccgtgatcgagcacatgcaggagaagctgctggaggtggagaacagagccagacaggccgaggagaagttcgaggacgcctacgagaagctgcaccacaccctgatcaagaacaaggacctggaggagctggtgatgaccagcagaaaggagagcaaggaggagaaggagaaccaggacgagagagaggtgaaggaggaggaggagcagcaggaggaggaggaggtgagaagcgccgagaacagcagcaagagccccaagaagggccactag

SEQ ID NO: 297363 - DNA, 2691 bp, Artificial Sequence
  derived and/or modified sequence
atggttgatcgatccaaactgctgccgactagcctgcagaatgagtttattcctaaggaagtgctgctctctctgacatatgcagccaacgcgggcccctgtcccgagaacctgctccctcccaagaagattaagaccccaaaaggtaccctccctcggctagtcgaccacgtttggcaccatccggtgcgccgaaacaagttcaagtatctcatagaccacccagtcagtctgacaggcgctggcagagatatcagttttctttacgacgttacatacgctaaggggcagacacgagagaaggctgtgtgtcccccgcacttagcacggagtcttcagagccacgacggcgttattgtgcctcataaacctaagacgctcaccgataccctgataccagaagaatttcacattgtttcaagtactggcgtgagcggattggaatgttatgacgataagtatacaaccctgctgactgacagtgaaaacagactgctgctcttccccagcatgaagcccaacaaacgcgtagaagtcgctcaactgaacgatgtgatggacacaatgctcgagagggccggggtcgagaatcaggagtacaccggcccgactaagatgcacaagcttctgcatattttgaagaaagaacaaaccatctacaatatgatcttccatgaattgatccgtcaggtgtcggtggactgtgccgatcgcggcgaacttttgtcgaaggttcgggagcgttacgtgcagatgctcgaccagatcgccaggcaaatgatcgacttttacaaagatctagttactcagagggttatggatcagcgcatcctggaggagctctataacttcaaacatgtgattgaagaacttactcgagagctgtgtctggtgcgtgcacacgacgttaagctcactaaagaaaccgaaaaagctcataaggatctggcccaggccctgctgaatgctgaaaaaaatgctaaaatcgttgaagaataccatgatctgtacacattgcagagagaaagaatggagaatgacatgaagaaactcgtggctgagcgggacatctggagttccgcaacgtacgaactggccctaaaggtgatcgagcgtaatcgagtgatcctggcacgtaggctttacctcaatgagaagggatggaataagtataccaagcactttatcatccttctgtccaataaagatacagaggatctagctctccttcagaaactcacacagaagtggaggaatctcgtcaataagctcaagcaagaggtggagcagatggaggagagcacatccgagacactcaagattgtgaaggatgggctcatcaagtggcaggagttcttcaacgagaaggacattctgtcccccaacaaaggcaacatttttaactctgtgttgcttgatttcaaacagtggcagaagattcttaacgagaagaaagaggagtttaccggggatgtgctgttgagcaagtacgacacactgaaaatcatcaagcatctgcaagagaactgggccgatatcggacttggcatttttaatcggcacaagagtctagaaggcgaaatgccaagtgaaaggcaatacatggaagagatcatcaaaaacatccagaaactgtacaaagagtatgagattaggattaacggtgacaatgggtatagcaaaatcctgccaagcttgatttctagccttgacttttgcagttttaaactcgaaaacctagaattccccgatactccgctggaggagtggcaggagatcgacgaaaaaatcaacgaaatgaagtcccatctcgacatcctgttgaacctgactggtatcgttccccaacacatcgacgtcgatagtgtcagcgtgctgcaggcctacatcttcaatatgatccagcagtggctccttaagattggaaacgagatcaataacggaaacatcgaattgcagcaccacatggatgaactgcatatcagtatgatccaatggatggtgaacttgcttattttaatgataccgaactttactgaccaggactgcctccttaaattggaggaagaaagtgccgagaagcatgatattggcgtcgcacggcttgagctggacgccatcgaactgaccagaaagctgtatcaatactcatcatacctgagctcttgttgcaaggggatggtcactgccatggctctgtccaaaagcaccaacagtcacaaaaatgctacggaagatctgtatgaggtcgacaagcttaagcagccctctaccagtacagagaaggagaagctcatcagattcattggcgaggatgagaacgtccacagtaagcctctctttgagacggatgtcctgtcctcttggagggaatccgccaagcagggaacgctcgcgcaaaaatatctggaggccatggcagtgattgagcacatgcaagagaagctgttagaggtagaaaatagagccaggcaggcagaggagaaattcgaagatgcttacgagaagctgcatcacaccctgattaagaataaagatttggaagagctggttatgacaagcaggaaggagagcaaggaggagaaggagaaccaagacgaacgcgaagtaaaagaggaagaagagcagcaggaggaggaggaggtcagatcagctgaaaactctagcaaaagccctaaaaaaggacattag

SEQ ID NO: 297364 - DNA, 2691 bp, Artificial Sequence
  derived and/or modified sequence
atggtggacaggagcaagctgctgcccaccagcctgcagaatgagttcatccccaaggaggtgctgctgagcctgacctacgccgccaatgccggcccctgcccagagaacctgctgccccccaagaagatcaagacccccaagggcaccctgccccggctggtggaccacgtgtggcaccaccctgtgagaagaaacaagttcaagtacctgattgaccaccctgtgtccctgactggagctggccgggacatctccttcctgtatgatgtgacctacgccaagggccagacccgggagaaggctgtgtgccccccccacctggcccggagcctgcagagccatgatggagtgattgtgccccacaagcccaagaccctgacagacaccctcatccctgaggagttccacatcgtgagcagcactggagtgtctggcctggagtgctatgatgacaagtacaccaccctgctgacagattctgagaaccggctgctgctcttccccagcatgaagcccaacaagagggtggaggtggcccagctgaatgatgtgatggacaccatgctggagagagctggggtggagaaccaggagtacacaggccccaccaagatgcacaagctgctgcacatcctgaagaaggagcagaccatctacaacatgatcttccacgagctgatccggcaggtgtctgtggactgtgccgacagaggagagctgctgagcaaggtgcgggagagatatgtgcagatgctggaccagatcgcccggcagatgattgacttctacaaggacctggtgacccagagggtgatggaccagaggatcctggaggagctgtacaacttcaagcacgtgattgaggagctgacccgggagctgtgcctggtgcgggcccatgatgtgaagctgaccaaggagacagagaaggcccacaaggacctggcccaggccctgctgaatgctgagaagaatgccaagatcgtggaggagtaccatgacctgtacaccctgcagcgggagaggatggagaatgacatgaagaagctggtggccgagcgggacatctggagcagcgccacctatgagctggccctgaaggtgattgaaagaaacagagtcatcctggcccggcggctgtacctgaatgagaagggctggaacaagtacaccaagcacttcatcatcctgctgagcaacaaggacacagaggacctggccctgctgcagaagctgacccagaagtggaggaacctggtgaacaagctgaagcaggaggtggagcagatggaggagagcaccagcgagaccctgaagatcgtgaaggatggcctcatcaagtggcaggagttcttcaatgagaaggacatcctgagccccaacaagggcaacatcttcaacagcgtgctgctggacttcaagcagtggcagaagatcctgaatgagaagaaggaggagttcaccggagatgtgctgctgagcaaatatgacaccctgaagatcatcaagcacctgcaggagaactgggccgacatcggcctgggcatcttcaacagacacaagagcctggagggggagatgcccagcgagcggcagtacatggaggagatcatcaagaacatccagaagctgtacaaggagtatgagatccgcatcaacggggacaatggctacagcaagatcctgcccagcctcatcagcagcctggacttctgcagcttcaagctggagaacctggagttcccagacacccccctggaggagtggcaggagattgatgagaagatcaatgagatgaagagccacctggacatcctgctgaacctgactggaattgtgccccagcacattgatgtggacagcgtgtctgtgctgcaggcctacatcttcaacatgatccagcagtggctgctgaagattggaaatgagatcaacaatggaaacatcgagctgcagcaccacatggatgagctgcacatctccatgatccagtggatggtgaacctgctgatcctgatgatccccaacttcacagaccaggactgcctgctgaagctggaggaggagagcgctgagaagcatgacattggagtggcccggctggagctggatgccatcgagctgaccaggaagctgtaccagtacagcagctacctgagcagctgctgcaagggcatggtgacagccatggccctgagcaagagcaccaacagccacaagaatgccacagaggacctgtatgaggtggacaagctgaagcagcccagcaccagcacagagaaggagaagctgatccgcttcatcggagaagatgaaaatgtgcacagcaagcccctgtttgaaacagatgtgctgagctcctggagggagagcgccaagcagggcaccctggcccagaagtacctggaggccatggctgtgattgagcacatgcaggagaagctgctggaggtggagaacagagcccggcaggccgaggagaagtttgaagatgcctatgagaagctgcaccacaccctcatcaagaacaaggacctggaggagctggtgatgaccagcaggaaggagagcaaggaggagaaggagaaccaggatgagcgggaggtgaaggaggaggaggagcagcaggaggaggaggaggtgcgctctgctgagaacagcagcaagagccccaagaagggccactag

SEQ ID NO: 297365 - DNA, 2691 bp, Artificial Sequence
  derived and/or modified sequence
atggtggaccggagcaagctgctgcccaccagcctgcagaacgagttcatacccaaagaggtgttgctgtctctgacctatgccgcaaatgcaggaccttgtcccgagaatctcctaccacctaaaaaaattaaaacacctaagggcacgcttcctaggctggtggatcacgtctggcatcaccccgtgcgtaggaataagttcaagtatttgatcgaccatcctgtttcgctcaccggcgccggccgcgatattagttttctgtatgacgtgacgtatgccaagggccagacccgcgagaaagctgtctgtcctccccatctcgcccggagcctgcagagtcatgacggcgtgatagtacctcataaaccaaagacacttacagatactctgattcccgaggagttccacatcgtgagtagtacaggggtgtcaggcttggagtgctacgacgacaaatatacaacgttgctgaccgacagtgaaaaccgactgctgttattcccttcgatgaagcctaacaaacgcgtggaggtcgcgcagctgaatgatgttatggacacaatgcttgaaagagccggggttgaaaaccaggagtatacaggccctacaaaaatgcacaagctactgcatatcttaaagaaggaacagactatatacaatatgatattccatgagttgattcggcaagtatctgtcgattgtgctgatcggggtgagttgttgagtaaggtccgggagaggtacgtccagatgctcgatcagattgcaagacagatgatcgacttttacaaagatttggttacccagcgggtgatggaccaaagaattctggaagagttatataatttcaagcacgtgattgaggagctaactcgggaactgtgcctagtgcgcgcccacgacgtgaagctgaccaaagagacagaaaaggcccacaaggacctggctcaggctctgttgaacgccgaaaagaacgccaaaatcgtggaagaataccatgatttatataccctgcaaagggaaaggatggagaatgacatgaaaaaactagttgccgaaagagacatttggtcaagcgcgacatatgagctggcactcaaagtaatcgaaagaaatcgagttatcctcgcccgtcgactctatcttaatgaaaagggatggaacaaatacactaagcacttcataattctgctctccaacaaggatacagaggacctggccttgctgcaaaaactgacgcagaagtggcgaaacctggtcaacaagctgaagcaggaggtcgagcagatggaggagtcaacttctgagacattaaaaattgttaaagatgggttaatcaaatggcaggaattttttaacgagaaggacattctcagcccaaataaggggaatatttttaactctgtcctgctggattttaagcaatggcagaaaattctgaatgaaaagaaagaagaattcacgggcgatgtgctgctgagcaagtacgacaccttaaaaattattaagcacctgcaagaaaactgggcagacatcggacttgggatattcaaccgacacaaaagtctggagggcgaaatgccttccgagcggcagtatatggaagaaattatcaagaacatccagaagctttataaggaatacgagatccgtatcaacggggacaatgggtattccaaaatccttccaagcctaatctcgagcttggacttttgcagttttaaacttgagaatttggagttccctgacacaccactagaggagtggcaggaaatcgacgagaaaatcaacgaaatgaagtcccatctcgatattctgttaaacctcacgggcattgttcctcaacacatagacgtggatagtgtttctgtcctgcaagcttatatctttaatatgatccagcagtggttgctgaagataggcaacgaaatcaataatggtaacatcgaactgcaacaccatatggacgagctgcacatttctatgatccagtggatggttaatctcttgattttgatgatccctaacttcactgaccaagattgtctgcttaaattggaagaggaatcagcagaaaagcatgatattggggtcgctcgccttgaactggatgctatcgagttgactcgaaaactgtatcaatatagtagctacttgtcatcctgctgtaaaggcatggtaaccgctatggccctcagtaaaagcacgaactcacataagaacgcaaccgaggatctctacgaggttgacaaactcaagcagccaagtacctctactgaaaaggagaaactgatcaggtttatcggagaggatgagaatgtgcactctaagcccctcttcgagacagatgtactctcttcgtggagagagtccgccaagcagggcacgctcgcgcaaaaataccttgaagccatggcggtgatagaacatatgcaggagaaactactcgaagtagaaaacagggctcgtcaagccgaggaaaaattcgaagacgcctatgaaaaattacatcacaccctgataaagaataaggatctggaggagctggtgatgacgagtcgtaaagagtctaaggaggaaaaagagaatcaggacgaacgcgaagtaaaggaagaggaagaacagcaagaagaggaggaggtgcggtccgccgagaactcctccaagagtccaaagaagggacattag

SEQ ID NO: 297366 - DNA, 2691 bp, Artificial Sequence
  derived and/or modified sequence
atggtggaccggagcaaacttctgcccactagcctccagaacgagttcattcccaaagaagtcttactctccctgacctacgcggcaaatgcaggcccttgtcctgaaaacctgcttcctccgaaaaagataaagaccccaaaaggcacacttccgcgtctagtggatcacgtttggcatcatccggtccggcgtaataagttcaagtacctgatagaccatcccgtctcgttaactggcgctggaagggacatttccttcctgtacgacgtgacttacgcgaagggacaaacacgcgagaaagccgtttgccccccacacctggcgaggtctctccagtcacacgacggagtgatcgtgcctcataagcctaagacgcttactgatactcttatcccagaggagttccatattgtgtcgtccacgggtgtgtcaggactagaatgctatgacgacaaatacaccacactcctgacggactccgaaaatcgcctgttgctgttccctagcatgaagcccaataagcgggttgaagtcgcccagctgaatgacgtgatggacacaatgcttgagcgcgcaggggttgagaaccaagagtatacgggcccaactaaaatgcataagctgctacatattctcaagaaagaacagactatctataatatgatctttcatgaactcatccggcaggtgtcagtagactgtgcagatcggggagagcttctcagcaaagtgcgcgagcggtacgtgcagatgctggaccagatcgctcgtcaaatgatagacttttataaggatctcgtgactcagcgggttatggaccagagaattctggaggagctgtacaactttaaacatgtgatagaggagctgactcgcgaactgtgtctggtgcgggctcatgacgtgaaactcactaaggagacggagaaagcccacaaggatttggcccaggcccttctgaatgctgaaaaaaatgccaagatcgtggaggagtatcacgatctgtatacactccagagggaaagaatggaaaatgacatgaaaaagcttgtggcggaacgggacatctggtcgtcagctacatatgaactcgcccttaaggtgatcgaacgaaacagagtcattctcgcacggaggctctacctgaacgaaaagggatggaacaaatacacgaaacattttatcatcctgttgagcaataaagatacggaagacttggccctcctccagaagctcacacaaaaatggcgaaacctagtcaacaaattaaagcaggaggtcgagcagatggaagagagtacaagtgagacgctcaagatcgtcaaggatgggttgatcaagtggcaggagtttttcaatgagaaagacattttgtccccaaataaagggaatatcttcaatagtgtgctactggatttcaagcaatggcaaaagattctcaatgaaaaaaaggaggaattcaccggcgacgtgttactgagcaagtatgataccctcaaaatcatcaagcaccttcaggaaaactgggccgacatcggcctcggcatcttcaaccggcataagagtctggaaggtgagatgcctagcgagaggcagtacatggaggagatcattaagaacattcagaaactgtacaaagaatacgagattcggattaatggcgacaatggatattccaagatcttgccctctctgatcagctctcttgatttttgttcttttaagcttgagaacctggagtttccagatacgcctttggaagagtggcaggaaattgatgagaagataaacgaaatgaagtctcatctcgatatcctgttaaatctgacaggaattgtgccacagcatatagacgtggatagtgtctctgtactacaggcctacatttttaacatgatccagcagtggctgttgaaaattggaaatgagataaataacggtaacatcgagctgcagcatcacatggatgagctgcacatttctatgattcagtggatggttaacttattaattctgatgatccctaactttactgaccaggattgtctgctgaaacttgaggaagagtcggccgagaagcatgatatcggggtggctagactggagctggatgccatcgaactgacacggaagttatatcaatattccagctatctgagcagctgttgcaagggcatggtcactgccatggccctgtccaaaagcaccaatagccataaaaacgccacggaggacctctatgaagtcgacaaattaaagcagccaagcaccagcaccgaaaaagagaaactgataagatttataggagaagatgaaaatgtccacagcaagcctctctttgagacagatgtgttgtctagttggcgcgagagcgctaaacagggaactcttgcccaaaaatacctggaggcgatggccgttattgagcacatgcaggagaagttattagaagtggagaatcgcgcaaggcaagccgaggagaagttcgaagatgcttacgaaaaactgcaccataccctgatcaagaacaaagacctagaggagcttgtgatgacttcccgcaaggaaagtaaggaggagaaggaaaatcaggatgaacgcgaagtgaaagaggaagaagagcagcaggaagaggaggaagttcggtctgctgagaactcgagcaagtcccctaaaaaggggcattag

SEQ ID NO: 297367 - DNA, 3420 bp, Artificial Sequence
  derived and/or modified sequence
actggcctggcccgcggcaggaagccccggcgtgagacactttcggattccgtgacaacggcgggattaaacgtttttcttctcctttgctactgaacctatgctgtgacttagaacataagaaactccaagagggtgtagggattgtcttagctgtctccctcctccgccggcaccgctgaaggcagcccctatggagggcgctaaacctcggggccctgggtttctatgacgacaaacaggcgttccagcaaaggaggaagtgagcggatgctgggcgggactatgtggcagcctgcaagtcccagtgcggcgctgatttgtgtctaaattagctttccggaggactatttcaaattactaaagagataggaggcattgtttattatgtctctcccgaaaacgccctccaccccgctaaactctacatcaacatctgagagcaaaaagttaaaagtgtctgtagccaaggaagggacaagaggacttcctgagctaaaggagaaaaaaaatatggtggatcgttcaaaactccttcctacttcccttcagaatgagttcattcccaaagaagttcttctttctctgacctatgcggccaatgctggtccttgtcctgaaaacttactacctcctaagaaaattaaaaccccaaagggcactcttccacgccttgtagaccatgtctggcatcaccctgttcgaaggaataaattcaaatacctgattgaccatcccgtctccctcacaggagctggaagggatatttcttttctgtacgatgtaacatatgccaaaggacagactagggagaaggcagtttgtcccccacatttggcccgttcattacagtcacatgatggtgtcattgtgccccataagccaaagacactaacagatactttgattcctgaagaatttcatattgtgtcaagtacaggagtttcaggtttggagtgttatgatgacaaatacactactctcctcacagatagtgaaaacaggctattgctcttcccatccatgaaacctaataaaagagtagaagtggcccagctgaatgatgtgatggatactatgctagagagggctggtgtggaaaatcaggaatatacaggaccaacgaagatgcacaaactactacatatattgaagaaggaacagaccatttacaacatgatatttcatgaacttattcgacaagtcagtgtggactgtgcagacagaggagaacttctgtctaaagtcagagagaggtatgtgcaaatgcttgaccagattgctcggcagatgattgatttctacaaagacttggtaactcagcgagtgatggaccagcgcattttagaagaattgtataatttcaagcatgttattgaagaactgaccagggaactgtgtctagttcgggcacatgatgtgaaattaacaaaggaaacagaaaaagcccacaaggatttggcacaagctcttttaaatgcggaaaagaatgccaaaatagtagaagaatatcatgacttatatacattacaaagagaaaggatggagaatgatatgaaaaagttagtggcagaaagagatatctggagctcagccacatatgaattggccctgaaggtgattgaaagaaatagagtcatattggctagaagactttaccttaatgaaaaaggctggaataaatacactaagcatttcatcatactgctatcaaacaaggacactgaagaccttgcactgttgcagaagttgacacaaaaatggagaaacttagtgaataaacttaaacaagaggtagaacaaatggaagagtctacaagcgagacactgaaaattgttaaggatgggcttatcaaatggcaggagttcttcaatgaaaaagacattttatcccctaataagggaaatatatttaattcagttcttttagacttcaaacagtggcagaagatcctgaatgagaaaaaagaagagtttactggggatgttctactgtcaaaatacgatactctcaagattattaaacatttacaggaaaactgggcagatattgggcttgggatatttaatcggcataaaagtttggagggggagatgccatcagagcgacagtacatggaggaaattatcaaaaacatacaaaaactctacaaagaatatgaaataagaataaatggggacaatggttactccaaaattcttccaagtttgattagttctcttgacttctgttctttcaagttggaaaacctggagtttcctgatacgcctcttgaagaatggcaggaaatagatgaaaaaattaatgaaatgaaatcacacttggatatattgttaaaccttactggtattgttccacagcacatagatgtggattctgtttcggtactccaagcgtatatatttaacatgattcaacaatggcttttgaagataggcaatgaaattaacaacggtaacattgaacttcagcaccacatggatgagttacatatatctatgatccagtggatggtaaacttgctgattttaatgatacccaactttactgaccaagactgtctcctaaagttggaggaggaaagtgctgagaaacatgatataggagttgcgcgattggagctagatgcgattgaactgacaaggaagttgtaccaatactccagctatttgagcagttgttgcaaagggatggtaacagcaatggctctgagtaaatccactaactcacacaaaaatgctactgaagacctttatgaggtggataagttgaagcaaccttcaacatctacagagaaggaaaaactcattcgattcattggagaagatgaaaatgttcattccaaacctctatttgaaacagatgtgttgtcttcctggagagagtcagctaagcaaggtacattggcccaaaaatatcttgaagcaatggctgtaattgaacatatgcaggagaagttactggaggttgaaaatagagccagacaggcagaggagaagtttgaagatgcatatgagaaacttcatcatacccttataaaaaataaagatctagaggaattagtcatgacatcaagaaaggagtctaaagaagagaaagaaaatcaagatgaaagagaagtaaaagaagaagaagaacaacaagaagaagaagaagtcaggtcagcagaaaattcctcaaaatctccaaagaaaggtcactgaatccaaggcaacctgtggaaagaagaattcagatgtcagtgggagcctccaggtgggaggagagcatgcctaaaccctggtggccattgttctgtactaaggaacaacattccctttgaaaggacattatttgcctgttgtatttaacttcacagtgccttgcaaagagttgtttaacttgcatggtgccacccaataaatatctgtgcaattgaa

SEQ ID NO: 297368 - protein, 140 aa, Artificial Sequence
  derived and/or modified sequence
MVTAMALSKSTNSHKNATEDLYEVDKLKKECYEWINTCSCLLSNIKGRKITLLTYEEIERLLEEEAVKEFIEPEIDESFKEDEEESKEDRKLQEENKERAEEQPSTSTEKEKLIRFIGEDENVHSKPLFETDVLSSWKNI

SEQ ID NO: 297369 - DNA, 1968 bp, Artificial Sequence
  derived and/or modified sequence
atgagcctgcccaagacccccagcacccccctgaacagcaccagcaccagcgagagcaagaagctgaaggtgagcgtggccaaggagggcaccagaggcctgcccgagctgaaggagaagaagaacatggtggacagaagcaagctgctgcccaccagcctgcagaacgagttcatccccaaggaggtgctgctgagcctgacctacgccgccaacgccggcccctgccccgagaacctgctgccccccaagaagatcaagacccccaagggcaccctgcccagactggtggaccacgtgtggcaccaccccgtgagaagaaacaagttcaagtacctgatcgaccaccccgtgagcctgaccggcgccggcagagacatcagcttcctgtacgacgtgacctacgccaagggccagaccagagagaaggccgtgtgccccccccacctggccagaagcctgcagagccacgacggcgtgatcgtgccccacaagcccaagaccctgaccgacaccctgatccccgaggagttccacatcgtgagcagcaccggcgtgagcggcctggagtgctacgacgacaagtacaccaccctgctgaccgacagcgagaacagactgctgctgttccccagcatgaagcccaacaagagagtggaggtggcccagctgaacgacgtgatggacaccatgctggagagagccggcgtggagaaccaggagtacaccggccccaccaagatgcacaagctgctgcacatcctgaagaaggagcagaccatctacaacatgatcttccacgagctgatcagacaggtgagcgtggactgcgccgacagaggcgagctgctgagcaaggtgagagagagatacgtgcagatgctggaccagatcgccagacagatgatcgacttctacaaggacctggtgacccagagagtgatggaccagagaatcctggaggagctgtacaacttcaagcacgtgatcgaggagctgaccagagagctgtgcctggtgagagcccacgacgtgaagctgaccaaggagaccgagaaggcccacaaggacctggcccaggccctgctgaacgccgagaagaacgccaagatcgtggaggagtaccacgacctgtacaccctgcagagagagagaatggagaacgacatgaagaagctggtggccgagagagacatctggagcagcgccacctacgagctggccctgaaggtgatcgagagaaacagagtgatcctggccagaagactgtacctgaacgagaagggctggaacaagtacaccaagcacttcatcatcctgctgagcaacaaggacaccgaggacctggccctgctgcagaagctgacccagaagtggagaaacctggtgaacaagctgaagcaggaggtggagcagatggaggagagcaccagcgagaccctgaagatcgtgaaggacggcctgatcaagtggcaggagttcttcaacgagaaggacatcctgagccccaacaagggcaacatcttcaacagcgtgctgctggacttcaagcagtggcagaagatcctgaacgagaagaaggaggagttcaccggcgacgtgctgctgagcaagtacgacaccctgaagatcatcaagcacctgcaggagaactgggccgacatcggcctgggcatcttcaacagacacaagagcctggagggcgagatgcccagcgagagacagtacatggaggagatcatcaagaacatccagaagctgtacaaggagtacgagatcagaatcaacggcgacaacgagaccggcagccacagagtggcccaggccggcctgaagctgctgggcagcagcgaccaccccaccagcgccccccagagcgccggcatcagaggcatcatccacagaacctggccctgggtgaacttctacatcgtgtgcgaggtgacccccaagttcttccaggtgtag

SEQ ID NO: 297370 - DNA, 237 bp, Artificial Sequence
  derived and/or modified sequence
atgagcctgcccaagacccccagcacccccctgaacagcaccagcaccagcgagagcaagaagctgaaggtgagcgtggccaaggagggcaccagaggcctgcccgagctgaaggagaagaagaacatggtggacagaagcaagctgctgcccaccagcctgcagaacgagttcatccccaaggaggtgctgctgagcctgacctacgccgccaacgccggcccctgccccgagtag

SEQ ID NO: 297371 - DNA, 378 bp, Artificial Sequence
  derived and/or modified sequence
atgagcctgcccaagacccccagcacccccctgaacagcaccagcaccagcgagagcaagaagctgaaggtgagcgtggccaaggagggcaccagaggcctgcccgagctgaaggagaagaagaacatggtggacagaagcaagctgctgcccaccagcctgcagaacgagttcatccccaaggaggtgctgctgagcctgacctacgccgccaacgccggcccctgccccgagaacctgctgccccccaagaagatcaagacccccaagggcaccctgcccagactggtggaccacgtgtggcaccaccccgtgagaagaaacaagttcaagtacctgatcgaccaccccgtgagcctgaccggcgccggcagatag

SEQ ID NO: 297372 - DNA, 1968 bp, Artificial Sequence
  derived and/or modified sequence
atgagcctgcctaagacgcctagcactcccctgaatagtacttccaccagcgagtctaagaagcttaaagtctccgtcgcaaaggaaggcacccggggcttaccagaacttaaggagaagaagaacatggtcgatcgcagcaaactgttacctacttcactgcaaaacgaattcatccccaaagaagtgttactgtcgcttacttacgccgctaacgccggtccttgccccgaaaatttgcttcctcccaagaagatcaaaacacctaaaggcacgcttcccaggttagtggatcacgtctggcaccacccggttcggaggaataagttcaaatacctaatcgatcacccagtttcactgactggggcaggccgcgatatctcattcttgtacgatgtcacatatgccaagggacagaccagagagaaggcggtttgccctccgcacctagcaaggagcctgcaaagccatgacggcgtgatcgtcccccacaaaccaaagacccttaccgatacactgattccagaggagttccatattgtctcctctacaggcgtaagcggccttgaatgctacgacgataagtacactaccctgctgaccgactccgagaacagactgctgctgtttcccagtatgaagccgaacaagcgggtcgaggtcgctcagctgaacgatgtgatggacactatgcttgagcgggccggtgttgagaatcaggaatacaccgggcctaccaaaatgcataagctgctgcatattctcaagaaagagcagaccatttataacatgatcttccatgagcttatccgacaagttagcgtcgattgcgccgaccggggtgagctgctctcaaaagtgcgagagaggtatgtccagatgctggaccagatcgcacgtcagatgatagatttttacaaggatctggtaactcagagggtgatggaccagaggatccttgaggagttatacaattttaaacacgtaatcgaggagctgacgcgggaactctgtttagtgcgtgcccatgatgtgaaactgacaaaggaaactgagaaagcgcacaaagatcttgctcaagctctgctgaacgcagagaaaaacgccaagattgtggaggaataccacgacctgtacaccctgcagcgtgaacggatggagaacgatatgaagaaactcgtcgctgaacgtgacatttggagtagcgccacgtacgagttggctctgaaggtgatagaacgaaatcgagtcattttggctaggcgcctttacctgaacgaaaaagggtggaacaaatacacaaaacactttattatcctcctcagcaataaagataccgaggaccttgctctgctgcagaagctgacacagaagtggcgaaaccttgttaacaagctaaagcaggaagtcgaacagatggaggaatcaacatccgaaacactgaaaatagtgaaggatgggctcataaagtggcaggaattctttaacgagaaggatatcctttcaccgaataaggggaatatttttaattccgtgttgctggacttcaaacagtggcagaaaatattaaacgaaaagaaggaagagtttacgggagacgttcttttgtcgaaatacgatactcttaagatcattaaacacttacaggaaaattgggcagatatcggtctggggatcttcaaccggcacaaatccttggagggcgagatgccaagtgagaggcagtacatggaggaaatcattaagaacattcagaaactctataaggaatacgaaatccggataaatggcgacaatgaaacagggtcacaccgggttgcccaggccggacttaaattactgggaagtagtgaccacccaacgtctgcaccccagtctgctggtattagaggaattattcaccggacatggccatgggtgaatttctacattgtgtgcgaagtgacgccgaagttcttccaggtgtag

SEQ ID NO: 297373 - DNA, 237 bp, Artificial Sequence
  derived and/or modified sequence
atgagtctgcccaaaacacctagcactccactaaacagcaccagcaccagtgagtctaaaaaactcaaggtgtcagtggccaaagagggcactcgagggctgcctgagcttaaggagaaaaagaacatggttgatcgatccaagctcttacccacttccctccagaatgagtttatccccaaggaggttctgctgtcacttacatatgcagccaacgccggcccttgccccgagtag

SEQ ID NO: 297374 - DNA, 378 bp, Artificial Sequence
  derived and/or modified sequence
atgtctctgccaaaaactccgagcacaccacttaatagcacttctacgtctgagagtaagaagctcaaggtgtcagtggcaaaagagggaacgaggggcctgcccgagctgaaggagaagaagaacatggtggataggtctaagttattgcctaccagccttcagaacgaattcatcccaaaggaggtgttacttagcctcacatacgctgccaacgcgggaccgtgtcctgaaaacctcttaccccccaaaaagatcaagactccaaagggtaccttgccccgccttgtggatcacgtgtggcatcatccagtgcgtcggaataaatttaagtatttgattgatcacccagtgtctttgaccggcgccggtcggtag

SEQ ID NO: 297375 - DNA, 1968 bp, Artificial Sequence
  derived and/or modified sequence
atgagcctgcccaagacccccagcacccccctgaacagcaccagcaccagcgagagcaagaagctgaaggtgtctgtggccaaggagggcacccggggcctgcctgagctgaaggagaagaagaacatggtggacaggagcaagctgctgcccaccagcctgcagaatgagttcatccccaaggaggtgctgctgagcctgacctacgccgccaatgccggcccctgcccagagaacctgctgccccccaagaagatcaagacccccaagggcaccctgccccggctggtggaccacgtgtggcaccaccctgtgagaagaaacaagttcaagtacctgattgaccaccctgtgtccctgactggagctggccgggacatctccttcctgtatgatgtgacctacgccaagggccagacccgggagaaggctgtgtgccccccccacctggcccggagcctgcagagccatgatggagtgattgtgccccacaagcccaagaccctgacagacaccctcatccctgaggagttccacatcgtgagcagcactggagtgtctggcctggagtgctatgatgacaagtacaccaccctgctgacagattctgagaaccggctgctgctcttccccagcatgaagcccaacaagagggtggaggtggcccagctgaatgatgtgatggacaccatgctggagagagctggggtggagaaccaggagtacacaggccccaccaagatgcacaagctgctgcacatcctgaagaaggagcagaccatctacaacatgatcttccacgagctgatccggcaggtgtctgtggactgtgccgacagaggagagctgctgagcaaggtgcgggagagatatgtgcagatgctggaccagatcgcccggcagatgattgacttctacaaggacctggtgacccagagggtgatggaccagaggatcctggaggagctgtacaacttcaagcacgtgattgaggagctgacccgggagctgtgcctggtgcgggcccatgatgtgaagctgaccaaggagacagagaaggcccacaaggacctggcccaggccctgctgaatgctgagaagaatgccaagatcgtggaggagtaccatgacctgtacaccctgcagcgggagaggatggagaatgacatgaagaagctggtggccgagcgggacatctggagcagcgccacctatgagctggccctgaaggtgattgaaagaaacagagtcatcctggcccggcggctgtacctgaatgagaagggctggaacaagtacaccaagcacttcatcatcctgctgagcaacaaggacacagaggacctggccctgctgcagaagctgacccagaagtggaggaacctggtgaacaagctgaagcaggaggtggagcagatggaggagagcaccagcgagaccctgaagatcgtgaaggatggcctcatcaagtggcaggagttcttcaatgagaaggacatcctgagccccaacaagggcaacatcttcaacagcgtgctgctggacttcaagcagtggcagaagatcctgaatgagaagaaggaggagttcaccggagatgtgctgctgagcaaatatgacaccctgaagatcatcaagcacctgcaggagaactgggccgacatcggcctgggcatcttcaacagacacaagagcctggagggggagatgcccagcgagcggcagtacatggaggagatcatcaagaacatccagaagctgtacaaggagtatgagatccgcatcaacggggacaatgaaacaggcagccaccgggtggcccaggccggcctgaagctgctgggcagcagtgaccaccccaccagcgccccccagagcgctggcatccggggcatcatccacaggacctggccctgggtgaacttctacatcgtgtgtgaggtgacccccaagttcttccaggtgtag

SEQ ID NO: 297376 - DNA, 237 bp, Artificial Sequence
  derived and/or modified sequence
atgagcctgcccaagacccccagcacccccctgaacagcaccagcaccagcgagagcaagaagctgaaggtgtctgtggccaaggagggcacccggggcctgcctgagctgaaggagaagaagaacatggtggacaggagcaagctgctgcccaccagcctgcagaatgagttcatccccaaggaggtgctgctgagcctgacctacgccgccaatgccggcccctgcccagagtag

SEQ ID NO: 297377 - DNA, 378 bp, Artificial Sequence
  derived and/or modified sequence
atgagcctgcccaagacccccagcacccccctgaacagcaccagcaccagcgagagcaagaagctgaaggtgtctgtggccaaggagggcacccggggcctgcctgagctgaaggagaagaagaacatggtggacaggagcaagctgctgcccaccagcctgcagaatgagttcatccccaaggaggtgctgctgagcctgacctacgccgccaatgccggcccctgcccagagaacctgctgccccccaagaagatcaagacccccaagggcaccctgccccggctggtggaccacgtgtggcaccaccctgtgagaagaaacaagttcaagtacctgattgaccaccctgtgtccctgactggagctggaagatag

SEQ ID NO: 297378 - DNA, 1968 bp, Artificial Sequence
  derived and/or modified sequence
atgagcctgcccaagacccccagcacccccctgaacagcaccagcactagtgagtcaaagaagctgaaagttagtgtcgctaaggagggcacacgcggccttcccgaactcaaggagaagaaaaatatggtagaccgcagtaagctgttaccaacctcattgcagaacgaattcatccctaaagaagtcctgctgagcttgacatatgccgcaaatgctgggccctgcccagagaatctgctgccacccaagaagatcaagaccccaaagggaacacttcccagattggtcgaccacgtgtggcaccacccagtcaggcgaaataagttcaagtaccttatcgatcaccctgtaagtctaaccggcgctggtcgggacatcagttttctgtatgacgtgacctacgccaaaggccaaactcgtgaaaaagctgtttgtccccctcacttagccaggagtttacaaagtcacgatggtgttatcgttccccacaagcctaagaccctcacagacactttaatacccgaagagttccatatcgtgtcatctactggggtgtcgggtttagaatgttatgacgacaagtatactactctgcttacggactccgaaaacaggttgctgctgtttccttctatgaaacccaataagcgagtggaagtcgcccagctgaacgacgtcatggatacaatgcttgagcgcgcgggcgtggagaaccaggaatacacaggacctaccaagatgcataaactactgcacattctgaaaaaggagcaaaccatctacaacatgatctttcacgaactcatccggcaagtgagtgtagactgcgctgacagaggagaattgctgagcaaagttcgcgaacggtacgtacaaatgcttgaccagattgcccggcagatgatcgacttctataaggacctagtcacacaaagggtgatggatcagaggattttggaggaactttataactttaaacacgtgatagaagagctgacgcgagaattatgcctggtgcgcgctcacgatgtcaagctcaccaaagagacggagaaggcccacaaggacctggcacaagcccttctcaacgcggagaagaatgccaagattgtcgaagagtaccacgacctttatacccttcagcgagagcggatggaaaatgacatgaaaaaattggtggcggaaagggacatctggtcatcagctacctacgagctagcgctcaaggtgatcgaaagaaaccgggtcattctggctcgcaggctgtatctcaatgaaaaaggttggaacaaatacaccaagcacttcatcatactgctgtctaataaggatactgaggacttggctttactgcagaaacttactcagaagtggagaaacctcgtcaacaaactgaagcaagaagtggaacagatggaggagagcaccagtgagacactgaaaattgttaaggatgggttaatcaagtggcaggagtttttcaacgagaaggatatcctctccccaaataagggtaatattttcaattctgttctgttggatttcaagcagtggcagaagatcctgaacgaaaaaaaggaagaatttaccggagatgtcttactgtctaagtatgacaccctgaagattatcaagcatttacaagaaaactgggccgatattgggcttggcatttttaaccgacacaagtcactcgagggagagatgcctagcgaaagacagtacatggaggaaatcattaaaaacatccagaagctgtacaaggagtacgaaattcgtataaacggagacaatgagactggcagccaccgcgtggcacaggctggactgaagctcctcgggtcctccgaccatcctacaagtgcgccccaatcagctgggatacgggggatcattcacaggacatggccttgggtgaacttctacatcgtgtgtgaggtgactccaaagtttttccaggtgtag

SEQ ID NO: 297379 - DNA, 237 bp, Artificial Sequence
  derived and/or modified sequence
atgagcctgcccaagacccccagcacccccctgaacagcaccagcactagtgagtcaaaaaagctgaaggtctcagtggctaaagaaggaacacggggcctgccggaacttaaggaaaaaaagaatatggttgatcgtagcaagcttctcccgaccagccttcagaacgagttcatccctaaagaggtgcttctgagcctgacttacgcggctaatgctgggccctgtcccgagtag

SEQ ID NO: 297380 - DNA, 378 bp, Artificial Sequence
  derived and/or modified sequence
atgagcctgcccaagacccccagcacccccctgaacagcaccagcacttccgagagcaagaaattaaaggtgtccgtcgccaaggaaggcacacgtggattgcccgaacttaaggaaaaaaagaatatggtagaccgcagtaaactgttaccgacctccctgcagaacgagtttatccctaaggaagttctgttgtccctgacgtatgccgcgaatgccggcccatgcccagagaatctgcttccacccaagaaaattaagacacccaagggaacccttccacgcttggttgaccacgtatggcaccaccctgtgagacgtaacaagtttaagtacctgatcgaccaccctgtttctctaacaggtgccgggcgctag

SEQ ID NO: 297381 - DNA, 1968 bp, Artificial Sequence
  derived and/or modified sequence
atgagcctccctaaaacccccagtacccctctgaacagcaccagcacttctgagtccaagaagttgaaggtgagcgtcgccaaagagggaaccagaggtctgcctgagctgaaggagaaaaagaatatggtcgacagaagcaagctgctcccgaccagtctacagaatgaatttattccaaaagaagtgctgttgagcctcacttacgcagcaaacgcaggaccttgccctgaaaatctgctacccccaaaaaagataaagactccaaaggggacgctcccacgtctagtggatcacgtgtggcaccatcctgtccgaagaaataagttcaagtacctgatcgatcaccccgtgtccttgaccggagctggcagggatatatcatttctctacgacgtcacttacgcaaagggccagacacgggaaaaggccgtgtgtccccctcacctggcccgaagtttacaatctcacgacggcgtgattgtcccacacaaacctaagaccctgaccgacaccctgattccagaagaattccacatcgtgtcctcaaccggcgttagcggcctagagtgctacgatgataaatacaccactctacttacagactcggaaaacaggcttctgctgttcccctcgatgaagccgaacaagcgggtggaagtggcacagctcaacgacgtgatggatacaatgctggagagagccggagtggaaaatcaagagtatactgggccaaccaaaatgcacaaactgcttcatattttaaagaaggagcagaccatttacaacatgatatttcatgaactcataaggcaggtttctgtcgactgcgctgacagaggggagctgctctccaaggtgcgtgaaagatatgtgcaaatgttggaccagattgctcggcaaatgatcgacttctataaagatctcgtgacccaacgtgtgatggaccagcgaatcctggaagaactgtacaacttcaaacatgtgattgaggaactcacacgggagctttgcctggtgcgtgctcacgatgtcaagctgacaaaggaaacagagaaggcacacaaggatcttgctcaggccttactgaatgccgaaaagaatgccaaaattgtcgaggaatatcatgatctttatacactgcagcgggagaggatggagaatgatatgaagaagcttgtcgcggaacgggacatctggtcctcagccacctacgaactggctctcaaggtcatcgagagaaaccgcgtgatcctggccaggagattatatctgaacgaaaaggggtggaataagtatacaaagcacttcataatacttctgagtaacaaggatacagaggacctagccctgttgcagaaacttacccagaaatggcgtaatctcgttaacaaactgaagcaagaggtggaacagatggaagaatccacatccgagacactgaagattgttaaagatgggctcattaagtggcaggagttcttcaatgaaaaggacatcctttctcccaataagggtaatatcttcaatagtgtcttattagatttcaagcagtggcagaagatattaaatgagaagaaagaagaatttacaggagatgtgctattgagtaagtacgatactctgaagatcataaagcacttgcaggaaaactgggcggacattgggcttggaatttttaaccggcacaagagcctcgaaggcgagatgccttcagagcggcaatacatggaagaaataattaaaaatatccagaaactttacaaagagtatgagatccgtattaacggtgataatgaaacagggtcccatagagttgctcaggcgggactgaaactactcggaagctcagatcaccctacttcagctcctcagagcgcagggatcagaggtattattcaccggacctggccatgggtgaacttttacatcgtctgcgaagtgacgccgaagttctttcaggtatag

SEQ ID NO: 297382 - DNA, 237 bp, Artificial Sequence
  derived and/or modified sequence
atgtctctgccaaaaacgccctccacccccctcaacagtacaagtactagcgagtcaaagaaactgaaggtctccgtggccaaggaggggacaaggggcttacctgagctaaaagaaaagaagaatatggtagacagatcaaagctgctcccgactagcctacaaaatgagtttatcccaaaggaagtacttctgtccttaacatacgctgcaaacgcgggtccttgtccagagtag

SEQ ID NO: 297383 - DNA, 378 bp, Artificial Sequence
  derived and/or modified sequence
atgtctctgcccaagactccgtccacgcctcttaattctaccagcacatctgaaagcaaaaagctgaaggtaagcgtggccaaagaggggactcggggtctacccgagcttaaggaaaaaaagaacatggttgatcggtccaagcttctgccaacctccttacagaacgagtttattccaaaagaagttctgctctcattaacctatgcagctaacgccggaccttgccccgagaacctgctgccccctaagaaaatcaaaactccaaaaggaaccttgccccgactcgtggaccacgtatggcaccacccggtgcggaggaacaaattcaaatatctaatcgaccaccctgttagcctcactggagccggtaggtag

SEQ ID NO: 297384 - DNA, 2714 bp, Artificial Sequence
  derived and/or modified sequence
aagccccggcgtgagacactttcggattccgtgacaacggcgggattaaacgtttttcttctcctttgctactgaacctatgctgtgacttagaacataagaaactccaagagggtgtagggattgtcttagctgtctccctcctccgccggcaccgctgaaggcagcccctatggagggcgctaaacctcggggccctgggtttctatgacgacaaacaggcgttccagcaaaggaggaagtgagcggatgctgggcgggactatgtggcagcctgcaagtcccagtgcggcgctgatttgtgtctaaattagctttccggaggactatttcaaattactaaagagataggaggcattgtttattatgtctctcccgaaaacgccctccaccccgctaaactctacatcaacatctgagagcaaaaagttaaaagtgtctgtagccaaggaagggacaagaggacttcctgagctaaaggagaaaaaaaatatggtggatcgttcaaaactccttcctacttcccttcagaatgagttcattcccaaagaagttcttctttctctgacctatgcggccaatgctggtccttgtcctgaaaacttactacctcctaagaaaattaaaaccccaaagggcactcttccacgccttgtagaccatgtctggcatcaccctgttcgaaggaataaattcaaatacctgattgaccatcccgtctccctcacaggagctggaagggatatttcttttctgtacgatgtaacatatgccaaaggacagactagggagaaggcagtttgtcccccacatttggcccgttcattacagtcacatgatggtgtcattgtgccccataagccaaagacactaacagatactttgattcctgaagaatttcatattgtgtcaagtacaggagtttcaggtttggagtgttatgatgacaaatacactactctcctcacagatagtgaaaacaggctattgctcttcccatccatgaaacctaataaaagagtagaagtggcccagctgaatgatgtgatggatactatgctagagagggctggtgtggaaaatcaggaatatacaggaccaacgaagatgcacaaactactacatatattgaagaaggaacagaccatttacaacatgatatttcatgaacttattcgacaagtcagtgtggactgtgcagacagaggagaacttctgtctaaagtcagagagaggtatgtgcaaatgcttgaccagattgctcggcagatgattgatttctacaaagacttggtaactcagcgagtgatggaccagcgcattttagaagaattgtataatttcaagcatgttattgaagaactgaccagggaactgtgtctagttcgggcacatgatgtgaaattaacaaaggaaacagaaaaagcccacaaggatttggcacaagctcttttaaatgcggaaaagaatgccaaaatagtagaagaatatcatgacttatatacattacaaagagaaaggatggagaatgatatgaaaaagttagtggcagaaagagatatctggagctcagccacatatgaattggccctgaaggtgattgaaagaaatagagtcatattggctagaagactttaccttaatgaaaaaggctggaataaatacactaagcatttcatcatactgctatcaaacaaggacactgaagaccttgcactgttgcagaagttgacacaaaaatggagaaacttagtgaataaacttaaacaagaggtagaacaaatggaagagtctacaagcgagacactgaaaattgttaaggatgggcttatcaaatggcaggagttcttcaatgaaaaagacattttatcccctaataagggaaatatatttaattcagttcttttagacttcaaacagtggcagaagatcctgaatgagaaaaaagaagagtttactggggatgttctactgtcaaaatacgatactctcaagattattaaacatttacaggaaaactgggcagatattgggcttgggatatttaatcggcataaaagtttggagggggagatgccatcagagcgacagtacatggaggaaattatcaaaaacatacaaaaactctacaaagaatatgaaataagaataaatggggacaatgagacaggatctcaccgtgttgcacaggctggtctcaaacttctgggttcaagcgatcatcccacttcagccccccaaagtgctggaattagaggcataatccaccgcacctggccttgggttaatttttatatagtgtgtgaggttactccaaaattcttccaagtttgattagttctcttgacttctgttctttcaagttggaaaacctggagtttcctgatacgcctcttgaagaatggcaggaaatagatgaaaaaattaatgaaatgaaatcacacttggatatattgttaaaccttactggtattgttccacagcacatagatgtggattctgtttcggtactccaagcgtatatatttaacatgattcaacaatggcttttgaagataggcaatgaaattaacaacggtaacattgaacttcagcaccacatggatgagttacatatatctatgatccagtggatggtaaacttgctgattttaatgatacccaactttactgaccaagactgtctcctaaagttggaggaggaaagtgctgag

SEQ ID NO: 297385 - DNA, 586 bp, Artificial Sequence
  derived and/or modified sequence
aggaagccccggcgtgagacactttcggattccgtgacaacggcgggattaaacgtttttcttctcctttgctactgaacctatgctgtgacttagaacataagaaactccaagagggtgtagggattgtcttagctgtctccctcctccgccggcaccgctgaaggcagcccctatggagggcgctaaacctcggggccctgggtttctatgacgacaaacaggcgttccagcaaaggaggaagactatgtggcagcctgcaagtcccagtgcggcgctgatttgtgtctaaattagctttccggaggactatttcaaattactaaagagataggaggcattgtttattatgtctctcccgaaaacgccctccaccccgctaaactctacatcaacatctgagagcaaaaagttaaaagtgtctgtagccaaggaagggacaagaggacttcctgagctaaaggagaaaaaaaatatggtggatcgttcaaaactccttcctacttcccttcagaatgagttcattcccaaagaagttcttctttctctgacctatgcggccaatgctggtccttgtcctgaaaa

SEQ ID NO: 297386 - DNA, 510 bp, Artificial Sequence
  derived and/or modified sequence
aaaggaggaagtgagcggatgctgggcgggactatgtggcagcctgcaagtcccagtgcggcgctgatttgtgtctaaattagctttccggaggactatttcaaattactaaagagataggaggcattgtttattatgtctctcccgaaaacgccctccaccccgctaaactctacatcaacatctgagagcaaaaagttaaaagtgtctgtagccaaggaagggacaagaggacttcctgagctaaaggagaaaaaaaatatggtggatcgttcaaaactccttcctacttcccttcagaatgagttcattcccaaagaagttcttctttctctgacctatgcggccaatgctggtccttgtcctgaaaacttactacctcctaagaaaattaaaaccccaaagggcactcttccacgccttgtagaccatgtctggcatcaccctgttcgaaggaataaattcaaatacctgattgaccatcccgtctccctcacaggagctggaagg

SEQ ID NO: 297387 - DNA, 423 bp, Artificial Sequence
  derived and/or modified sequence
atggtgaccgccatggccctgagcaagagcaccaacagccacaagaacgccaccgaggacctgtacgaggtggacaagctgaagaaggagtgctacgagtggatcaacacctgcagctgcctgctgagcaacatcaagggcagaaagatcaccctgctgacctacgaggagatcgagagactgctggaggaggaggccgtgaaggagttcatcgagcccgagatcgacgagagcttcaaggaggacgaggaggagagcaaggaggacagaaagctgcaggaggagaacaaggagagagccgaggagcagcccagcaccagcaccgagaaggagaagctgatcagattcatcggcgaggacgagaacgtgcacagcaagcccctgttcgagaccgacgtgctgagcagctggaagaacatctag

SEQ ID NO: 297388 - DNA, 423 bp, Artificial Sequence
  derived and/or modified sequence
atggttacggcgatggcactgtcaaagagcacgaactcccataagaatgccacagaggatctgtacgaagtcgacaagctcaaaaaggaatgttatgaatggatcaacacctgtagctgtctgttatccaacataaagggtcgcaagataactctgctgacatacgaggagatagagcggttgctggaagaggaggccgtgaaagaatttattgagccagagatcgatgagagctttaaggaagacgaagaggaatccaaagaagatcggaaacttcaggaggagaacaaggagcgcgctgaggagcagccttccacttctacagagaaagagaagctgatacgatttatcggtgaggatgaaaatgtacattcaaagccgcttttcgaaactgatgtgctctcaagttggaaaaatatatag

SEQ ID NO: 297389 - DNA, 423 bp, Artificial Sequence
  derived and/or modified sequence
atggtgacagccatggccctgagcaagagcaccaacagccacaagaatgccacagaggacctgtatgaggtggacaagctgaagaaggagtgctatgagtggatcaacacctgcagctgcctgctgagcaacatcaagggcaggaagatcaccctgctgacctatgaggagattgaaaggctgctggaggaggaggccgtgaaggagttcatcgagcctgagattgatgagagcttcaaggaggatgaggaggagagcaaggaggacaggaagctgcaggaggagaacaaggagcgggcagaggagcagcccagcaccagcacagagaaggagaagctgatccgcttcatcggagaagatgaaaatgtgcacagcaagcccctgtttgaaacagatgtgctgagctcctggaagaacatctag

SEQ ID NO: 297390 - DNA, 423 bp, Artificial Sequence
  derived and/or modified sequence
atggtgaccgccatggccctgagcaagagcaccaacagccacaagaatgcgaccgaggacctttacgaggttgacaaactcaagaaggagtgctacgagtggatcaatacctgcagctgtctgctgtcgaatataaaaggacgcaaaattaccctgctaacttatgaggagatcgagcggctgctcgaggaggaggcagtgaaggagttcattgagcctgagatcgacgaatcgttcaaagaggatgaggaggaaagcaaggaggaccgcaaattacaggaggagaacaaagagcgagccgaagaacagcctagcacttcgacggagaaagaaaaactaatcaggtttatcggcgaagatgagaacgtccacagcaagccactgtttgaaacggatgtgttgagttcctggaaaaacatttag

SEQ ID NO: 297391 - DNA, 423 bp, Artificial Sequence
  derived and/or modified sequence
atggttactgccatggctctgagcaaatccaccaactctcataagaacgctaccgaggatctgtatgaggtggataagctgaaaaaagaatgctatgaatggataaatacctgcagctgcttgctgagtaatattaagggacgtaagatcactcttttaacctacgaggaaatcgaacgcttgctggaggaggaggcagtgaaagaattcattgaacccgaaatcgatgagagctttaaagaggacgaggaagagagtaaggaagataggaagctgcaggaggaaaataaggaaagagccgaggaacaaccaagcacttcaaccgagaaagaaaagttgatcagattcattggagaagacgagaacgttcacagcaagcctctctttgagacggacgtgctctcatcatggaagaatatatag

SEQ ID NO: 297392 - DNA, 526 bp, Artificial Sequence
  derived and/or modified sequence
ggagggggccggggtcgtcgctgccggctgcgctccccgcctcctcccctcgggggagtcccagaggcgcctcttccgagaccgggggtgggtcggtccctggttagatggcccctccctcttcccctccctctagtggtttccggggcctgcgggaccgaggggcgggaatcggggactggagcccccttccgctggcccggagctggactgggcctcccgcgttctgggtccgtcactggtaggggaaactttcccaaaccagagaccgagcctgaacaccttcctccgccacctcgtcctctaatcccactccctctccacctcctccgacgccttcccctcccaccgacccgaatctcggtgcgtctgactgatggggcagtgagccaatcgaaggcagggagctgacctgccgggtgtcgatttctcttggatttggctacacacttatagatcttctgcactgtttacaggcacagttgctgatatgtgttcaagatgagtgggatgggagaaaatacct

SEQ ID NO: 297393 - protein, 426 aa, Artificial Sequence
  derived and/or modified sequence
MWPLTALLLLVPSSGQAATLEKPILSLHPPWTTIFKGERVTLKCDGYHPLLLELQPISTLWYLGHLLLPSHKKSIEVQTPGVYRCQTRGAPVSDPIHLSVSNDWLILQVPYAPVFEGEPLVLRCRGWYDKVVYKLHYYHDGQAVRYFHSSANYTVLQARASDSGRYQCSGTMRIPVESAPMFSAKVAVTVQELFRAPVLRVMGPREARGAALGGVVLRCDTRLHPQKRDTPLQFAFYKYSRAVRRFDWGAEYTVPEPEVEELESYWCEAATATRSVRKRSPWLQLPGPGSPLDPASTTAPAPWAAALAPGNRPLSFRKPPVSRSVPLVTSVRNTTSTGLQFPASGAPTAGPPACAPPTPLEQSAGALKPDVDLLLREMQLLKGLLSRVVLELKEPQALRELRGTPETPTSHFAVSPGTPETTPVES

SEQ ID NO: 297394 - DNA, 1281 bp, Artificial Sequence
  derived and/or modified sequence
atgtggcccctgaccgccctgctgctgctggtgcccagcagcggccaggccgccaccctggagaagcccatcctgagcctgcaccccccctggaccaccatcttcaagggcgagagagtgaccctgaagtgcgacggctaccaccccctgctgctggagctgcagcccatcagcaccctgtggtacctgggccacctgctgctgcccagccacaagaagagcatcgaggtgcagacccccggcgtgtacagatgccagaccagaggcgcccccgtgagcgaccccatccacctgagcgtgagcaacgactggctgatcctgcaggtgccctacgcccccgtgttcgagggcgagcccctggtgctgagatgcagaggctggtacgacaaggtggtgtacaagctgcactactaccacgacggccaggccgtgagatacttccacagcagcgccaactacaccgtgctgcaggccagagccagcgacagcggcagataccagtgcagcggcaccatgagaatccccgtggagagcgcccccatgttcagcgccaaggtggccgtgaccgtgcaggagctgttcagagcccccgtgctgagagtgatgggccccagagaggccagaggcgccgccctgggcggcgtggtgctgagatgcgacaccagactgcacccccagaagagagacacccccctgcagttcgccttctacaagtacagcagagccgtgagaagattcgactggggcgccgagtacaccgtgcccgagcccgaggtggaggagctggagagctactggtgcgaggccgccaccgccaccagaagcgtgagaaagagaagcccctggctgcagctgcccggccccggcagccccctggaccccgccagcaccaccgcccccgccccctgggccgccgccctggcccccggcaacagacccctgagcttcagaaagccccccgtgagcagaagcgtgcccctggtgaccagcgtgagaaacaccaccagcaccggcctgcagttccccgccagcggcgcccccaccgccggcccccccgcctgcgccccccccacccccctggagcagagcgccggcgccctgaagcccgacgtggacctgctgctgagagagatgcagctgctgaagggcctgctgagcagagtggtgctggagctgaaggagccccaggccctgagagagctgagaggcacccccgagacccccaccagccacttcgccgtgagccccggcacccccgagaccacccccgtggagagctag

SEQ ID NO: 297395 - DNA, 1281 bp, Artificial Sequence
  derived and/or modified sequence
atgtggccactgaccgccctcttactgctcgtgccaagttcaggtcaagctgcaacccttgaaaagcctattctgagcttacatcctccttggactaccatcttcaaaggagagcgcgtaactcttaagtgcgatggttatcatccccttctgctggaactgcagccgatcagcaccctatggtaccttggacacctcctgctaccatctcacaagaaatcgatcgaggtgcagaccccaggcgtatacaggtgccagacaagaggcgcacctgtctccgaccccatacacttgagtgtttctaacgactggcttatcttgcaagtaccttacgctcccgtatttgagggggaacccttggtgctgagatgcagaggctggtatgacaaggttgtctacaaattgcactattatcatgatggtcaagccgtaagatactttcattctagcgcgaactacacagtgttgcaggcccgggctagcgacagtgggaggtaccagtgctctggtaccatgcgtatccctgtggagtccgcacccatgttctcggcaaaagtcgcagtgactgtacaggaactgtttcgagcacctgtgctgcgagtcatgggacctcgagaggctcgcggcgccgccctaggtggggtagtcctacgctgcgacacgaggttacatccgcagaagcgagacaccccacttcagtttgcgttctacaaatatagtagagcggtaagacgttttgactggggcgcagaatacaccgtccctgaaccagaggttgaggaactggaaagctactggtgtgaagccgcaacagccacgcgctcagtgcgcaaacgttccccctggcttcagctgccgggcccaggctcgccactggacccggcgagcactactgcacccgccccatgggccgcggcattggcccctggcaatagacccctgagctttcgaaagccccctgtgtcccgctcagtgcctctggttacttcagtcaggaatacaaccagcacgggtctccaatttcccgctagcggggccccaacggccggccccccagcctgcgctcccccgactcctttggagcagtcagcaggggccctaaaacctgatgttgatctcctactgcgagagatgcagctcttgaagggactgctgtcacgagttgtgcttgagctaaaagaaccacaggctctcagagagttgcggggcaccccggagacccctacttcacacttcgccgtctcccctggaactccagagaccacaccggtcgagagttag

SEQ ID NO: 297396 - DNA, 1281 bp, Artificial Sequence
  derived and/or modified sequence
atgtggccactgacagcactattgctcctcgtgccctctagcggccaggcggcaaccctggagaaaccaatactgagtctgcacccaccctggactacgatttttaagggggagagagtgaccctcaagtgcgacggataccatcccctgctccttgagttacaacctatatccactctatggtaccttggacatttgttgctgccatcccacaaaaaatctattgaggttcagacacctggagtataccggtgccagacccggggcgcccctgtgtctgaccccatacacctgagcgtgagtaacgactggctgatcttacaggtcccctatgcgcccgtctttgagggtgaaccactcgtgcttcgctgccggggttggtatgataaggttgtctataagctccactattatcacgacggccaagctgtccgctatttccactcatctgcgaactacacagtgctgcaggcgcgagccagcgattccggcaggtatcaatgctcaggcactatgcgaatcccagtggaaagcgccccaatgttctctgcaaaagttgcggttacggtgcaggagctctttcgcgcccccgtgctccgggtaatgggtcctagggaggctcgcggggccgcccttggcggagtggttctgcgttgtgacactcggttgcaccctcagaaacgtgacacaccactgcagtttgcattctacaaatattccagagcggtgaggaggttcgactggggagctgagtataccgtcccggagcccgaggtcgaggaattggaatcatattggtgtgaagcagccactgctaccagatccgtgagaaaacggtcaccttggctacaacttccgggcccaggctcaccacttgatccggcatcgacaactgcccctgcaccatgggctgctgcgctggcaccgggtaacaggccactgtctttccgtaagcctcctgtcagtcggagtgtcccgctcgttactagcgtgcgcaacactacaagtacaggattgcagttccccgcctccggggcacctacagccggccctcccgcgtgtgctcccccaacccccctcgagcagtcagctggggcgctgaaacccgatgtggacctcctgctacgggaaatgcagctgctcaagggcttattgagtcgggtcgtcctggagctgaaagagccgcaggctcttcgcgaattgagaggcactcccgaaacaccgacttctcatttcgcggtgtcacccgggactcccgaaacaactcctgtagaaagctag

SEQ ID NO: 297397 - DNA, 1977 bp, Artificial Sequence
  derived and/or modified sequence
aagatactatcttcctgggagttgacagtacctgataattgatctccttcccatcagatttccaagggatcaaggtgccccggttctaaacaaccacaggtacggtcacatggctcagaaagcacaagaagtagagccccgaggtcagatctgagaggcttctgaggggccgatgcagtgacttctctgctgcagctgctgcagtcagatccatcatgtggccactgacagcccttctgctcctggttccaagcagtgggcaagctgctactctggagaagcccatattgtctctacatccaccttggaccaccatcttcaaaggggagcgggtaactttgaagtgtgatggataccacccactgctcctggagctccagcccatcagcactctctggtatttgggccacctacttctgccctctcacaagaagagcattgaggtgcagacaccaggggtgtatcgatgccagacacggggagcacccgtcagtgaccccatccacctctctgtatccaatgattggctgattctgcaagtgccctatgcgccagtgttcgagggtgagccgctagtcctgcgctgccgcggctggtacgacaaggtggtctacaagcttcactactaccacgacggccaggccgtgcgctacttccactccagcgccaactacactgtgttacaggcgcgtgccagcgacagcgggcgctaccagtgctcgggcaccatgcgcatcccggtggagagcgcgcccatgttctccgctaaggtggctgtgacagtgcaagagctgttccgggcgccggtgctgagggtgatgggtccgcgggaggcccgcggcgcggcgctgggtggggtggtgctgcgctgcgacacgcgcctgcacccgcagaagcgcgacacgccgctgcagttcgcgttttacaagtacagccgcgcggtgcgccgcttcgactggggcgccgagtacacagtcccggagcccgaggtcgaggagctcgaatcgtactggtgcgaggcggctaccgccacccgcagtgtccggaaacgcagtccgtggctgcagctcccggggccgggttctcccctggacccggcctccaccaccgccccagctccatgggccgcagccttggctcctggtaataggccgctttccttcagaaagcccccggtgtccagatcggtcccgttggtcacctccgtccggaacaccacctccaccgggctgcagttcccggcgagcggcgccccgactgcggggccacccgcctgcgctccgccgacgcccttggaacaatcggctggagccctgaaacccgacgtggaccttctgctccgagaaatgcagctgctcaaaggccttctgagccgggtggtcctggaattaaaggagccacaggccctccgggagctcaggggaacgcccgagacccccacctctcactttgctgtgagcccgggaaccccagagaccactcctgtggagagctgagggggcggctaccgtcccctctgcaggctcattcctccttggtctcctgcttcccctcacgcgaatttctttcaaagccatctgtttgcatccttgtgttttgctgtggtttttaaaggagcgcccacgaagtgtagtggctgacgatttcaacctcacacagcagtttgtaaccgcaagcattctctttgaattctcacagaattcagcaagaagtagaaacctgttatttactacattgtgatttaactttggatgtgaatttagtcacccttagcccttcagataagcctagccagtacatatttcagcacaggcagtttttttggtatttaagtacattgaggtaactgagcacttgagaatattttagggtcaaagtgtaattattcataatgaatttactctgttgatattaaaaagacgttcagtcctattactgatgagtttacatcttcaaataaatcctgggttctattta

SEQ ID NO: 297398 - DNA, 1281 bp, Artificial Sequence
  derived and/or modified sequence
atgtggcccctgacagccctgctgctgctggtgcccagcagcggccaggccgccaccctggagaagcccatcctgagcctgcaccccccctggaccaccatcttcaagggggagcgggtgaccctgaagtgtgatggctaccaccccctgctgctggagctgcagcccatcagcaccctgtggtacctgggccacctgctgctgcccagccacaagaagagcattgaggtgcagaccccaggagtgtaccgctgccagaccaggggggcccctgtgtctgaccccatccacctgtctgtgtccaatgactggctgatcctgcaggtgccctatgcccctgtgtttgaaggagagcccctggtgctgcgctgccggggctggtatgacaaggtggtgtacaagctgcactactaccatgatggccaggccgtgcgctacttccacagcagcgccaactacacagtgctgcaggcccgggccagtgacagcggccgctaccagtgcagcggcaccatgagaattcctgtggagagcgcccccatgttttctgccaaggtggccgtgacagtgcaggagctgttccgggcccctgtgctgcgggtgatgggcccccgggaggcccggggggccgccctgggcggcgtggtgctgcgctgtgacacccggctgcacccccagaagagggacacccccctgcagtttgccttctacaagtacagcagagctgtgagaagatttgactggggcgctgagtacacagtgcctgagcctgaggtggaggagctggagagctactggtgtgaggccgccacagccaccaggtctgtgaggaagaggagcccctggctgcagctgcccggccctggcagccccctggaccctgccagcaccacagccccagccccctgggccgccgccctggcccctggcaaccggcccctgtccttcaggaagccccctgtgagccgctctgtgcccctggtgacctctgtgaggaacaccaccagcacaggcctgcagtttcctgccagcggggcccccacagctggccccccagcctgtgccccacccacccccctggagcagagcgctggggccctgaagccagatgtggacctgctgctgcgggagatgcagctgctgaagggcctgctgagccgggtggtgctggagctgaaggagccccaggccctgcgggagctgcggggcaccccagagacccccaccagccactttgctgtgtccccaggcaccccagagaccacccctgtggagagctag

SEQ ID NO: 297399 - DNA, 1767 bp, Artificial Sequence
  derived and/or modified sequence
tccatcatgtggccactgacagcccttctgctcctggttccaagcagtgggcaagctgctactctggagaagcccatattgtctctacatccaccttggaccaccatcttcaaaggggagcgggtaactttgaagtgtgatggataccacccactgctcctggagctccagcccatcagcactctctggtatttgggccacctacttctgccctctcacaagaagagcattgaggtgcagacaccaggggtgtatcgatgccagacacggggagcacccgtcagtgaccccatccacctctctgtatccaatgattggctgattctgcaagtgccctatgcgccagtgttcgagggtgagccgctagtcctgcgctgccgcggctggtacgacaaggtggtctacaagcttcactactaccacgacggccaggccgtgcgctacttccactccagcgccaactacactgtgttacaggcgcgtgccagcgacagcgggcgctaccagtgctcgggcaccatgcgcatcccggtggagagcgcgcccatgttctccgctaaggtggctgtgacagtgcaagagctgttccgggcgccggtgctgagggtgatgggtccgcgggaggcccgcggcgcggcgctgggtggggtggtgctgcgctgcgacacgcgcctgcacccgcagaagcgcgacacgccgctgcagttcgcgttttacaagtacagccgcgcggtgcgccgcttcgactggggcgccgagtacacagtcccggagcccgaggtcgaggagctcgaatcgtactggtgcgaggcggctaccgccacccgcagtgtccggaaacgcagtccgtggctgcagctcccggggccgggttctcccctggacccggcctccaccaccgccccagctccatgggccgcagccttggctcctggtaataggccgctttccttcagaaagcccccggtgtccagatcggtcccgttggtcacctccgtccggaacaccacctccaccgggctgcagttcccggcgagcggcgccccgactgcggggccacccgcctgcgctccgccgacgcccttggaacaatcggctggagccctgaaacccgacgtggaccttctgctccgagaaatgcagctgctcaaaggccttctgagccgggtggtcctggaattaaaggagccacaggccctccgggagctcaggggaacgcccgagacccccacctctcactttgctgtgagcccgggaaccccagagaccactcctgtggagagctgagggggcggctaccgtcccctctgcaggctcattcctccttggtctcctgcttcccctcacgcgaatttctttcaaagccatctgtttgcatccttgtgttttgctgtggtttttaaaggagcgcccacgaagtgtagtggctgacgatttcaacctcacacagcagtttgtaaccgcaagcattctctttgaattctcacagaattcagcaagaagtagaaacctgttatttactacattgtgatttaactttggatgtgaatttagtcacccttagcccttcagataagcctagccagtacatatttcagcacaggcagtttttttggtatttaagtacattgaggtaactgagcacttgagaatattttagggtcaaagtgtaattattcataatgaatttactctgttgatattaaaaagacgttcagtcctattactgatgagtttacatcttcaaataaatcctgggttctattt

SEQ ID NO: 297400 - DNA, 1281 bp, Artificial Sequence
  derived and/or modified sequence
atgtggcccctgaccgccctgctgctgctggtgcccagcagcggccaggctgccaccctggagaagccaatacttagcctgcatcctccctggacaacgatctttaagggagaacgggtcaccctgaaatgtgacggatatcatcctttgttgctggaacttcagccgatttctactctctggtacttaggtcacttgttgctgccaagccacaagaagagcattgaagtgcagacacctggtgtgtacaggtgccagacccgtggagcacccgtttctgatcccattcacctcagcgtgtcaaacgattggctcatcctgcaggtcccatatgcccccgtgtttgagggggagccacttgtcctccgatgccgtgggtggtacgacaaggtggtctacaaactgcattattatcatgatggccaggcggtgaggtactttcattccagcgccaactacactgtgttgcaggcgcgggcctcagacagcgggcggtaccagtgctctggcactatgcggatcccggtcgagagcgctcccatgttcagcgcaaaggtggccgtaacagtgcaggagctgtttcgcgcccccgtgctgcgagtgatggggccaagggaggctaggggcgccgctctcggcggggtggtgctgaggtgtgatacacgtctacacccccagaaaagagatactcccctccagtttgccttttacaaatatagcagggcagtaaggcgcttcgactggggcgccgaatacactgtgcctgaacccgaggtggaggagctggagtcctactggtgtgaggctgctaccgcaactcggagtgtgagaaaacgtagcccttggctgcagctgccaggcccaggctcgccactggatccagccagcaccactgcacccgccccctgggccgcagcactcgcgccaggaaatcgtccccttagcttcagaaagccgccggtctcaaggtccgttccgttggtgacgtccgtgaggaatacaacttccacgggtctgcaatttcctgccagcggcgcccctaccgcaggcccaccggcgtgtgctccccccacacctctggagcagtccgcaggggctcttaaaccagatgtagacctcctcttgagagaaatgcaactgctgaagggcctgttgtccagagttgtgctcgagctaaaggaaccgcaggcactccgcgagctgcgcggtacccccgaaacaccaacaagccatttcgcggtctcgcccggtacgcctgaaactaccccagttgaaagctag

SEQ ID NO: 297401 - DNA, 1281 bp, Artificial Sequence
  derived and/or modified sequence
atgtggcccctgaccgccctgctgctgctggtgcccagcagcggccaggcggccactttggagaagccaattctaagcctacaccccccatggaccaccatctttaagggggagcgagtgaccctgaagtgtgacggctaccatcctcttttgttggagttacagcccatctccacactgtggtatttgggccatcttttattgccgtctcataagaagtcaatcgaggtgcaaacacctggcgtttacagatgccagacccgtggcgccccagtgtccgacccgatccatcttagtgtgtcaaacgattggctcatcctgcaggtcccctatgctcccgtattcgagggcgagcctctcgtgcttcggtgtagagggtggtacgataaagtggtctacaagctgcactattaccatgacgggcaggctgtgcggtacttccattcgagtgctaattacaccgttctacaggctcgtgcatctgattccggcagataccagtgtagtgggactatgcggatacccgtcgagtcagcccccatgttctccgctaaagtggctgtcaccgttcaggagctgtttagggccccagttctcagggtcatgggacctcgggaggcccgcggtgccgcattgggtggggtcgtgctcaggtgcgatacccggctccatccgcagaagcgggacaccccacttcaatttgccttctacaagtacagcagagccgtacgtcggttcgactggggcgccgagtacaccgtgccagaaccagaggtggaggagttagaatcatactggtgcgaggcggccaccgcaacacgaagtgtgagaaagagatctccatggctgcaattgcccggacccggaagccctctggaccctgcctccaccaccgcccccgccccatgggctgctgcgctggccccggggaaccgccctctgtcatttaggaagcctcctgtctcccggtctgtgccactggtgacctccgtaagaaataccacaagcaccggcttacaattcccggcaagcggtgcgccaacagcaggcccgcctgcgtgcgcgcccccaaccccacttgagcagtcggcaggtgctctgaagcctgacgtggacctgctgctccgagagatgcagctgctgaaagggctgctctcaagggttgtactggagctcaaagagccccaggcgttgagggaattaagaggcactccagagacaccaaccagccatttcgccgtcagcccaggaacacctgagacaacaccagttgagagctag

SEQ ID NO: 297402 - DNA, 1281 bp, Artificial Sequence
  derived and/or modified sequence
atgtggccattgaccgccttgttacttctagtgcctagtagtgggcaggccgcaacactagaaaagccaatactgtcacttcatccgccatggacgactatcttcaagggggagcgtgtgacactcaagtgcgatggctaccatcctctgctgctggagctgcagccaatttctacactctggtacctggggcatctgcttctgccaagccacaagaagtcaattgaggtacaaacacctggcgtgtataggtgtcagacaaggggcgctccagtaagtgaccccattcatctgtccgtcagtaacgattggctcatcttacaggtaccttatgcccctgtatttgaaggagagcctctcgttttgcggtgtcgcggttggtacgacaaggtggtgtacaagctgcactactaccatgacggccaagccgtgcgctattttcacagcagtgcaaactatactgtgctccaggcacgtgcctctgactctgggcgttatcaatgttctggcactatgagaattcccgtggagagtgcccctatgtttagcgcgaaggtggccgttacagtgcaggaactgttcagggcccctgtgcttcgtgtgatgggcccaagagaggccagaggcgctgccttgggaggcgtagtcttaagatgcgataccaggctgcacccccagaagagagacacacccttacagtttgccttctataaatactctcgtgctgtgagacggttcgactggggagctgagtatacggtcccagaacccgaagtcgaagaattggagtcctactggtgtgaggccgcaaccgcaacccgttccgtaaggaagcggtcaccatggctgcagttacctgggccaggtagcccactggacccggcttcaacaacagcccctgccccatgggcagccgctctcgccccaggcaatagacctttatcattccggaaaccaccggtgtcccgctccgtccccttagttacttcggttagaaacaccacgtcaacagggctccagtttcccgcttccggtgcgcctaccgctggtcccccagcctgtgcccctcctacacctctcgagcaatccgccggagctctcaaacccgatgtcgatttgctgcttcgagagatgcagctgttaaaagggcttctgtcccgcgtagtcctggagctcaaagaaccccaggccctgcgggagctgcgtggaacacctgaaacgcccacttctcacttcgcggtgtctccgggaacccccgagacgaccccagtcgaaagttag

SEQ ID NO: 297403 - DNA, 1281 bp, Artificial Sequence
  derived and/or modified sequence
atgtggccgctcacagcgttgttgttactggtcccctctagcgggcaggctgccacattagagaaaccaatcctgagcctccacccaccttggaccaccatcttcaagggggaacgtgtgaccctgaaatgcgatggctaccacccactgcttctggagcttcagccaatcagtactttatggtacctgggtcaccttctcctgcctagccataagaagagtatcgaggtgcagacacccggagtttaccgttgtcagacccggggtgccccagtcagcgatcccatccacctaagtgtctccaacgactggctgattttgcaggtgccttacgcacccgtttttgaaggagagccattggtgctgcgatgtcggggatggtatgacaaggtggtctataagttacattattatcatgacggccaggcagtcaggtatttccattcatctgccaactatactgttctgcaagccagagcaagcgactcaggtcggtaccagtgctctggtaccatgcgcattcccgtcgagagcgcaccaatgtttagcgcgaaggtggccgtgacagtacaggagctttttagggcacccgttttaagggtgatgggtcctcgcgaagccaggggggcagcactcggcggtgttgtgttaaggtgcgatacccgcctgcacccgcagaaacgggatacccccttgcagttcgctttctataagtacagcagagccgtgcgaagattcgactggggtgccgagtacacggtccctgaaccagaagtagaggagttagaaagctattggtgcgaagctgcgacggcaaccaggtcagtgcgaaaacgcagcccctggcttcagctccccggacccggatctcccctggacccggctagcacaacagcccctgcgccatgggccgcagcactcgcccctggcaacagaccactgtcatttcggaagcctcccgtttccaggtctgtcccgctggttacatcggtgagaaatactaccagcaccggtctgcagtttcctgctagcggagcaccgacagccggtcctcctgcttgcgcccctcccacccccctcgaacagtctgccggagccctgaagcctgatgttgacctgctactcagagagatgcaattgctgaaggggttgctatccagggttgttctagagttaaaggagccccaggctcttcgggagctgaggggcacccccgagactcctacctctcattttgctgtttcgccgggaacccctgaaactactcccgtggagagctag

SEQ ID NO: 297404 - protein, 224 aa, Artificial Sequence
  derived and/or modified sequence
MEKLLCFLVLTSLSHAFGQTDMSRKAFVFPKESDTSYVSLKAPLTKPLKAFTVCLHFYTELSSTRGYSIFSYATKRQDNEILIFWSKDIGYSFTVGGSEILFEVPEVTVAPVHICTSWESASGIVEFWVDGKPRVRKSLKKGYTVGAEASIILGQEQDSFGGNFEGSQSLVGDIGNVNMWDFVLSPDEINTIYLGGPFSPNVLNWRALKYEVQGEVFTKPQLWP

SEQ ID NO: 297405 - protein, 102 aa, Artificial Sequence
  derived and/or modified sequence
MEKLLCFLVLTSLSHAFGQTDMSRKAFVFPKESDTSYVSLKAPLTKPLKAFTVCLHFYTELSSTHEINTIYLGGPFSPNVLNWRALKYEVQGEVFTKPQLWP

SEQ ID NO: 297406 - protein, 91 aa, Artificial Sequence
  derived and/or modified sequence
MEKLLCFLVLTSLSHAFGQTDMSRKAFVFPKESDTSYVSLKAPLTKPLKAFTVCLHFYTELSSTRGPNVLNWRALKYEVQGEVFTKPQLWP

SEQ ID NO: 297407 - protein, 46 aa, Artificial Sequence
  derived and/or modified sequence
MWDFVLSPDEINTIYLGGPFSPNVLNWRALKYEVQGEVFTKPQLWP

SEQ ID NO: 297408 - DNA, 675 bp, Artificial Sequence
  derived and/or modified sequence
atggagaagttattatgcttccttgtcctcacttcacttagccacgcatttggccagacagacatgtccagaaaggctttcgtattccctaaggagtctgacacatcttacgtcagcttaaaagctcctctcacaaaaccactgaaggcattcactgtttgcctgcatttttacaccgagctctctagtacccgcgggtactctatcttttcctacgctactaaaaggcaagacaatgagatcctgatcttctggagcaaagatattgggtattccttcacagtgggcgggtccgagattctgttcgaggtgccggaggttacagtggcgccggtgcacatttgcacctcctgggaaagtgcctccggcattgtagagttctgggtcgatgggaagcccagggtgaggaaatcattgaaaaagggctacaccgtgggcgccgaggcgtccattattttggggcaggagcaggactctttcggtgggaatttcgagggctcacaatcgctggtgggtgacattggaaacgtcaatatgtgggattttgtcctatcgcccgatgagattaacaccatttatctcgggggcccttttagcccgaacgtgctgaactggcgggctttaaagtacgaggtacagggcgaggtcttcactaaaccacagctctggccttag

SEQ ID NO: 297409 - DNA, 309 bp, Artificial Sequence
  derived and/or modified sequence
atggagaaactcctttgttttctcgttcttacaagcctgagccatgcattcgggcaaactgacatgtcccgcaaagcgtttgtgtttcctaaagagtctgacaccagttacgtcagcctaaaggctccccttaccaagccccttaaggcctttacagtttgcctgcacttctacaccgagttaagcagcactcacgaaattaataccatttacctgggtggccccttctctccaaatgtgctgaactggagggccttaaagtacgaggtccagggcgaagtattcacaaagcctcagctgtggccgtag

SEQ ID NO: 297410 - DNA, 309 bp, Artificial Sequence
  derived and/or modified sequence
atggaaaagctgctgtgtttcctggtgcttacgtccttgagccacgcattcggacagacagacatgagtaggaaggcgttcgttttccccaaggagtcagacacctcatacgtctcactgaaagctcctctcactaagccactcaaggccttcaccgtgtgcctgcatttttataccgaactgagcagcactcatgagatcaacaccatatacctggggggtcccttcagccctaatgtgctcaactggagagccctgaagtacgaggtccagggcgaagtgtttacaaagccacaactgtggccatag

SEQ ID NO: 297411 - DNA, 309 bp, Artificial Sequence
  derived and/or modified sequence
atggagaaactactgtgctttctggtgctgactagcctgagccacgcatttggccagaccgacatgtcgcgtaaggcgtttgttttccctaaggaatctgatacaagttatgtgtcactcaaggctcccttaacaaaacccctcaaagctttcaccgtgtgtttacacttctacaccgagttaagtagcacccacgagatcaatactatctatctgggcggaccgtttagcccaaatgttcttaattggcgggctctaaaatacgaggtccagggagaagtgttcactaaaccgcagctgtggccttag

SEQ ID NO: 297412 - DNA, 276 bp, Artificial Sequence
  derived and/or modified sequence
atggaaaagttgctttgctttctggttcttacctctttgagccacgcctttggacagactgacatgagcagaaaggctttcgtctttcccaaagaatctgacacctcatatgtgtccctgaaagcacccctgacaaaaccattaaaagcttttacggtttgtctccatttctatacagaacttagtagcacccggggcccaaacgttctgaactggcgtgcgctgaaatacgaagtacaaggggaggtgttcaccaagccacagctgtggccctag

SEQ ID NO: 297413 - DNA, 141 bp, Artificial Sequence
  derived and/or modified sequence
atgtgggatttcgtcctgagcccagacgagattaatactatttacctgggcggtccattcagtcccaatgttctgaattggagagcattaaaatatgaagtccaaggtgaagtgtttacgaaaccgcaactctggccctag

SEQ ID NO: 297414 - DNA, 675 bp, Artificial Sequence
  derived and/or modified sequence
atggagaagctgctgtgcttcctggtgctgaccagcctgagccacgccttcggccagacagacatgagcaggaaggcctttgtgttccccaaggagagtgacaccagctatgtgtccctgaaggcccccctgaccaagcccctgaaggccttcaccgtgtgcctgcacttctacacagagctgagcagcacccggggctacagcatcttctcctatgccaccaagaggcaggacaatgagatcctgatcttctggagcaaggacatcggctacagcttcaccgtgggcggcagcgagatcctgtttgaggtgcctgaggtgacagtggcccctgtgcacatctgcacctcctgggagagcgccagcggcatcgtggagttctgggtggatggcaagccccgggtgaggaagagcctgaagaagggctacacagtgggcgctgaggccagcatcatcctgggccaggagcaggacagctttggaggcaactttgagggcagccagagcctggtgggggacattggaaatgtgaacatgtgggactttgtgctgagcccagatgagatcaacaccatctacctgggcggccccttcagccccaacgtgctgaactggagggccctgaagtatgaggtgcagggcgaggtgttcaccaagccccagctgtggccctag

SEQ ID NO: 297415 - DNA, 309 bp, Artificial Sequence
  derived and/or modified sequence
atggagaagctgctgtgcttcctggtgctgaccagcctgagccacgccttcggccagacagacatgagcaggaaggcctttgtgttccccaaggagagtgacaccagctatgtgtccctgaaggcccccctgaccaagcccctgaaggccttcaccgtgtgcctgcacttctacacagagctgagcagcacccatgagatcaacaccatctacctgggcggccccttcagccccaacgtgctgaactggagggccctgaagtatgaggtgcagggcgaggtgttcaccaagccccagctgtggccctag

SEQ ID NO: 297416 - DNA, 276 bp, Artificial Sequence
  derived and/or modified sequence
atggagaagctgctgtgcttcctggtgctgaccagcctgagccacgccttcggccagacagacatgagcaggaaggcctttgtgttccccaaggagagtgacaccagctatgtgtccctgaaggcccccctgaccaagcccctgaaggccttcaccgtgtgcctgcacttctacacagagctgagcagcacccggggccccaacgtgctgaactggagggccctgaagtatgaggtgcagggcgaggtgttcaccaagccccagctgtggccctag

SEQ ID NO: 297417 - DNA, 141 bp, Artificial Sequence
  derived and/or modified sequence
atgtgggactttgtgctgagcccagatgagatcaacaccatctacctgggcggccccttcagccccaacgtgctgaactggagggccctgaagtatgaggtgcagggcgaggtgttcaccaagccccagctgtggccctag

SEQ ID NO: 297418 - DNA, 675 bp, Artificial Sequence
  derived and/or modified sequence
atggagaagctgctgtgcttcctggtgctgaccagcctgagccacgcattcggccagacagacatgtcaagaaaggccttcgtgttccccaaagagagtgatacctcatatgtttctctgaaagcacctctaactaagcctctgaaggcctttacagtgtgcctccacttctataccgagttgagctccacccgcggatattccatctttagctatgcaactaaaaggcaagacaacgagatcctgatcttctggagcaaagatataggatattcttttaccgtcggcggctctgagattctgttcgaggtgccagaggtgacagtggcccctgttcacatctgtaccagttgggaatctgcctccgggatcgtcgaattttgggtggacggaaaacctcgggtccggaagtctctcaagaaaggatacaccgtgggtgcggaggctagcatcatcctgggccaggagcaagactccttcggcggcaatttcgaaggctcacagagcctggtgggggacatcggtaacgtcaacatgtgggacttcgtgctcagtcctgatgagatcaacacaatctatctgggagggccatttagcccaaatgtgctgaactggcgcgccctgaagtacgaagtgcaaggcgaagtgttcacgaaaccacagctgtggccttag

SEQ ID NO: 297419 - DNA, 309 bp, Artificial Sequence
  derived and/or modified sequence
atggagaagctgctgtgcttcctggtgctgaccagcctgagccacgcattcggacagactgacatgtcacgaaaggcctttgtattcccaaaggaatcagatacatcctacgtcagtctgaaggcacccctgaccaagcccttaaaagctttcactgtttgcctgcacttttacaccgagctgagctccacccatgaaatcaacacgatctacctgggcggaccttttagtccaaacgtcctgaattggcgggcgctgaagtatgaagtgcagggagaagtgtttacaaaacctcaactgtggccctag

SEQ ID NO: 297420 - DNA, 309 bp, Artificial Sequence
  derived and/or modified sequence
atggagaagctgctgtgcttcctggtgctgaccagcctgagccacgcctttggtcagacagacatgagtaggaaggcttttgtgtttccaaaggaaagtgacacctcctacgtgtctctgaaagctccactcactaagccattgaaggccttcaccgtctgcctacacttttacaccgagctgtccagtacccacgaaatcaacaccatttacttgggggggcccttttcccccaacgttcttaattggcgagccttgaaatacgaagtgcaaggcgaagtcttcactaagccccaactctggccgtag

SEQ ID NO: 297421 - DNA, 309 bp, Artificial Sequence
  derived and/or modified sequence
atggagaagctgctgtgcttcctggtgctgaccagcctgagccacgctttcggccagaccgatatgagtaggaaagcttttgtttttcctaaagaaagcgacacgtcatacgtttccctgaaggcccctctcacaaaacctcttaaggcctttacagtctgcctgcacttttatactgagctttcttctacccacgagataaacactatctatctcggaggccccttctcacccaacgtgcttaattggagggccttgaagtacgaggttcaaggggaggtattcactaaaccccaactctggccttag

SEQ ID NO: 297422 - DNA, 276 bp, Artificial Sequence
  derived and/or modified sequence
atggagaagctgctgtgcttcctggtgctgaccagcctgagccacgcttttggacaaactgacatgagtaggaaagccttcgtgtttccaaaagagagcgataccagttatgtatctttgaaagctccactgacgaagcccctgaaggccttcacagtatgcctccacttttataccgagttgagtagcactagggggcccaacgtgctgaattggagggctctcaaatatgaggtgcaaggggaagtatttaccaagccccagctgtggccatag

SEQ ID NO: 297423 - DNA, 141 bp, Artificial Sequence
  derived and/or modified sequence
atgtgggacttcgtgctgagccccgacgagatcaacaccatctacttggggggccccttctctccaaacgtgctcaattggcgggctctgaaatatgaggttcagggagaagtgttcacaaagccacaactgtggccctag

SEQ ID NO: 297424 - DNA, 675 bp, Artificial Sequence
  derived and/or modified sequence
atggaaaaactcctctgctttctagttttgacgagcctttcacatgcgtttggtcagacagacatgtcgcggaaagcgttcgtcttcccaaaagagtcggataccagttacgtgtcactcaaggcccctctcaccaaaccgttgaaggcctttaccgtttgcctccatttctatacagaactgtcttccaccagaggatactctatattttcctatgccacaaagagacaagacaacgagatcctcatattttggtccaaagatattggatattcattcacagtaggaggatctgagattctgttcgaagtgcccgaggttaccgtggcccctgtgcatatctgcacatcatgggaatctgcctcaggcatcgtagagttctgggtcgacggcaagccccgagtccgaaagtctttgaaaaaaggatatactgtcggagctgaagcttccatcattctggggcaagaacaggactccttcgggggaaactttgaggggtctcagtctctcgtgggagacatcggtaacgtgaatatgtgggattttgtattgtcccccgatgaaatcaataccatctacctaggcggtcctttctctcctaacgtgctcaactggcgcgcactcaaatacgaggtgcaaggtgaggtatttacaaaacctcagttatggccctag

SEQ ID NO: 297425 - DNA, 309 bp, Artificial Sequence
  derived and/or modified sequence
atggagaagctgctctgcttcctcgtactcacctctcttagccatgcattcggacagacagacatgagtcggaaggccttcgtgttcccgaaagagagcgacacctcatacgtgtctctaaaggctccgctcactaaacctctgaaggcctttacagtctgcctccacttttacaccgaactctcatctactcacgagatcaacacaatttacttgggagggccatttagcccaaacgtcctgaattggcgcgcattgaaatacgaagtacagggggaagtgttcactaagccacagctttggccatag

SEQ ID NO: 297426 - DNA, 309 bp, Artificial Sequence
  derived and/or modified sequence
atggaaaagttgttgtgcttccttgttcttaccagcctgagccatgcatttggtcaaactgacatgtccaggaaagcctttgtcttccccaaggagagcgatacctcatatgttagcctaaaagctcccctgaccaaacctctgaaagcattcaccgtctgtcttcatttctacaccgagttgtcttctacccacgagattaacactatttatctcggtggacccttcagtccgaacgtgcttaattggagggcactgaaatacgaggtgcaaggggaagtatttactaagccccagctctggccttag

SEQ ID NO: 297427 - DNA, 309 bp, Artificial Sequence
  derived and/or modified sequence
atggagaagctgctgtgttttctggtgctgacaagtctgagccatgcgtttggccaaacagatatgtcaaggaaggcatttgtgttcccaaaagaaagcgacacgtcttacgtatcgctgaaggctccgctcactaagccgcttaaggcctttaccgtgtgtctgcacttttacaccgagttatcttctacccatgagattaatacaatttatctggggggaccgttcagtcctaacgttctaaactggcgggcacttaagtacgaagtacagggggaagtatttacgaagccccagctgtggccctag

SEQ ID NO: 297428 - DNA, 276 bp, Artificial Sequence
  derived and/or modified sequence
atggagaagctactctgttttctcgtactgacatcactgtcacacgcttttggacagacagatatgtctcggaaagccttcgtgttcccgaaggagagtgataccagctacgttagcctgaaggcaccccttaccaaacccctgaaagctttcactgtgtgcctgcatttttacacggagttatcaagcactagaggccctaacgtactgaactggcgggcattaaagtacgaggtccagggtgaggtctttactaaaccacagctgtggccctag

SEQ ID NO: 297429 - DNA, 141 bp, Artificial Sequence
  derived and/or modified sequence
atgtgggacttcgttttgtccccagatgagattaacaccatataccttggtggcccattctctcccaatgtgctcaactggcgcgctcttaagtatgaggtccaaggagaggttttcaccaaacctcagctgtggccttag

SEQ ID NO: 297430 - DNA, 2015 bp, Artificial Sequence
  derived and/or modified sequence
aaggcaagagatctaggacttctagcccctgaactttcagccgaatacatcttttccaaaggagtgaattcaggcccttgtatcactggcagcaggacgtgaccatggagaagctgttgtgtttcttggtcttgaccagcctctctcatgcttttggccagacagacatgtcgaggaaggcttttgtgtttcccaaagagtcggatacttcctatgtatccctcaaagcaccgttaacgaagcctctcaaagccttcactgtgtgcctccacttctacacggaactgtcctcgacccgtgggtacagtattttctcgtatgccaccaagagacaagacaatgagattctcatattttggtctaaggatataggatacagttttacagtgggtgggtctgaaatattattcgaggttcctgaagtcacagtagctccagtacacatttgtacaagctgggagtccgcctcagggatcgtggagttctgggtagatgggaagcccagggtgaggaagagtctgaagaagggatacactgtgggggcagaagcaagcatcatcttggggcaggagcaggattccttcggtgggaactttgaaggaagccagtccctggtgggagacattggaaatgtgaacatgtgggactttgtgctgtcaccagatgagattaacaccatctatcttggcgggcccttcagtcctaatgtcctgaactggcgggcactgaagtatgaagtgcaaggcgaagtgttcaccaaaccccagctgtggccctgaggcccagctgtgggtcctgaaggtacctcccggttttttacaccgcatgggccccacgtctctgtctctggtacctcccgcttttttacactgcatggttcccacgtctctgtctctgggcctttgttcccctatatgcattgcaggcctgctccaccctcctcagcgcctgagaatggaggtaaagtgtctggtctgggagctcgttaactatgctgggaaacggtccaaaagaatcagaatttgaggtgttttgttttcatttttatttcaagttggacagatcttggagataatttcttacctcacatagatgagaaaactaacacccagaaaggagaaatgatgttataaaaaactcataaggcaagagctgagaaggaagcgctgatcttctatttaattccccacccatgacccccagaaagcaggagggcattgcccacattcacagggctcttcagtctcagaatcaggacactggccaggtgtctggtttgggtccagagtgctcatcatcatgtcatagaactgctgggcccaggtctcctgaaatgggaagcccagcaataccacgcagtccctccactttctcaaagcacactggaaaggccattagaattgccccagcagagcagatctgctttttttccagagcaaaatgaagcactaggtataaatatgttgttactgccaagaacttaaatgactggtttttgtttgcttgcagtgctttcttaattttatggctcttctgggaaactcctccccttttccacacgaaccttgtggggctgtgaattctttcttcatccccgcattcccaatatacccaggccacaagagtggacgtgaaccacagggtgtcctgtcagaggagcccatctcccatctccccagctccctatctggaggatagttggatagttacgtgttcctagcaggaccaactacagtcttcccaaggattgagttatggactttgggagtgagacatcttcttgctgctggatttccaagctgagaggacgtgaacctgggaccaccagtagccatcttgtttgccacatggagagagactgtgaggacagaagccaaactggaagtggaggagccaagggattgacaaacaacagagccttgaccacgtggagtctctgaatcagccttgtctggaaccagatctacacctggactgcccaggtctataagccaataaagcccctgtttacttga

SEQ ID NO: 297431 - DNA, 413 bp, Artificial Sequence
  derived and/or modified sequence
aaggcaagagatctaggacttctagcccctgaactttcagccgaatacatcttttccaaaggagtgaattcaggcccttgtatcactggcagcaggacgtgaccatggagaagctgttgtgtttcttggtcttgaccagcctctctcatgcttttggccagacagacatgtcgaggaaggcttttgtgtttcccaaagagtcggatacttcctatgtatccctcaaagcaccgttaacgaagcctctcaaagccttcactgtgtgcctccacttctacacggaactgtcctcgacccatgagattaacaccatctatcttggcgggcccttcagtcctaatgtcctgaactggcgggcactgaagtatgaagtgcaaggcgaagtgttcaccaaaccccagctgtggccctga

SEQ ID NO: 297432 - DNA, 667 bp, Artificial Sequence
  derived and/or modified sequence
aaggcaagagatctaggacttctagcccctgaactttcagccgaatacatcttttccaaaggagtgaattcaggcccttgtatcactggcagcaggacgtgaccatggagaagctgttgtgtttcttggtcttgaccagcctctctcatgcttttggccagacagacatgtcgaggaaggcttttgtgtttcccaaagagtcggatacttcctatgtatccctcaaagcaccgttaacgaagcctctcaaagccttcactgtgtgcctccacttctacacggaactgtcctcgacccatgagattaacaccatctatcttggcgggcccttcagtcctaatgtcctgaactggcgggcactgaagtatgaagtgcaaggcgaagtgttcaccaaaccccagctgtggccctgaggcccagctgtgggtcctgaagtgctttcttaattttatggctcttctgggaaactcctccccttttccacacgaaccttgtggggctgtgaattctttcttcatccccgcattcccaatatacccaggccacaagagtggacgtgaaccacagggtgtcctgtcagaggagcccatctcccatctccccagctccctatctggaggatagttggatagttacgtgttcctagcaggaccaactacagtcttcc

SEQ ID NO: 297433 - DNA, 512 bp, Artificial Sequence
  derived and/or modified sequence
aaggcaagagatctaggacttctagcccctgaactttcagccgaatacatcttttccaaaggagtgaattcaggcccttgtatcactggcagcaggacgtgaccatggagaagctgttgtgtttcttggtcttgaccagcctctctcatgcttttggccagacagacatgtcgaggaaggcttttgtgtttcccaaagagtcggatacttcctatgtatccctcaaagcaccgttaacgaagcctctcaaagccttcactgtgtgcctccacttctacacggaactgtcctcgacccatgagattaacaccatctatcttggcgggcccttcagtcctaatgtcctgaactggcgggcactgaagtatgaagtgcaaggcgaagtgttcaccaaaccccagctgtggccctgaggcccagctgtgggtcctgaaggaccaactacagtcttcccaaggattgagttatggactttgggagtgagacatcttcttgctgctggatttccaagc

SEQ ID NO: 297434 - DNA, 787 bp, Artificial Sequence
  derived and/or modified sequence
aaggcaagagatctaggacttctagcccctgaactttcagccgaatacatcttttccaaaggagtgaattcaggcccttgtatcactggcagcaggacgtgaccatggagaagctgttgtgtttcttggtcttgaccagcctctctcatgcttttggccagacagacatgtcgaggaaggcttttgtgtttcccaaagagtcggatacttcctatgtatccctcaaagcaccgttaacgaagcctctcaaagccttcactgtgtgcctccacttctacacggaactgtcctcgacccgtggtcctaatgtcctgaactggcgggcactgaagtatgaagtgcaaggcgaagtgttcaccaaaccccagctgtggccctgaggcccagctgtgggtcctgaagtgctttcttaattttatggctcttctgggaaactcctccccttttccacacgaaccttgtggggctgtgaattctttcttcatccccgcattcccaatatacccaggccacaagagtggacgtgaaccacagggtgtcctgtcagaggagcccatctcccatctccccagctccctatctggaggatagttggatagttacgtgttcctagcaggaccaactacagtcttcccaaggattgagttatggactttgggagtgagacatcttcttgctgctggatttccaagctgagaggacgtgaacctgggaccaccagtagccatcttgtttgccacatggagagagactgtgaggacagaagccaaactggaagtggaggagc

SEQ ID NO: 297435 - DNA, 1063 bp, Artificial Sequence
  derived and/or modified sequence
aaggcaagagatctaggacttctagcccctgaactttcagccgaatacatcttttccaaaggagtgaattcaggcccttgtatcactggcaacaagacaatgagattctcatattttggtctaaggatataggatacagttttacagtgggtgggtctgaaatattattcgaggttcctgaagtcacagtagctccagtacacatttgtacaagctgggagtccgcctcagggatcgtggagttctgggtagatgggaagcccagggtgaggaagagtctgaagaagggatacactgtgggggcagaagcaagcatcatcttggggcaggagcaggattccttcggtgggaactttgaaggaagccagtccctggtgggagacattggaaatgtgaacatgtgggactttgtgctgtcaccagatgagattaacaccatctatcttggcgggcccttcagtcctaatgtcctgaactggcgggcactgaagtatgaagtgcaaggcgaagtgttcaccaaaccccagctgtggccctgaggcccagctgtgggtcctgaagtgctttcttaattttatggctcttctgggaaactcctccccttttccacacgaaccttgtggggctgtgaattctttcttcatccccgcattcccaatatacccaggccacaagagtggacgtgaaccacagggtgtcctgtcagaggagcccatctcccatctccccagctccctatctggaggatagttggatagttacgtgttcctagcaggaccaactacagtcttcccaaggattgagttatggactttgggagtgagacatcttcttgctgctggatttccaagctgagaggacgtgaacctgggaccaccagtagccatcttgtttgccacatggagagagactgtgaggacagaagccaaactggaagtggaggagccaagggattgacaaacaacagagccttgaccacgtggagtctctgaatcagccttgtctggaaccagatctacacctggactgcccaggtctataagccaataaagcccctgtttac

SEQ ID NO: 297436 - DNA, 675 bp, Artificial Sequence
  derived and/or modified sequence
atggagaagctgctgtgcttcctggtgctgaccagcctgagccacgccttcggccagaccgacatgagcagaaaggccttcgtgttccccaaggagagcgacaccagctacgtgagcctgaaggcccccctgaccaagcccctgaaggccttcaccgtgtgcctgcacttctacaccgagctgagcagcaccagaggctacagcatcttcagctacgccaccaagagacaggacaacgagatcctgatcttctggagcaaggacatcggctacagcttcaccgtgggcggcagcgagatcctgttcgaggtgcccgaggtgaccgtggcccccgtgcacatctgcaccagctgggagagcgccagcggcatcgtggagttctgggtggacggcaagcccagagtgagaaagagcctgaagaagggctacaccgtgggcgccgaggccagcatcatcctgggccaggagcaggacagcttcggcggcaacttcgagggcagccagagcctggtgggcgacatcggcaacgtgaacatgtgggacttcgtgctgagccccgacgagatcaacaccatctacctgggcggccccttcagccccaacgtgctgaactggagagccctgaagtacgaggtgcagggcgaggtgttcaccaagccccagctgtggccctag

SEQ ID NO: 297437 - DNA, 309 bp, Artificial Sequence
  derived and/or modified sequence
atggagaagctgctgtgcttcctggtgctgaccagcctgagccacgccttcggccagaccgacatgagcagaaaggccttcgtgttccccaaggagagcgacaccagctacgtgagcctgaaggcccccctgaccaagcccctgaaggccttcaccgtgtgcctgcacttctacaccgagctgagcagcacccacgagatcaacaccatctacctgggcggccccttcagccccaacgtgctgaactggagagccctgaagtacgaggtgcagggcgaggtgttcaccaagccccagctgtggccctag

SEQ ID NO: 297438 - DNA, 276 bp, Artificial Sequence
  derived and/or modified sequence
atggagaagctgctgtgcttcctggtgctgaccagcctgagccacgccttcggccagaccgacatgagcagaaaggccttcgtgttccccaaggagagcgacaccagctacgtgagcctgaaggcccccctgaccaagcccctgaaggccttcaccgtgtgcctgcacttctacaccgagctgagcagcaccagaggccccaacgtgctgaactggagagccctgaagtacgaggtgcagggcgaggtgttcaccaagccccagctgtggccctag

SEQ ID NO: 297439 - DNA, 141 bp, Artificial Sequence
  derived and/or modified sequence
atgtgggacttcgtgctgagccccgacgagatcaacaccatctacctgggcggccccttcagccccaacgtgctgaactggagagccctgaagtacgaggtgcagggcgaggtgttcaccaagccccagctgtggccctag

SEQ ID NO: 297440 - protein, 82 aa, Artificial Sequence
  derived and/or modified sequence
MDEQSQGMQGPPVPQFQPQKALRPDMGYNTLANFRIEKKIGRGQFSEVYRAACLLDGVPVALKKVQIFDLMDAKARADCIKE

SEQ ID NO: 297441 - protein, 32 aa, Artificial Sequence
  derived and/or modified sequence
MDEQSQGMQGPPVPQFQPQKALRPDMGYNTLA

SEQ ID NO: 297442 - protein, 62 aa, Artificial Sequence
  derived and/or modified sequence
MDEQSQGMQGPPVPQFQPQKALRPDMGYNTLANFRIEKKIGRGQFSEVYRAACLLDGVPVAL

SEQ ID NO: 297443 - DNA, 249 bp, Artificial Sequence
  derived and/or modified sequence
atggacgaacagtcacagggcatgcagggcccacctgtgccccaattccagccccaaaaggccctccggcccgatatgggatataatacactggctaatttccgaattgagaagaagataggccgcggccagttttccgaggtttacagggctgcgtgcctgcttgacggcgtccctgtggctttaaagaaagtgcagatatttgacctgatggacgcaaaggcccgagcagattgtatcaaggagtag

SEQ ID NO: 297444 - DNA, 99 bp, Artificial Sequence
  derived and/or modified sequence
atggatgagcagtcccaaggcatgcagggacctccggtaccacagtttcaaccccagaaggcactgaggcctgatatggggtataacaccctcgcatag

SEQ ID NO: 297445 - DNA, 189 bp, Artificial Sequence
  derived and/or modified sequence
atggatgagcagagccaaggcatgcagggtcccccagtgccccagtttcaaccacagaaagcactccgtcctgacatgggctataacaccttggcgaattttcgcatcgaaaagaagatcggcagagggcagttctcagaggtttaccgagcagcgtgtttacttgatggtgtgccagtcgccctctag

SEQ ID NO: 297446 - DNA, 249 bp, Artificial Sequence
  derived and/or modified sequence
atggatgagcagagccagggcatgcagggcccccctgtgccccagttccagccccagaaggccctgcggccagacatgggctacaacaccctggccaacttccgcatcgagaagaagattggccggggccagttcagcgaggtgtacagagctgcctgcctgctggatggagtgcctgtggccctgaagaaggtgcagatctttgacctgatggatgccaaggcccgggctgactgcatcaaggagtag

SEQ ID NO: 297447 - DNA, 99 bp, Artificial Sequence
  derived and/or modified sequence
atggatgagcagagccagggcatgcagggcccccctgtgccccagttccagccccagaaggccctgcggccagacatgggctacaacaccctggcctag

SEQ ID NO: 297448 - DNA, 189 bp, Artificial Sequence
  derived and/or modified sequence
atggatgagcagagccagggcatgcagggcccccctgtgccccagttccagccccagaaggccctgcggccagacatgggctacaacaccctggccaacttccgcatcgagaagaagattggccggggccagttcagcgaggtgtacagagctgcctgcctgctggatggagtgcctgtggccctgtag

SEQ ID NO: 297449 - DNA, 249 bp, Artificial Sequence
  derived and/or modified sequence
atggacgagcagagccagggcatgcagggcccccccgtgccccagttccagccacagaaggcgctaagacccgacatgggctacaataccctagctaattttagaatcgagaagaagatcggacggggacagttcagcgaagtctacagagccgcctgtctgctggatggcgtgcctgtcgctctgaaaaaagtccagattttcgatctcatggatgccaaagccagggccgactgtattaaggaatag

SEQ ID NO: 297450 - DNA, 99 bp, Artificial Sequence
  derived and/or modified sequence
atggacgagcagagccagggcatgcagggcccccccgtgccccagtttcagccccaaaaagccctccgacctgatatgggctataatacacttgcatag

SEQ ID NO: 297451 - DNA, 189 bp, Artificial Sequence
  derived and/or modified sequence
atggacgagcagagccagggcatgcagggcccccccgtgccccagttccagccgcagaaggccctgaggcccgatatgggctataacacactagctaacttccgaattgaaaaaaaaatcgggaggggccagttctctgaggtctaccgagcggcttgtttattagatggcgttcccgtggcgctgtag

SEQ ID NO: 297452 - DNA, 587 bp, Artificial Sequence
  derived and/or modified sequence
cagtcaataattttcctttggatgggagtagtgttgctacttaaatatgattgatcctctttttttgttatttatgagctgtagttgtaatcaatgaaatgtcttattaatattctcagaatatttaaatggtacatgtaactagaaggaatattgagtttttgaataaccttgaagattgaaaagacactttatttcaggaaaaggaaactattaataagcttggacgaatatgcttcaactctagaattctgaaaaaaatcagaaaactaaaaacttctgaagctctatttgaaatctctcttcaaattgagttctaaagttcctgttgcttcagacaatggatgagcaatcacaaggaatgcaagggccacctgttcctcagttccaaccacagaaggccttacgaccggatatgggctataatacattagccaactttcgaatagaaaagaaaattggtcgcggacaatttagtgaagtttatagagcagcctgtctcttggatggagtaccagtagctttaaaaaaagtgcagatatttgatttaatggatgccaaagcacgtgctgattgcatcaaagaaa

SEQ ID NO: 297453 - DNA, 519 bp, Artificial Sequence
  derived and/or modified sequence
gtttacactcctgacagcggcggcagcaggaggaggatcgggagtcgcgggaggatgggccgccgctaggctcgcactccggacgcgcctcgcagtgcgcagggtgggtgccccgcgcctgcagcgtccgccggggcggcgcggcgggaggtggccgacaggctccgggcctcgcagcctcagcccccggcccagcgcgctttccgacggcggcgccgcgccgagccacccgcccgcccaaggtctctcgcgggcgggagaacggaaaactcccaacttcctggaaaaggaaactattaataagcttggacgaatatgcttcaactctagaattctgaaaaaaatcagaaaactaaaaacttctgaagctctatttgaaatctctcttcaaattgagttctaaagttcctgttgcttcagacaatggatgagcaatcacaaggaatgcaagggccacctgttcctcagttccaaccacagaaggccttacgaccggatatgggctataatacattagcc

SEQ ID NO: 297454 - DNA, 565 bp, Artificial Sequence
  derived and/or modified sequence
gaattcataaacaactgtcctcatagtgggcttaattttctgatgaaaatatggcatttatatgctttcagcatacaatttaagatttcattttaagtccattctaattcagtgaatagtcaggggaaggtaatgtctgcttttccaaagaattgaaaggttcattacatttctcaatttgtcacaatttttattaaaatcctattacttgtttcttctttatcacttgatgaattgacgaaaatacaaattcagtaggcaaatatgatatccagtatttttgataatcttattagagtagtaagcaataaaataatgagtgacaggaacatcgccgagaccacaaagaagagttctaaagttcctgttgcttcagacaatggatgagcaatcacaaggaatgcaagggccacctgttcctcagttccaaccacagaaggccttacgaccggatatgggctataatacattagccaactttcgaatagaaaagaaaattggtcgcggacaatttagtgaagtttatagagcagcctgtctcttggatggagtaccagtagcttta

SEQ ID NO: 297455 - DNA, 249 bp, Artificial Sequence
  derived and/or modified sequence
atggacgaacagtcccagggcatgcagggacccccagtaccacagttccaacctcagaaggcactgcgacccgatatggggtataacactctagcaaactttcgcattgaaaaaaagattggacggggacagttcagtgaagtataccgagcagcatgtctgctagacggcgtgcctgtggctctgaaaaaggtccagatctttgatttaatggatgccaaagcgcgagccgactgtataaaggagtag

SEQ ID NO: 297456 - DNA, 99 bp, Artificial Sequence
  derived and/or modified sequence
atggacgagcagagccagggcatgcagggccctccagtgccccaattccagccccagaaagcactgcggcctgatatgggatacaacactctggcttag

SEQ ID NO: 297457 - DNA, 189 bp, Artificial Sequence
  derived and/or modified sequence
atggatgagcagagtcagggcatgcaggggcctcccgtgccccagtttcagccccaaaaggctctccggccagatatggggtacaacacactggcaaattttcggatcgagaagaagatcggaaggggacagttctccgaggtgtatcgcgcagcatgcttactagacggcgtgcctgtggccttgtag

SEQ ID NO: 297458 - DNA, 249 bp, Artificial Sequence
  derived and/or modified sequence
atggacgagcagagccagggcatgcagggcccccccgtgccccagttccagccccagaaggccctgagacccgacatgggctacaacaccctggccaacttcagaatcgagaagaagatcggcagaggccagttcagcgaggtgtacagagccgcctgcctgctggacggcgtgcccgtggccctgaagaaggtgcagatcttcgacctgatggacgccaaggccagagccgactgcatcaaggagtag

SEQ ID NO: 297459 - DNA, 99 bp, Artificial Sequence
  derived and/or modified sequence
atggacgagcagagccagggcatgcagggcccccccgtgccccagttccagccccagaaggccctgagacccgacatgggctacaacaccctggcctag

SEQ ID NO: 297460 - DNA, 189 bp, Artificial Sequence
  derived and/or modified sequence
atggacgagcagagccagggcatgcagggcccccccgtgccccagttccagccccagaaggccctgagacccgacatgggctacaacaccctggccaacttcagaatcgagaagaagatcggcagaggccagttcagcgaggtgtacagagccgcctgcctgctggacggcgtgcccgtggccctgtag

SEQ ID NO: 297461 - protein, 325 aa, Artificial Sequence
  derived and/or modified sequence
MLSMLRTMTRLCFLLFFSVATSGCSAAAASSLEMLSREFETCAFSFSSLPRSCKEIKERCHSAGDGLYFLRTKNGVVYQTFCDMTSGGGGWTLVASVHENDMRGKCTVGDRWSSQQGNKADYPEGDGNWANYNTFGSAEAATSDDYKNPGYYDIQAKDLGIWHVPNKSPMQHWRNSALLRYRTNTGFLQRLGHNLFGIYQKYPVKYRSGKCWNDNGPAIPVVYDFGDAKKTASYYSPYGQREFVAGFVQFRVFNNERAANALCAGIKVTGCNTEHHCIGGGGFFPQGKPRQCGDFSAFDWDGYGTHVKSSCSREITEAAVLLFYR

SEQ ID NO: 297462 - DNA, 978 bp, Artificial Sequence
  derived and/or modified sequence
atgctctcaatgctgcgcaccatgaccagattgtgttttctgctgttctttagcgtggcaacttctggatgtagtgccgcagctgcctctagtctcgaaatgcttagcagggaattcgagacttgcgcattttcattcagttccttgccgcgtagctgcaaagaaatcaaggagcgatgccattctgcaggcgacgggctgtatttcctgcgaactaagaatggggtagtgtaccaaaccttctgtgacatgacctccggtgggggtggctggactttagtcgcttcagtccacgagaacgacatgcgcgggaagtgtaccgtaggggaccgctggtcttcgcagcaaggcaataaggccgattaccctgagggcgacgggaactgggccaattacaataccttcgggtccgcggaggctgcaacctcagatgattacaaaaatcccggatactacgatatccaggccaaggacctgggcatttggcacgtccctaataaatcgcccatgcagcactggcggaatagcgctttgttgaggtacagaaccaacacgggtttcctccagagactcggacacaatctctttggcatttatcagaagtaccccgttaaatataggtcggggaagtgttggaacgataatggtcctgcaataccagtcgtgtatgatttcggcgacgcaaagaaaactgcctcctattactccccttacggccaacgggagtttgtggcgggtttcgtgcaattccgagtcttcaataatgaacgagccgctaatgcattgtgtgcgggtatcaaagtgacaggttgtaacactgaacaccactgcatcggaggcgggggcttttttccccagggaaaaccaaggcagtgtggcgacttctctgccttcgactgggatggatacggcacccacgtgaaaagttcgtgcagtcgtgagatcacagaggctgctgtcctgcttttctatcggtag

SEQ ID NO: 297463 - DNA, 1151 bp, Artificial Sequence
  derived and/or modified sequence
gcaggggagctccgagtgtccacaggaagggaactatcagctcctggcatctgtaaggatgctgtccatgctgaggacaatgaccagactctgcttcctgttattcttctctgtggccaccagtgggtgcagtgcagcagcagcctcttctcttgagatgctctcgagggaattcgaaacctgtgccttctccttttcttccctgcctagaagctgcaaagaaatcaaggaacgctgccatagtgcaggtgatggcctgtattttctccgcaccaagaatggtgttgtctaccagaccttctgtgacatgacttctgggggtggcggctggaccctggtggccagcgtgcacgagaatgacatgcgtgggaagtgcacggtgggtgatcgctggtccagtcagcagggcaacaaagcagactacccagagggggatggcaactgggccaactacaacacctttggatctgcagaggcggccacgagcgatgactacaagaaccctggctactacgacatccaggccaaggacctgggcatctggcatgtgcccaacaagtcccccatgcagcattggagaaacagcgccctgctgaggtaccgcaccaacactggcttcctccagagactgggacataatctgtttggcatctaccagaaatacccagtgaaatacagatcagggaaatgttggaatgacaatggcccagccatacctgtggtctatgactttggtgatgctaagaagactgcatcttattactcaccgtatggtcaacgggaatttgttgcaggattcgttcagttccgggtgtttaataacgagagagcagccaacgccctttgtgctgggataaaagttactggctgtaacactgagcatcactgcatcggtggaggagggttcttcccacagggcaaaccccgtcagtgtggggacttctccgcctttgactgggatggatatggaactcacgttaagagcagctgcagtcgggagataacggaggcggctgtactcttgttctatagatgagacagagctctgcggtgtcagggcgagaacccatcttccaaccccggctatttggagacggaaaaactggaattctaacaaggaggagaggagactaaatcacatcaatttgcaa

SEQ ID NO: 297464 - DNA, 978 bp, Artificial Sequence
  derived and/or modified sequence
atgctgtccatgctgcggaccatgacccggctgtgcttcctgctcttcttctctgtggccaccagcggctgcagcgctgctgctgccagcagcctggagatgctgagccgggagtttgagacctgtgccttctccttcagcagcctgcccaggagctgcaaggagatcaaggagcgctgccacagcgctggagatggcctgtacttcctgcggaccaagaatggagtggtgtaccagaccttctgtgacatgaccagcggcggcggcggctggaccctggtggcctctgtgcatgaaaatgacatgagaggaaaatgtactgtgggggaccgctggagcagccagcagggcaacaaggctgactacccagaaggagatggcaactgggccaactacaacacctttggatctgctgaggccgccaccagtgatgactacaagaaccctggctactatgacatccaggccaaggacctgggcatctggcacgtgcccaacaagagccccatgcagcactggaggaacagcgccctgctgcgctaccgcaccaacacaggcttcctgcagaggctgggccacaacctgtttggcatctaccagaagtaccctgtgaagtaccgcagcggcaagtgctggaatgacaatggacctgccatccctgtggtgtatgactttggagatgccaagaagacagccagctactacagcccctacggccagcgggagtttgtggccggctttgtgcagttccgggtcttcaacaatgaaagagctgccaatgccctgtgtgccggcatcaaggtgacaggctgcaacacagagcaccactgcatcggcggcggcggcttcttcccccagggcaagccccggcagtgtggggacttcagcgcctttgactgggatggctacggcacccacgtgaagagcagctgcagccgggagatcacagaggccgctgtgctgctcttctacagatag

SEQ ID NO: 297465 - DNA, 978 bp, Artificial Sequence
  derived and/or modified sequence
atgctgagcatgctgcggaccatgacccggctgtgcttcctgctgttcttctctgttgctaccagcggttgctccgccgccgcagcttccagcctcgagatgctcagtcgggagttcgagacctgtgctttctctttcagttccctccccagatcctgcaaggagatcaaagagagatgtcattcagccggagatggcctgtattttttgcggaccaaaaacggagtcgtgtaccagacgttctgtgacatgacttctggaggcggcggctggacgctggtggcatctgttcatgagaatgacatgaggggaaagtgcactgtaggggaccgctggtctagtcagcaggggaataaggccgattatccagagggtgatggtaactgggctaactataatacatttgggtcagctgaggctgccacgagtgatgattataaaaacccaggatactatgacattcaagccaaggacttgggaatctggcacgtcccaaacaagagccctatgcagcactggagaaactctgctttactgcgttaccggactaatactggttttttgcagcgcctgggacacaacttgtttggcatctatcagaagtaccctgtgaagtaccgcagtggtaagtgttggaacgataacggtcctgccatacccgtggtgtatgacttcggagacgcaaaaaagactgcttcatactatagtccttacggacaacgggagttcgtggctggatttgtacagttcagggtgtttaataacgaaagggcagctaatgctctatgcgctggcattaaggttaccggatgcaatacagagcaccactgtatcggcgggggagggtttttccctcaggggaaaccacgtcagtgcggggattttagcgcatttgattgggatggatatggaacccacgtgaaatcctcttgctccagagaaattacagaagccgctgttctgttgttctatcggtag

SEQ ID NO: 297466 - DNA, 978 bp, Artificial Sequence
  derived and/or modified sequence
atgttgtctatgttgaggacaatgactcgattatgtttcctcctcttcttcagtgtggccacttccgggtgttcagcagcagctgcctcatcacttgaaatgctcagtcgagagtttgagacctgcgcattcagctttagcagtctgccaagaagctgcaaagagataaaggaacgctgtcattctgcaggagatggtctatatttcctgagaacaaagaatggagtggtctaccagactttttgcgatatgactagcggagggggtggttggacgttggtggcctcagtgcacgaaaacgacatgagaggtaagtgtactgtgggtgacagatggtcttcccagcaaggcaacaaggccgattatcccgaaggagacggcaattgggcgaactacaatactttcggatctgccgaagcggctacatcagacgattataaaaacccaggatactatgatatccaggccaaggatctcgggatttggcatgtacccaacaaaagtcccatgcagcattggagaaacagcgccctgctgagataccggaccaacaccggttttttgcagcggttaggtcataatctatttggcatttatcaaaagtacccagttaaataccggagcggcaaatgctggaacgataatggtcctgccattcccgttgtatacgacttcggggacgctaaaaaaactgcctcttactactcaccctacggccagcgagagtttgtggctggttttgtgcagttccgcgtgttcaataacgaaagagctgccaatgcactgtgtgcaggaatcaaggtaactggatgcaatacagagcatcactgtatcggaggtgggggatttttcccccaaggtaagccgaggcagtgcggtgacttcagcgccttcgactgggacggatatggtactcatgtgaaatcttcttgttcacgggagatcactgaggccgcagtgctactgttttaccggtag

SEQ ID NO: 297467 - DNA, 978 bp, Artificial Sequence
  derived and/or modified sequence
atgctgagcatgctgagaaccatgaccagactgtgcttcctgctgttcttcagcgtggccaccagcggctgcagcgccgccgccgccagcagcctggagatgctgagcagagagttcgagacctgcgccttcagcttcagcagcctgcccagaagctgcaaggagatcaaggagagatgccacagcgccggcgacggcctgtacttcctgagaaccaagaacggcgtggtgtaccagaccttctgcgacatgaccagcggcggcggcggctggaccctggtggccagcgtgcacgagaacgacatgagaggcaagtgcaccgtgggcgacagatggagcagccagcagggcaacaaggccgactaccccgagggcgacggcaactgggccaactacaacaccttcggcagcgccgaggccgccaccagcgacgactacaagaaccccggctactacgacatccaggccaaggacctgggcatctggcacgtgcccaacaagagccccatgcagcactggagaaacagcgccctgctgagatacagaaccaacaccggcttcctgcagagactgggccacaacctgttcggcatctaccagaagtaccccgtgaagtacagaagcggcaagtgctggaacgacaacggccccgccatccccgtggtgtacgacttcggcgacgccaagaagaccgccagctactacagcccctacggccagagagagttcgtggccggcttcgtgcagttcagagtgttcaacaacgagagagccgccaacgccctgtgcgccggcatcaaggtgaccggctgcaacaccgagcaccactgcatcggcggcggcggcttcttcccccagggcaagcccagacagtgcggcgacttcagcgccttcgactgggacggctacggcacccacgtgaagagcagctgcagcagagagatcaccgaggccgccgtgctgctgttctacagatag

SEQ ID NO: 297468 - DNA, 508 bp, Artificial Sequence
  derived and/or modified sequence
gcataggtgataaaatcatggtggggagagagaacctatatattgagtcctggcttgatgcctttggtgtatatgtctgccgccttttaatctcttcccctctagattgcttcctgaggaggctggcacttctgaagatcctgaagaccctaaaggagattcacaggcaggtacccccagcactttagccctgtgtggccagcgccccatgcgcaagcgtctttctgccccagagttgcggctgagtctgactaaggggcctggaaatgatggagcttcacccacccagtctgcaccttcctctcctgatggcagttctgacctggagatagacgaattggagacaccttcagactcggagcagctggacagtggacatgaatttgaatgggaagatgaactaccccgggcagagggtctgggcaccagtgagacagctgaaaggctgggccgaggttgtatgtgggatgtgactggagaagatggacatcactggagggtgttccga

SEQ ID NO: 297469 - DNA, 108 bp, Artificial Sequence
  derived and/or modified sequence
attgtgctgctgctcttcatctgcttcctgagcaagctgaacttcaccgtgctggagaagttccccaagagcaccttcctgtgcaagatccagcacgagagcctgtag

SEQ ID NO: 297470 - protein, 401 aa, Artificial Sequence
  derived and/or modified sequence
MKTLLLLLLVLLELGEAQGSLHRVPLRRHPSLKKKLRARSQLSEFWKSHNLDMIQFTESCSMDQSAKEPLINYLDMEYFGTISIGSPPQNFTVIFDTGSSNLWVPSVYCTSPACKTHSRFQPSQSSTYSQPGQSFSIQYGTGSLSGIIGADQVSAFSYQVEGLTVVGQQFGESVTEPGQTFVDAEFDGILGLGYPSLAVGGVTPVFDNMMAQNLVDLPMFSVYMSSNPEGGAGSELIFGGYDHSHFSGSLNWVPVTKQAYWQIALDNIQVGGTVMFCSEGCQAIVDTGTSLITGPSDKIKQLQNAIGAAPVDGEYAVECANLNVMPDVTFTINGVPYTLSPTAYTLLDFVDGMQFCSSGFQGLDIHPPAGPLWILGDVFIRQFYSVFDRGNNRVGLAPAVP

SEQ ID NO: 297471 - DNA, 1206 bp, Artificial Sequence
  derived and/or modified sequence
atgaaaacactcctgctgctgttgctggtactgctggaattgggagaggctcaaggatctttgcacagagtcccgcttcggcgacatcccagtttgaagaaaaagctgcgcgcacggagccaattatcggagttctggaagagccataatctggacatgattcagtttaccgaatcctgctccatggaccagagcgctaaagagccactcatcaactacctggatatggaatattttggaacaatctcaatcggaagtccaccccagaattttactgtgatctttgatacgggatcatccaacctttgggtacctagcgtgtactgtacgagtcctgcctgcaaaacccattcgcgcttccagccctctcagtcaagtacctactcgcagccagggcagtccttctctattcaatacggcactggatctctaagcggaatcattggggctgaccaagttagcgcgtttagctatcaggttgaagggttaaccgtcgtcgggcagcagttcggtgagagcgttacggagcctgggcagacatttgtggatgctgagttcgacggaatcttaggacttgggtacccgtccttagccgtgggcggcgtgactcctgtgttcgataatatgatggcccagaatctcgtggatttgcccatgttctctgtctacatgtcatccaatcccgagggtggagccggatctgaactgatcttcggcgggtacgaccacagccacttctctggatctctgaactgggtgcccgtgaccaagcaggcatactggcagatagcacttgataacattcaggtcggggggactgttatgttctgtagcgaaggttgtcaggcaattgtggatacgggcacctcactcattacagggcctagcgacaaaatcaagcaactgcagaatgcgattggggcagctcctgttgatggagagtacgcagtggaatgcgctaacctgaatgttatgcctgatgttacgttcaccatcaatggtgtgccgtatactctctcccccacagcatatactttgctcgatttcgttgatggtatgcagttttgctcctccggcttccagggtctggacattcatcctcctgctgggccgctgtggatcttgggagacgtgtttatacggcagttttacagcgtgtttgacagagggaacaatcgagtcggcttagcgcccgccgtaccctag

SEQ ID NO: 297472 - DNA, 1206 bp, Artificial Sequence
  derived and/or modified sequence
atgaagaccctgctgctgctgctgctggtgctgctggagctgggggaggcccagggcagcctgcaccgggtgcccctgcggcggcaccccagcctgaagaagaagctgcgggcccggagccagctgtctgagttctggaagagccacaacctggacatgatccagttcacagagagctgcagcatggaccagagcgccaaggagcccctcatcaactacctggacatggagtacttcggcaccatcagcatcggcagccccccccagaacttcaccgtcatctttgacaccggcagcagcaacctgtgggtgcccagcgtgtactgcaccagccctgcctgcaagacccacagccgcttccagcccagccagagcagcacctacagccagcccggccagagcttcagcatccagtatggaacaggcagcctgagcggcatcatcggggctgaccaggtgtctgccttctcctaccaggtggagggcctgactgtggtgggccagcagtttggagagagcgtgacagagcccggccagacctttgtggatgctgagtttgatggcatcctgggcctgggctaccccagcctggccgtgggcggcgtgacccctgtgtttgacaacatgatggcccagaacctggtggacctgcccatgttttctgtgtacatgagcagcaaccctgagggcggggccggcagcgagctgatctttggaggctatgaccacagccacttcagcggcagcctgaactgggtgcctgtgaccaagcaggcctactggcagatcgccctggacaacatccaggtgggcggcaccgtgatgttctgcagcgagggctgccaggccatcgtggacaccggcaccagcctcatcaccggccccagcgacaagatcaagcagctgcagaatgccatcggggccgcccctgtggatggagaatatgctgtggagtgtgccaacctgaatgtgatgccagatgtgaccttcaccatcaatggagtgccctacaccctgagccccacagcctacaccctgctggactttgtggatggcatgcagttctgcagcagcggcttccagggcctggacatccaccccccagctggccccctgtggatcctgggagatgtgttcatccggcagttctacagcgtgtttgaccggggcaacaacagagtgggcctggccccagctgtgccctag

SEQ ID NO: 297473 - DNA, 1206 bp, Artificial Sequence
  derived and/or modified sequence
atgaagaccctgctgctgctgctgctggtgctgctggagctgggcgaggcccagggatctttgcaccgggttcctctgcgtaggcacccaagcttgaagaaaaagctgcgggcccgctcacagctttctgagttctggaaatctcataatctcgatatgatacaatttactgaaagctgcagcatggatcagagcgccaaggaacccctgattaattatctcgacatggagtacttcggaaccatatccattgggtctccaccccagaactttactgttatcttcgacaccggctctagtaacctgtgggtaccaagtgtgtattgcaccagccctgcctgcaaaactcacagtagatttcaaccgtcccagagcagcacctactcccagccagggcaaagcttttccatccaatatggaactggctcattatctggaataattggcgcagaccaagtgagcgccttctcctatcaggtggagggcctgacagttgtggggcagcagtttggtgaaagcgtcactgagccagggcagactttcgtggatgctgagttcgacggcattcttggcctgggctacccatcactggcggtcggcggagtgacccctgtgttcgacaacatgatggcacagaatctggtcgaccttccaatgttcagtgtgtacatgagtagtaatcccgagggcggggccggctctgagctgatttttggcggttacgaccatagccactttagcggctcactgaactgggtaccagtcaccaaacaggcatactggcaaattgcactggacaacattcaggtcggtggaacagttatgttctgttcagaagggtgccaggccatcgtggacactggaacatcacttatcacaggaccaagcgataaaattaagcagcttcagaacgctattggcgccgcgcctgttgacggggagtatgccgtcgagtgcgcgaatttgaacgtgatgcctgatgtgacgttcacaatcaacggggtgccttacactctctctccaaccgcatataccctgctggactttgtcgatgggatgcagttctgctctagcggattccaaggattagacattcatcctcctgccgggcctctgtggatcctgggagacgtatttatccgccagttctacagcgtgttcgaccgcggaaataacagggtaggcttggcaccagctgtcccatag

SEQ ID NO: 297474 - DNA, 1206 bp, Artificial Sequence
  derived and/or modified sequence
atgaaaacactgctgttattgttactcgttctattggaacttggggaggctcagggttcccttcatcgggttccgcttcgtagacacccttctcttaagaagaaactgcgagcccgatcccaactgtccgagttctggaaaagccacaacctggacatgattcaattcaccgaatcatgttccatggatcagtctgcgaaggagcccctgattaactacctggacatggagtactttggaacaatctcaatagggtctcctccgcaaaatttcaccgttatcttcgataccggatcttctaatctatgggtgccatctgtctactgtacgtcccccgcttgtaagactcattccaggttccaaccatcacagtcttccacttactcccaaccaggacaatcctttagtattcagtatgggactggctctctgtcgggtattatcggagctgaccaggtgagtgccttctcttatcaggtcgaaggcctgaccgtcgtgggccagcaattcggggaatctgtgacagagccgggtcagactttcgtggatgccgaatttgacgggatcctgggcttagggtatcccagtttagcagtggggggagtgactcccgtgttcgacaacatgatggcacagaacctcgtcgacctgcccatgttttctgtgtacatgtctagcaatccggagggaggggcagggagcgagctgattttcggaggctacgaccactctcatttttccgggtcccttaattgggtgccagtcacaaagcaggcatactggcaaatcgctctggataacattcaggtgggtggaactgttatgttctgctccgagggctgccaggctatcgttgataccggcacctccctgatcacgggtccaagtgacaagatcaaacagctgcaaaatgctatcggcgctgccccagtagacggagagtatgctgtggagtgcgccaatctgaacgtgatgccagatgtgaccttcactataaatggagtgccttatacactaagtcccactgcatacactctgcttgactttgtggacggaatgcagttttgctcttctggcttccagggcctggacatacatccccctgccggacctctgtggatactgggcgacgttttcattcggcaattttatagcgtgttcgaccgcggtaacaatcgtgtgggcctcgctccagctgtgccatag

SEQ ID NO: 297475 - DNA, 2243 bp, Artificial Sequence
  derived and/or modified sequence
atcattcggccctcagactgggctgggcaggtctgagagttagggaaagtccgttcccactgccctcggggagagaagaaaggagggggcaagggagaagctgctggtcggactcacaatgaaaacgctccttcttttgctgctggtgctcctggagctgggagaggcccaaggatcccttcacagggtgcccctcaggaggcatccgtccctcaagaagaagctgcgggcacggagccagctctctgagttctggaaatcccataatttggacatgatccagttcaccgagtcctgctcaatggaccagagtgccaaggaacccctcatcaactacttggatatggaatacttcggcactatctccattggctccccaccacagaacttcactgtcatcttcgacactggctcctccaacctctgggtcccctctgtgtactgcactagcccagcctgcaagacgcacagcaggttccagccttcccagtccagcacatacagccagccaggtcaatctttctccattcagtatggaaccgggagcttgtccgggatcattggagccgaccaagtctctgctttctcctaccaggtggaaggactaaccgtggttggccagcagtttggagaaagtgtcacagagccaggccagacctttgtggatgcagagtttgatggaattctgggcctgggatacccctccttggctgtgggaggagtgactccagtatttgacaacatgatggctcagaacctggtggacttgccgatgttttctgtctacatgagcagtaacccagaaggtggtgcggggagcgagctgatttttggaggctacgaccactcccatttctctgggagcctgaattgggtcccagtcaccaagcaagcttactggcagattgcactggataacatccaggtgggaggcactgttatgttctgctccgagggctgccaggccattgtggacacagggacttccctcatcactggcccttccgacaagattaagcagctgcaaaacgccattggggcagcccccgtggatggagaatatgctgtggagtgtgccaaccttaacgtcatgccggatgtcaccttcaccattaacggagtcccctataccctcagcccaactgcctacaccctactggacttcgtggatggaatgcagttctgcagcagtggctttcaaggacttgacatccaccctccagctgggcccctctggatcctgggggatgtcttcattcgacagttttactcagtctttgaccgtgggaataaccgtgtgggactggccccagcagtcccctaaggaggggccttgtgtctgtgcctgcctgtctgacagaccttgaatatgttaggctggggcattctttacacctacaaaaagttattttccagagaatgtagctgtttccagggttgcaacttgaattaagaccaaacagaacatgagaatacacacacacacacacatatacacacacacacacttcacacatacacaccactcccaccaccgtcatgatggaggaattacgttatacattcatattttgtattgatttttgattatgaaaatcaaaaattttcacatttgattatgaaaatctccaaacatatgcacaagcagagatcatggtataataaatccctttgcaactccactcagccctgacaacccatccacacacggccaggcctgtttatctacactgctgcccactcctctctccagctccacatgctgtacctggatcattctgaagcaaattccgagcattacatcattttgtccataaatatttctaacatccttaaatatacaatcggaattcaagcatctcccattgtcccacaaatgtttggctgtttttgtagttggattgtttgtattaggattcaagcaaggcccatatattgcatttatttgaaatgtctgtaagtctctttccatctacagagtttagcacatttgaacgttgctggttgaaatcccgaggtgtcatttgacatggttctctgaacttatctttcctataaaatggtagttagatctggaggtctgattttgtggcaaaaatacttcctaggtggtgctgggtacttcttgttgcatcctgtcaggaggcagataatgctggtgcctctctattggtaatgttaagactgctgggtgggtttggagttcttggctttaatcattcattacaaagttcagcatttta

SEQ ID NO: 297476 - DNA, 1206 bp, Artificial Sequence
  derived and/or modified sequence
atgaagaccctgctgctgctgctgctggtgctgctggagctgggcgaggcccagggcagcctgcacagagtgcccctgagaagacaccccagcctgaagaagaagctgagagccagaagccagctgagcgagttctggaagagccacaacctggacatgatccagttcaccgagagctgcagcatggaccagagcgccaaggagcccctgatcaactacctggacatggagtacttcggcaccatcagcatcggcagccccccccagaacttcaccgtgatcttcgacaccggcagcagcaacctgtgggtgcccagcgtgtactgcaccagccccgcctgcaagacccacagcagattccagcccagccagagcagcacctacagccagcccggccagagcttcagcatccagtacggcaccggcagcctgagcggcatcatcggcgccgaccaggtgagcgccttcagctaccaggtggagggcctgaccgtggtgggccagcagttcggcgagagcgtgaccgagcccggccagaccttcgtggacgccgagttcgacggcatcctgggcctgggctaccccagcctggccgtgggcggcgtgacccccgtgttcgacaacatgatggcccagaacctggtggacctgcccatgttcagcgtgtacatgagcagcaaccccgagggcggcgccggcagcgagctgatcttcggcggctacgaccacagccacttcagcggcagcctgaactgggtgcccgtgaccaagcaggcctactggcagatcgccctggacaacatccaggtgggcggcaccgtgatgttctgcagcgagggctgccaggccatcgtggacaccggcaccagcctgatcaccggccccagcgacaagatcaagcagctgcagaacgccatcggcgccgcccccgtggacggcgagtacgccgtggagtgcgccaacctgaacgtgatgcccgacgtgaccttcaccatcaacggcgtgccctacaccctgagccccaccgcctacaccctgctggacttcgtggacggcatgcagttctgcagcagcggcttccagggcctggacatccacccccccgccggccccctgtggatcctgggcgacgtgttcatcagacagttctacagcgtgttcgacagaggcaacaacagagtgggcctggcccccgccgtgccctag

SEQ ID NO: 297477 - protein, 775 aa, Artificial Sequence
  derived and/or modified sequence
IETKTRANPDRTFDLVLKVKCHASENEDPVVLWKFPEDFGDQEILQSVPKFCFPFDVERVSQNQVGQHFTFVLTDIESKQRFGFCRLTSGGTICLCILSYLPWFEVYYKLLNTLADYLAKELENDLNETLRSLYNHPVPKANTPVNLSVNQEIFIACEQVLKDQPALVPHSYFIAPDVTGLPTIPESRNLTEYFVAVDVNNMLQLYASMLHERRIVIISSKLSTLTACIHGSAALLYPMYWQHIYIPVLPPHLLDYCCAPMPYLIGIHSSLIERVKNKSLEDVVMLNVDTNTLESPFSDLNNLPSDVVSALKNKLKKQSTATGDGVARAFLRAQAALFGSYRDALRYKPGEPITFCEESFVKHRSSVMKQFLETAINLQLFKQFIDGRLAKLNAGRGFSDVFEEEITSGGFCGGNPRSYQQWVHTVKKGGALFNTAMTKATPAVRTAYKFAKNHAKLGLKEVKSKLKHKENEEDYGTCSSSVQYTPVYKLHNEKGGNSEKRKLAQARLKRPLKSLDGALYDDEDDDDIERASKLSSEDGEEASAYLYESDDSVETRVKTPYSGEMDLLGEILDTLSTHSSDQGKLAAAKSLDFFRSMDDIDYKPTNKSNAPSENNLAFLCGGSGDQAEWNLGQDDSALHGKHLPPSPRKRVSSSGLTDSLFILKEENSNKHLGADNVSDPTSGLDFQLTSPEVSQTDKGKTEKRETLSQISDDLLIPGLGRHSSTFVPWEKEGKEAKETSEDIGLLHEVVSLCHMTSDFQQSLNISDKNTNGNQT

SEQ ID NO: 297478 - DNA, 2328 bp, Artificial Sequence
  derived and/or modified sequence
atagagactaagacacgggccaatcctgatcggaccttcgatctagtgctgaaggtaaagtgccacgcatcagagaacgaagatccagtagtgctctggaaattccccgaggattttggagaccaggagattctgcaatcagtgcctaagttctgcttcccatttgacgtcgaacgcgtgtcccagaatcaggtgggtcagcacttcacttttgtcctgactgacatagagtccaagcagagatttggattttgtagactgacaagcggcggcacaatctgcttgtgtatcctgtcatacctgccctggtttgaggtgtactataagctgctaaatacacttgccgactatttggctaaagagctggaaaatgatcttaacgagactctccgatccttatataaccatcctgtgcctaaggccaatacaccagttaatttgtccgttaaccaagagatcttcatagcttgtgaacaggtgttaaaggatcagcctgccctcgtccctcattcttattttattgcacccgacgtgactggtctgcccaccatccctgagtctcgcaacctgacagaatatttcgtggcggttgacgtaaacaacatgctgcaactatatgcgtccatgctacatgaaagacggatcgtgattatttcaagcaagctatcaaccctgaccgcctgcatacacggttctgccgctctgctgtatccaatgtattggcagcatatctacatccccgtactcccgcctcacctcctggattactgctgcgctcctatgccctacttgatcggtatacactcatccctgattgagcgcgttaaaaataagagcctcgaagacgtcgtaatgctgaacgtcgataccaatacgctggaaagccccttctccgatctcaacaacctaccatctgacgttgtgtctgccctcaaaaacaaactgaaaaagcagtccacggctacaggcgatggcgtggcaagagccttcctgcgcgcacaggccgccctgtttgggtcctacagggacgccttgagatataagcctggagaacctattacgttttgcgaggagagcttcgtgaagcatcgctcatcagtgatgaagcagtttctggaaactgctattaatctgcagttatttaagcaattcattgacggcagactggcgaagttgaacgcgggcagggggttctctgacgtgttcgaagaggaaattacatctgggggtttttgcggtggtaaccccaggtcctaccagcagtgggtgcataccgtcaaaaagggaggcgctttattcaatacggcaatgacgaaagctacaccagccgtgaggacagcctacaagttcgccaaaaaccatgccaaactgggcctaaaggaggttaagtccaaactcaagcacaaggagaacgaggaggattacggaacatgtagctcatcagtgcagtataccccagtctataaactacacaacgagaaagggggaaattctgagaagaggaagctggcacaagcccgcttgaagagacctctaaaatctttggatggcgccctctacgacgacgaggatgacgacgacatcgagcgcgctagcaaactttctagcgaggatggagaggaggcatcagcctacctgtacgagtcagacgatagcgttgaaactagagtgaaaacaccctatagtggtgaaatggacctgcttggggaaatactcgacacattgtccacacacagttcagatcagggcaagttagcagctgccaaaagtctggatttttttcgctcaatggacgacatcgactacaagccgacgaacaaaagtaatgccccgagcgagaataatctcgcctttctgtgtggcggctctggagatcaggcagagtggaatctgggacaagacgattctgctctccatggcaagcacttacctccatcacctagaaagcgagtttccagctccgggctgacagacagtcttttcatcctgaaagaggagaatagcaataagcatctcggggcagacaatgtgagcgacccaaccagcggccttgactttcagcttacctctccggaagtgtcccaaacagacaaaggaaaaaccgaaaaacgggagacactcagtcagatctcagacgaccttttgatacccggtctgggcagacatagcagcacttttgtgccttgggagaaggaggggaaggaggctaaagagactagcgaagacatcgggctgcttcacgaggtcgtgtcgctgtgccatatgacgagcgatttccagcagtcgctgaatatcagcgacaagaataccaatggtaaccagacctag

SEQ ID NO: 297479 - DNA, 2328 bp, Artificial Sequence
  derived and/or modified sequence
attgagaccaagacccgggccaacccagacaggacctttgacctggtgctgaaggtgaagtgccacgcctctgaaaatgaagatcctgtggtgctgtggaagttcccagaagattttggagaccaggagatcctgcagagcgtgcccaagttctgcttcccctttgatgtggagcgggtgtcccagaaccaggtgggccagcacttcacctttgtgctgacagacatcgagagcaagcagcgcttcggcttctgccgcctgaccagcggcggcaccatctgcctgtgcatcctgagctacctgccctggtttgaggtgtactacaagctgctgaacaccctggccgactacctggccaaggagctggagaatgacctgaatgagaccctgcggagcctgtacaaccaccctgtgcccaaggccaacacccctgtgaacctgtctgtgaaccaggagatcttcatcgcctgtgagcaggtgctgaaggaccagcctgccctggtgccccacagctacttcatcgccccagatgtgacaggcctgcccaccatccctgagagcaggaacctgacagagtactttgtggccgtggatgtgaacaacatgctgcagctgtatgcctccatgctgcatgaaagaagaattgtcatcatcagcagcaagctgagcaccctgacagcctgcatccacggcagcgctgccctgctgtaccccatgtactggcagcacatctacatccctgtgctgcccccccacctgctggactactgctgtgcccccatgccctacctgattggcatccacagcagcctcatcgagcgggtgaagaacaagagcctggaggatgtggtgatgctgaatgtggacaccaacaccctggagagccccttcagtgacctgaacaacctgcccagtgatgtggtgtctgccctgaagaacaagctgaagaagcagagcacagccactggagatggagtggcccgggccttcctgcgggcccaggccgccctgtttggcagctacagagatgccctgcgctacaagccaggagagcccatcaccttctgtgaggagagctttgtgaagcacaggagctctgtgatgaagcagttcctggagacagccatcaacctgcagctgttcaagcagttcattgatggccgcctggccaagctgaatgccggccggggcttcagtgatgtgtttgaggaggagatcaccagcggcggcttctgtggcggcaaccccaggagctaccagcagtgggtgcacacagtgaagaagggcggggccctcttcaacacagccatgaccaaggccaccccagctgtgaggacagcctacaagtttgccaagaaccacgccaagctgggcctgaaggaggtgaagagcaagctgaagcacaaggaaaatgaagaagattatggcacctgcagcagctctgtgcagtacacccctgtgtacaagctgcacaatgagaagggcggcaacagcgagaagaggaagctggcccaggcccggctgaagaggcccctgaagagcctggatggagccctgtatgatgatgaagatgatgatgacatcgagcgggccagcaagctgagcagtgaagatggagaggaggccagcgcctacctgtatgaaagtgatgacagcgtggagaccagggtgaagaccccctacagcggggagatggacctgctgggggagatcctggacaccctgagcacccacagcagtgaccagggcaagctggccgccgccaagagcctggacttcttccgctccatggatgacatcgactacaagcccaccaacaagagcaatgcccccagcgagaacaacctggccttcctgtgtggcggcagcggggaccaggccgagtggaacctgggccaggatgacagcgccctgcacggcaagcacctgccccccagccccaggaagagggtgagcagcagcggcctgacagacagcctcttcatcctgaaggaggagaacagcaacaagcacctgggcgctgacaacgtgtctgaccccaccagcggcctggacttccagctgaccagccctgaggtgtcccagacagacaagggcaagacagagaagcgggagaccctgagccagatcagtgatgacctgctgatccctggcctgggccgccacagcagcacctttgtgccctgggagaaggagggcaaggaggccaaggagaccagtgaagatattggcctgctgcacgaggtggtgtccctgtgccacatgaccagtgacttccagcagagcctgaacatcagtgacaagaacaccaatggaaaccagacctag

SEQ ID NO: 297480 - DNA, 2328 bp, Artificial Sequence
  derived and/or modified sequence
atcgagaccaagacccgggccaaccccgaccggaccttcgacctggtactgaaggttaagtgtcacgcctcggaaaatgaagatcctgttgtgctctggaagttccccgaggacttcggagatcaggaaatactccagtcagtgccaaagttctgttttccctttgacgttgaaagagtctctcagaaccaggtagggcaacacttcacctttgtgctgactgacattgagtccaagcagaggttcggcttttgcagactgaccagcgggggcaccatctgcctgtgcatcctctcttatcttccgtggtttgaggtgtactataagttgctgaacacgttggccgattatttggccaaagaactcgagaacgatctcaatgaaacactgcggtcactatacaaccaccccgtgcccaaggctaatacacccgtcaatttgtcagtaaaccaagaaatctttattgcctgcgagcaggtgcttaaagatcagccagctctggttccacattcgtattttattgctcccgacgtgaccgggctccccacaatcccggaaagccgaaatctgactgagtatttcgtggccgtggacgtgaataatatgctgcagctgtacgcgagcatgctgcacgagcgacgcatcgttataatctccagcaaactgagtacactgacagcttgcatccatggctcagctgctttactttatcccatgtattggcagcacatctacatccctgtgctgcctcctcaccttctagattattgctgcgcaccaatgccatatctgatcggcatacactcaagcctgatagaaagagtgaaaaacaaatctctggaggacgtggtcatgttgaacgtcgatactaacacccttgaatcacctttctctgatctcaacaatttgccctccgacgtggtctccgccttgaagaacaaactcaagaagcaaagcaccgccacgggcgatggggttgctagggctttcttgcgcgctcaagcagccctatttggctcgtaccgtgatgccctccgttacaaaccgggagagcctattacgttctgtgaggagtcattcgttaaacaccgttcatccgtcatgaagcaattcttggaaaccgccattaacttgcagctcttcaagcagttcattgatggtcgactcgccaaactcaacgccggcagagggttttctgacgttttcgaggaagaaatcacaagcgggggattctgcggtgggaacccccgatcttaccagcaatgggtgcacacggtcaaaaaagggggggccctgttcaataccgccatgacaaaagcaactcccgctgtgcggaccgcttataaatttgccaaaaatcatgccaaactgggattgaaggaagtgaaatccaaattgaagcacaaggaaaatgaggaggactacggaacctgctcaagctcagtgcagtacacaccggtgtataaactccataacgagaaagggggaaattcagaaaagcgtaagctggcccaggctcgcctgaagaggcccctcaaatctttggacggcgcactctacgatgatgaagatgacgatgatatcgagcgcgctagcaaactgtcgagcgaggacggagaagaggcatccgcgtatctgtatgagagtgatgattcggttgaaaccagagtgaaaacaccttacagcggggagatggatcttctgggcgagatcctcgacaccctgtctacccactcctcagatcaaggtaagctggccgcagctaagagcctcgatttctttaggtccatggacgatatagactacaagccaaccaacaagtcaaatgccccgtctgaaaataacctggcctttctgtgtggtggctccggtgatcaagccgagtggaatctgggacaggacgatagtgcgctgcatggtaaacacctaccaccttcaccaaggaagcgggtctcgtccagtgggctcactgactctttatttattttaaaggaagaaaattccaataagcaccttggtgctgacaacgtgtcagaccccacgagtggcttggactttcaactgacgtcgcccgaggtctcccagacagacaaaggcaagaccgagaaacgcgaaacattgagtcaaatctctgacgacctgttgatccccggattagggcgccacagtagcaccttcgttccgtgggagaaagaagggaaggaagccaaagagaccagcgaagacataggcctgctgcacgaggtagtgtccctatgccacatgactagcgactttcagcagtctctcaatattagcgacaaaaatacaaatggcaatcagacgtag

SEQ ID NO: 297481 - DNA, 2328 bp, Artificial Sequence
  derived and/or modified sequence
atcgagacaaagactagggcaaatcccgacagaacatttgacttggtactgaaggtcaagtgtcacgcctcagagaatgaggaccccgttgtcctttggaagtttccagaagacttcggagatcaagagattttacagtctgtgccgaagttctgctttccatttgacgtggagcgggtatctcagaatcaggtaggccaacacttcaccttcgtactcaccgacatcgagagcaaacaacgctttggattttgtagactgacgtctggcggtacgatttgcctgtgcatactgtcatacttgccctggttcgaggtgtattacaagctgctgaataccctggccgactacctcgccaaagaactcgagaatgacctgaacgagacactccgttcgctttacaaccaccccgtccctaaggccaacacgcctgtgaatttatcagtaaatcaggagatctttatagcttgcgagcaggtactgaaggatcagccagccctggtgccacattcttactttatagctccagacgtgaccggcctgccaactatccccgagagcaggaatctgaccgagtactttgtggccgtcgacgtcaacaacatgctccagctttacgcgagcatgctgcacgagagaaggatcgtgatcatttcttccaaactttctaccctgactgcttgtatccacggcagtgccgcactcctgtaccccatgtactggcagcacatctatatcccggttctgccgccacatttgctagactactgctgcgcacctatgccttacttgatcggaatacactcttccctgattgaaagagtcaaaaataaaagtttggaggacgtggtgatgcttaatgtggatactaataccctggaatcaccattctccgatcttaacaatctgccttccgacgtggtgagcgctctgaagaacaaactgaagaaacagtctaccgctaccggcgacggcgttgccagggcctttctgagagcacaggccgctctctttggcagctatcgagatgcattgcggtacaagcccggtgagcctatcaccttttgcgaggagtctttcgtgaagcatcgatcctcagtgatgaagcagtttttggagaccgcaattaacctccaactcttcaaacagttcatcgacggcagattggctaaactgaatgccggaaggggcttcagcgatgtctttgaggaagaaatcacgtcaggagggttttgcggaggtaacccccgttcataccagcagtgggtccataccgtaaagaaaggtggcgctttgtttaacaccgcaatgaccaaggccacaccagcggtacggaccgcctacaagttcgcgaagaaccatgctaaactggggctgaaggaggtgaaatcaaagctgaaacacaaggaaaatgaagaggattacggcacttgttctagttctgttcaatacacccctgtgtataagctacacaatgagaagggcggaaacagcgagaagagaaagctcgcacaggccagactgaaacgacctctcaaatctctggatggggctctatacgatgatgaggatgatgatgatattgaacgagcttctaagttgtcatcggaggacggggaggaggcctcggcatatctgtatgagagcgatgacagtgttgaaacgagagtgaaaaccccttactctggcgagatggatttgctcggtgagattttggatacactgtccacccactcctctgaccagggtaaactggcggctgcaaaatcactcgatttctttaggtcgatggatgatatcgactacaaacccacaaataaatctaatgcgcctagcgaaaacaaccttgcattcttatgcggagggtcaggggatcaagctgaatggaatctgggtcaagatgatagcgctttgcatgggaagcatctccctccctctccgaggaaacgggtctcttcatctggactcacagactcgttgttcatcttgaaagaagaaaactctaataagcatctgggcgcagataatgttagtgaccccacgtcaggcctggacttccagctcaccagtcccgaagtaagtcagacagataagggaaaaactgaaaagcgcgagactctgtctcagatctccgatgatctgttgatcccagggctcggacgtcatagtagcacgtttgtgccctgggaaaaggaaggaaaagaagccaaagagactagcgaggatattggccttctgcacgaagttgtcagcctgtgccatatgacctcggattttcagcaatctctcaacatctctgataaaaacaccaacgggaatcagacatag

SEQ ID NO: 297482 - DNA, 2328 bp, Artificial Sequence
  derived and/or modified sequence
atcgagaccaagaccagagccaaccccgacagaaccttcgacctggtgctgaaggtgaagtgccacgccagcgagaacgaggaccccgtggtgctgtggaagttccccgaggacttcggcgaccaggagatcctgcagagcgtgcccaagttctgcttccccttcgacgtggagagagtgagccagaaccaggtgggccagcacttcaccttcgtgctgaccgacatcgagagcaagcagagattcggcttctgcagactgaccagcggcggcaccatctgcctgtgcatcctgagctacctgccctggttcgaggtgtactacaagctgctgaacaccctggccgactacctggccaaggagctggagaacgacctgaacgagaccctgagaagcctgtacaaccaccccgtgcccaaggccaacacccccgtgaacctgagcgtgaaccaggagatcttcatcgcctgcgagcaggtgctgaaggaccagcccgccctggtgccccacagctacttcatcgcccccgacgtgaccggcctgcccaccatccccgagagcagaaacctgaccgagtacttcgtggccgtggacgtgaacaacatgctgcagctgtacgccagcatgctgcacgagagaagaatcgtgatcatcagcagcaagctgagcaccctgaccgcctgcatccacggcagcgccgccctgctgtaccccatgtactggcagcacatctacatccccgtgctgcccccccacctgctggactactgctgcgcccccatgccctacctgatcggcatccacagcagcctgatcgagagagtgaagaacaagagcctggaggacgtggtgatgctgaacgtggacaccaacaccctggagagccccttcagcgacctgaacaacctgcccagcgacgtggtgagcgccctgaagaacaagctgaagaagcagagcaccgccaccggcgacggcgtggccagagccttcctgagagcccaggccgccctgttcggcagctacagagacgccctgagatacaagcccggcgagcccatcaccttctgcgaggagagcttcgtgaagcacagaagcagcgtgatgaagcagttcctggagaccgccatcaacctgcagctgttcaagcagttcatcgacggcagactggccaagctgaacgccggcagaggcttcagcgacgtgttcgaggaggagatcaccagcggcggcttctgcggcggcaaccccagaagctaccagcagtgggtgcacaccgtgaagaagggcggcgccctgttcaacaccgccatgaccaaggccacccccgccgtgagaaccgcctacaagttcgccaagaaccacgccaagctgggcctgaaggaggtgaagagcaagctgaagcacaaggagaacgaggaggactacggcacctgcagcagcagcgtgcagtacacccccgtgtacaagctgcacaacgagaagggcggcaacagcgagaagagaaagctggcccaggccagactgaagagacccctgaagagcctggacggcgccctgtacgacgacgaggacgacgacgacatcgagagagccagcaagctgagcagcgaggacggcgaggaggccagcgcctacctgtacgagagcgacgacagcgtggagaccagagtgaagaccccctacagcggcgagatggacctgctgggcgagatcctggacaccctgagcacccacagcagcgaccagggcaagctggccgccgccaagagcctggacttcttcagaagcatggacgacatcgactacaagcccaccaacaagagcaacgcccccagcgagaacaacctggccttcctgtgcggcggcagcggcgaccaggccgagtggaacctgggccaggacgacagcgccctgcacggcaagcacctgccccccagccccagaaagagagtgagcagcagcggcctgaccgacagcctgttcatcctgaaggaggagaacagcaacaagcacctgggcgccgacaacgtgagcgaccccaccagcggcctggacttccagctgaccagccccgaggtgagccagaccgacaagggcaagaccgagaagagagagaccctgagccagatcagcgacgacctgctgatccccggcctgggcagacacagcagcaccttcgtgccctgggagaaggagggcaaggaggccaaggagaccagcgaggacatcggcctgctgcacgaggtggtgagcctgtgccacatgaccagcgacttccagcagagcctgaacatcagcgacaagaacaccaacggcaaccagacctag

SEQ ID NO: 297483 - DNA, 2411 bp, Artificial Sequence
  derived and/or modified sequence
attgagacaaaaacaagggcaaatccagacagaacctttgacttggtgttgaaagtgaaatgtcatgcctctgaaaatgaagatcctgtggtattgtggaaattcccagaggactttggagaccaggaaatactacagagtgtgccaaagttctgttttccctttgacgttgaaagggtgtctcagaatcaagttggacagcactttacctttgtactgacagacattgaaagtaaacagagatttggattctgcagactgacgtcaggaggcacaatttgtttatgcatccttagttaccttccctggtttgaagtgtattacaagcttctaaatactcttgcagattacttggctaaggaactggaaaatgatttgaatgaaactctcagatcactgtataaccacccagtaccaaaggcaaatactcctgtaaatttgagtgtgaaccaagagatatttattgcctgtgagcaagttctgaaagatcagcctgctctagtaccgcattcctacttcattgcccctgatgtaactggactcccaacaatacccgagagtagaaatcttacagaatattttgttgccgtggatgtgaacaacatgctgcagctgtatgccagtatgctgcatgaaaggcgcatcgtgattatctcgagcaaattaagcactttaactgcctgtatccatggatcagctgctcttctatacccaatgtattggcaacacatatacatcccagtgcttcctccacacctgctggactactgctgtgccccaatgccatacctgattggaatacactccagcctcatagagagagtgaaaaacaaatcattggaagatgttgttatgttaaatgttgatacaaacacattagaatcaccatttagtgacttgaacaacctaccaagtgatgtggtctcggccttgaaaaataaactgaagaagcagtctacagctacgggtgatggagtagctagggcctttcttagagcacaggctgctttgtttggatcctacagagatgcactgagatacaaacctggtgagcccatcactttctgtgaggagagttttgtaaagcaccgctcaagcgtgatgaaacagttcctggaaactgccattaacctccagctttttaagcagtttatcgatggtcgactggcaaaactaaatgcaggaaggggtttctctgatgtatttgaagaagagatcacttcaggtggcttttgtggagggaacccgaggtcatatcaacaatgggtgcatacagtcaagaaaggaggtgcactgttcaacacagcaatgaccaaagcaacccctgctgtacggacagcatataaatttgcaaaaaatcatgcaaagctgggactaaaggaagtgaagagtaaactaaaacacaaggaaaatgaagaagattatgggacctgttctagttctgtacaatatacaccagtttacaaattacacaatgaaaagggaggaaactcagaaaagcgtaagcttgctcaggcacgcttaaaaaggcctcttaagagccttgatggtgctctatatgatgatgaagatgatgatgacattgaaagagcaagcaagttatcttctgaagatggtgaagaagcttctgcttatctctatgagagtgatgactctgttgaaacaagagtgaagactccttactcaggtgaaatggacttactaggagagattcttgatacattgagcacacacagctcagatcaggggaagctggcagctgcaaagagcttggatttctttagatcaatggatgacattgattacaaacctacgaataaatctaatgctcctagtgagaataacctggctttcctctgtggtggttctggtgaccaagcagagtggaatcttgggcaagacgatagtgccctccatggcaaacacctccctccatctcctaggaagcgggtttcctctagtggtttgacagattctctgtttatcctgaaagaggaaaacagtaacaagcacctcggtgctgacaatgtgagtgaccctacttcaggactggatttccaactcacttcccctgaagtttcccagactgataaaggaaaaacagaaaagagggaaacactaagccagatttcagatgatctgcttatacccggtcttgggcggcattcatcgacttttgttccttgggagaaagaagggaaagaagccaaagagacttcagaagatattggactgctccatgaagtagtgtcattatgtcatatgacatctgacttccaacaaagcttgaacatttcagacaaaaacacaaatggaaaccaaacttaaatcttgcatccaagcttctatggagacattttgagattcaatgcaatctgtataataaacagaattatttgtaggaatggcaa

SEQ ID NO: 297484 - protein, 92 aa, Artificial Sequence
  derived and/or modified sequence
MSNKDRHIDSSCSSFIKTEPSSPASLTDSVNHHSPGGSSDASGSYSSTMNGHQNGLDSPPLYPSAPILGGSGPVRKLYDDCSSTIVEDPQTK

SEQ ID NO: 297485 - DNA, 5216 bp, Artificial Sequence
  derived and/or modified sequence
agctgacaatttactggttcatcaatgaaacaatattaaattatgaagatgtaaggaaaaaatcctacgctaacactgtcgcagtttgaaagctttaaaaagttgaagtctattggaaaccttcttataagaaaccttcctagtcagagaattcaactttcttcttttcttcattcatgaaaatgcagatccactgagaaagggaataaggcttctctgcagaatgtcaaacaaagatcgacacattgattccagctgttcgtccttcatcaagacggaaccttccagcccagcctccctgacggacagcgtcaaccaccacagccctggtggctcttcagacgccagtgggagctacagttcaaccatgaatggccatcagaacggacttgactcgccacctctctacccttctgctcctatcctgggaggtagtgggcctgtcaggaaactgtatgatgactgctccagcaccattgttgaagatccccagaccaagtgtgaatacatgctcaactcgatgcccaagagactgtgtttagtgtgtggtgacatcgcttctgggtaccactatggggtagcatcatgtgaagcctgcaaggcattcttcaagaggacaattcaaggcaatatagaatacagctgccctgccacgaatgaatgtgaaatcacaaagcgcagacgtaaatcctgccaggcttgccgcttcatgaagtgtttaaaagtgggcatgctgaaagaaggggtgcgtcttgacagagtacgtggaggtcggcagaagtacaagcgcaggatagatgcggagaacagcccatacctgaaccctcagctggttcagccagccaaaaagccatataacaagattgtctcacatttgttggtggctgaaccggagaagatctatgccatgcctgaccctactgtccccgacagtgacatcaaagccctcactacactgtgtgacttggccgaccgagagttggtggttatcattggatgggcgaagcatattccaggcttctccacgctgtccctggcggaccagatgagccttctgcagagtgcttggatggaaattttgatccttggtgtcgtataccggtctctttcgtttgaggatgaacttgtctatgcagacgattatataatggacgaagaccagtccaaattagcaggccttcttgatctaaataatgctatcctgcagctggtaaagaaatacaagagcatgaagctggaaaaagaagaatttgtcaccctcaaagctatagctcttgctaattcagactccatgcacatagaagatgttgaagccgttcagaagcttcaggatgtcttacatgaagcgctgcaggattatgaagctggccagcacatggaagaccctcgtcgagctggcaagatgctgatgacactgccactcctgaggcagacctctaccaaggccgtgcagcatttctacaacatcaaactagaaggcaaagtcccaatgcacaaactttttttggaaatgttggaggccaaggtctgactaaaagctccctgggccttcccatccttcatgttgaaaaagggaaaataaacccaagagtgatgtcgaagaaacttagagtttagttaacaacatcaaaaatcaacagactgcactgataatttagcagcaagactatgaagcagctttcagattcctccataggttcctgatgagtttctttctactttctccatcatcttctttcctctttcttcccacatttctctttctctttattttttctccttttcttctttcacctcccttatttctttgcttctttcattcctagttcccattctcctttattttcttcccgtctgcctgccttctttcttttctttacctactctcattcctctcttttctcatccttccccttttttctaaatttgaaatagctttagtttaaaaaaaaatcctcccttccccctttcctttccctttctttcctttttccctttccttttccctttcctttcctttcctcttgaccttctttccatctttctttttcttccttctgctgctgaacttttaaaagaggtctctaactgaagagagatggaagccagccctgccaaaggatggagatccataatatggatgccagtgaacttattgtgaaccatactgtccccaatgactaaggaatcaaagagagagaaccaacgttcctaaaagtacagtgcaacatatacaaattgactgagtgcagtattagatttcatgggagcagcctctaattagacaacttaagcaacgttgcatcggctgcttcttatcattgcttttccatctagatcagttacagccatttgattccttaattgttttttcaagtcttccaggtatttgttagtttagctactatgtaactttttcagggaatagtttaagctttattcattcatgcaatactaaagagaaataagaatactgcaattttgtgctggctttgaacaattacgaacaataatgaaggacaaatgaatcctgaaggaagatttttaaaaatgttttgtttcttcttacaaatggagatttttttgtaccagctttaccacttttcagccatttattaatatgggaatttaacttactcaagcaatagttgaagggaaggtgcatattatcacggatgcaatttatgttgtgtgccagtctggtcccaaacatcaatttcttaacatgagctccagtttacctaaatgttcactgacacaaaggatgagattacacctacagtgactctgagtagtcacatatataagcactgcacatgagatatagatccgtagaattgtcaggagtgcacctctctacttgggaggtacaattgccatatgatttctagctgccatggtggttaggaatgtgatactgcctgtttgcaaagtcacagaccttgcctcagaaggagctgtgagccagtattcatttaagaggcaataaggcaaatgccagaattaaaaaaaaaaatcatcaaagacagaaaatgcctgaccaaattctaaaacctaatccatataagtttattcatttaggaatgttcgtttaaattaatctgcagtttttaccaagagctaagccaatatatgtgcttttcaaccagtattgtcacagcatgaaagtcaagtcaggttccagactgttaagaggtgtaatctaatgaagaaatcaattagatgccccgaaatctacagtcgctgaataaccaataaacagtaacctccatcaaatgctataccaatggaccagtgttagtagctgctccctgtattatgtgaacagtcttattctatgtacacagatgtaattaaaattgtaatcctaacaaacaaaagaaatgtagttcagcttttcaatgtttcatgtttgctgtgcttttctgaattttatgttgcattcaaagactgttgtcttgttcttgtggtgtttggattcttgtggtgtgtgcttttagacacagggtagaattagagacaatattggatgtacaattcctcaggagactacagtagtatattctattccttaccagtaataaggttcttcctaataataattaagagattgaaactccaaacaagtattcattatgaacagatacacatcaaaatcataataatattttcaaaacaaggaataatttctctaatggtttattatagaataccaatgtatagcttagaaataaaactttgaatatttcaagaatatagataagtctaatttttaaatgctgtatatatggctttcactcaatcatctctcagatgttgttattaactcgctctgtgttgttgcaaaactttttggtgcagattcgtttccaaaactattgctactttgtgtgctttaaacaaaataccttgggttgatgaaacatcaacccagtgctaggaatactgtgtatctatcattagctatatgggactatattgtagattgtggtttctcagtagagaagtgactgtagtgtgattctagataaatcatcattagcaattcattcagatggtcaataacttgaaatttatagctgtgataggagttcagaaattggcacatccctttaaaaataacaacagaaaatacaactcctgggaaaaaaggtgctgattctataagattatttatatatgtaagtgtttaaaaagattattttccagaaagtttgtgcagggtttaagttgctactattcaactacactatatataaataaaatatatacaatatatacattgttttcactgtatcacattaaagtacttgggcttcagaagtaagagccaaccaactgaaaacctgagatggagatatgttcaaagaatgagatacaattttttagttttcagtttaagtaactctcagcattacaaaagagtaagtatctcacaaataggaaataaaactaaaacgtggatttaaaaagaactgcacgggctttagggtaaatgctcatcttaaacctcactagagggaagtcttctcaagtttcaagcaagaccatttacttaatgtgaagttttggaaagttataaaggtgtatgttttagccatatgattttaattttaattttgcttcttttaggttcgttcttatttaaagcaatatgattgtgtgactccttgtagttacacttgtgtttcaatcagatcagattgttgtatttattccactattttgcatttaaatgataacataaaagatataaaaaatttaaaactgctatttttcttatagaagagaaaatgggtgttggtgattgtattttaattatttaagcgtctctgtttacctgcctaggaaaacattttatggcagtcttatgtgcaaagatcgtaaaaggacaaaaaatttaaactgcttataataatccaggagttgcattatagccagtagtaaaaataataataataataataaaaccatgtctatagctgtagatgggcttcacatctgtaaagcaatcaattgtatatttttgtgatgtgtaccatactgtgtgctccagcaaatgtccatttgtgtaaatgtatttattttatattgtatatattgttaaatgcaaaaaggagatatgattctgtaactccaatcagttcagatgtgtaactcaaattattatgcctttcaggatgatggtagagcaatattaaacaagcttccacttt

SEQ ID NO: 297486 - DNA, 5352 bp, Artificial Sequence
  derived and/or modified sequence
gtgtaagatgtgcaatgttcctgcatgggggttttgtagactttcatagccaaagaaaccggcttcggcttctttaaaatccccgacgactcacctgattaacctgctgcagttctgaccctgccaagagctgacaatttactggttcatcaatgaaacaatattaaattatgaagatgtaaggaaaaaatcctacgctaacactgtcgcagtttgaaagctttaaaaagttgaagtctattggaaaccttcttataagaaaccttcctagtcagagaattcaactttcttcttttcttcattcatgaaaatgcagatccactgagaaagggaataaggcttctctgcagaatgtcaaacaaagatcgacacattgattccagctgttcgtccttcatcaagacggaaccttccagcccagcctccctgacggacagcgtcaaccaccacagccctggtggctcttcagacgccagtgggagctacagttcaaccatgaatggccatcagaacggacttgactcgccacctctctacccttctgctcctatcctgggaggtagtgggcctgtcaggaaactgtatgatgactgctccagcaccattgttgaagatccccagaccaagtgtgaatacatgctcaactcgatgcccaagagactgtgtttagtgtgtggtgacatcgcttctgggtaccactatggggtagcatcatgtgaagcctgcaaggcattcttcaagaggacaattcaaggcaatatagaatacagctgccctgccacgaatgaatgtgaaatcacaaagcgcagacgtaaatcctgccaggcttgccgcttcatgaagtgtttaaaagtgggcatgctgaaagaaggggtgcgtcttgacagagtacgtggaggtcggcagaagtacaagcgcaggatagatgcggagaacagcccatacctgaaccctcagctggttcagccagccaaaaagccatataacaagattgtctcacatttgttggtggctgaaccggagaagatctatgccatgcctgaccctactgtccccgacagtgacatcaaagccctcactacactgtgtgacttggccgaccgagagttggtggttatcattggatgggcgaagcatattccaggcttctccacgctgtccctggcggaccagatgagccttctgcagagtgcttggatggaaattttgatccttggtgtcgtataccggtctctttcgtttgaggatgaacttgtctatgcagacgattatataatggacgaagaccagtccaaattagcaggccttcttgatctaaataatgctatcctgcagctggtaaagaaatacaagagcatgaagctggaaaaagaagaatttgtcaccctcaaagctatagctcttgctaattcagactccatgcacatagaagatgttgaagccgttcagaagcttcaggatgtcttacatgaagcgctgcaggattatgaagctggccagcacatggaagaccctcgtcgagctggcaagatgctgatgacactgccactcctgaggcagacctctaccaaggccgtgcagcatttctacaacatcaaactagaaggcaaagtcccaatgcacaaactttttttggaaatgttggaggccaaggtctgactaaaagctccctgggccttcccatccttcatgttgaaaaagggaaaataaacccaagagtgatgtcgaagaaacttagagtttagttaacaacatcaaaaatcaacagactgcactgataatttagcagcaagactatgaagcagctttcagattcctccataggttcctgatgagtttctttctactttctccatcatcttctttcctctttcttcccacatttctctttctctttattttttctccttttcttctttcacctcccttatttctttgcttctttcattcctagttcccattctcctttattttcttcccgtctgcctgccttctttcttttctttacctactctcattcctctcttttctcatccttccccttttttctaaatttgaaatagctttagtttaaaaaaaaatcctcccttccccctttcctttccctttctttcctttttccctttccttttccctttcctttcctttcctcttgaccttctttccatctttctttttcttccttctgctgctgaacttttaaaagaggtctctaactgaagagagatggaagccagccctgccaaaggatggagatccataatatggatgccagtgaacttattgtgaaccatactgtccccaatgactaaggaatcaaagagagagaaccaacgttcctaaaagtacagtgcaacatatacaaattgactgagtgcagtattagatttcatgggagcagcctctaattagacaacttaagcaacgttgcatcggctgcttcttatcattgcttttccatctagatcagttacagccatttgattccttaattgttttttcaagtcttccaggtatttgttagtttagctactatgtaactttttcagggaatagtttaagctttattcattcatgcaatactaaagagaaataagaatactgcaattttgtgctggctttgaacaattacgaacaataatgaaggacaaatgaatcctgaaggaagatttttaaaaatgttttgtttcttcttacaaatggagatttttttgtaccagctttaccacttttcagccatttattaatatgggaatttaacttactcaagcaatagttgaagggaaggtgcatattatcacggatgcaatttatgttgtgtgccagtctggtcccaaacatcaatttcttaacatgagctccagtttacctaaatgttcactgacacaaaggatgagattacacctacagtgactctgagtagtcacatatataagcactgcacatgagatatagatccgtagaattgtcaggagtgcacctctctacttgggaggtacaattgccatatgatttctagctgccatggtggttaggaatgtgatactgcctgtttgcaaagtcacagaccttgcctcagaaggagctgtgagccagtattcatttaagaggcaataaggcaaatgccagaattaaaaaaaaaaatcatcaaagacagaaaatgcctgaccaaattctaaaacctaatccatataagtttattcatttaggaatgttcgtttaaattaatctgcagtttttaccaagagctaagccaatatatgtgcttttcaaccagtattgtcacagcatgaaagtcaagtcaggttccagactgttaagaggtgtaatctaatgaagaaatcaattagatgccccgaaatctacagtcgctgaataaccaataaacagtaacctccatcaaatgctataccaatggaccagtgttagtagctgctccctgtattatgtgaacagtcttattctatgtacacagatgtaattaaaattgtaatcctaacaaacaaaagaaatgtagttcagcttttcaatgtttcatgtttgctgtgcttttctgaattttatgttgcattcaaagactgttgtcttgttcttgtggtgtttggattcttgtggtgtgtgcttttagacacagggtagaattagagacaatattggatgtacaattcctcaggagactacagtagtatattctattccttaccagtaataaggttcttcctaataataattaagagattgaaactccaaacaagtattcattatgaacagatacacatcaaaatcataataatattttcaaaacaaggaataatttctctaatggtttattatagaataccaatgtatagcttagaaataaaactttgaatatttcaagaatatagataagtctaatttttaaatgctgtatatatggctttcactcaatcatctctcagatgttgttattaactcgctctgtgttgttgcaaaactttttggtgcagattcgtttccaaaactattgctactttgtgtgctttaaacaaaataccttgggttgatgaaacatcaacccagtgctaggaatactgtgtatctatcattagctatatgggactatattgtagattgtggtttctcagtagagaagtgactgtagtgtgattctagataaatcatcattagcaattcattcagatggtcaataacttgaaatttatagctgtgataggagttcagaaattggcacatccctttaaaaataacaacagaaaatacaactcctgggaaaaaaggtgctgattctataagattatttatatatgtaagtgtttaaaaagattattttccagaaagtttgtgcagggtttaagttgctactattcaactacactatatataaataaaatatatacaatatatacattgttttcactgtatcacattaaagtacttgggcttcagaagtaagagccaaccaactgaaaacctgagatggagatatgttcaaagaatgagatacaattttttagttttcagtttaagtaactctcagcattacaaaagagtaagtatctcacaaataggaaataaaactaaaacgtggatttaaaaagaactgcacgggctttagggtaaatgctcatcttaaacctcactagagggaagtcttctcaagtttcaagcaagaccatttacttaatgtgaagttttggaaagttataaaggtgtatgttttagccatatgattttaattttaattttgcttcttttaggttcgttcttatttaaagcaatatgattgtgtgactccttgtagttacacttgtgtttcaatcagatcagattgttgtatttattccactattttgcatttaaatgataacataaaagatataaaaaatttaaaactgctatttttcttatagaagagaaaatgggtgttggtgattgtattttaattatttaagcgtctctgtttacctgcctaggaaaacattttatggcagtcttatgtgcaaagatcgtaaaaggacaaaaaatttaaactgcttataataatccaggagttgcattatagccagtagtaaaaataataataataataataaaaccatgtctatagctgtagatgggcttcacatctgtaaagcaatcaattgtatatttttgtgatgtgtaccatactgtgtgctccagcaaatgtccatttgtgtaaatgtatttattttatattgtatatattgttaaatgcaaaaaggagatatgattctgtaactccaatcagttcagatgtgtaactcaaattattatgcctttcaggatgatggtagagcaatattaaacaagcttccacttttgactgct

SEQ ID NO: 297487 - DNA, 5274 bp, Artificial Sequence
  derived and/or modified sequence
agctgacaatttactggttcatcaatgaaacaatattaaattatgaagatgtaaggaaaaaatcctacgctaacactgtcgcagtttgaaagacttgaatgagacctgcctcatcagtcatgggatcatagtgtcacagatggaaaagcaactatcagctgaattgtactgaactacacacttggctaattcatcttattgctctacacatctaaaggaaggctcattctgttcttggagtctagacagcatcaggagttgggctcaggcttctctgcagaatgtcaaacaaagatcgacacattgattccagctgttcgtccttcatcaagacggaaccttccagcccagcctccctgacggacagcgtcaaccaccacagccctggtggctcttcagacgccagtgggagctacagttcaaccatgaatggccatcagaacggacttgactcgccacctctctacccttctgctcctatcctgggaggtagtgggcctgtcaggaaactgtatgatgactgctccagcaccattgttgaagatccccagaccaagtgtgaatacatgctcaactcgatgcccaagagactgtgtttagtgtgtggtgacatcgcttctgggtaccactatggggtagcatcatgtgaagcctgcaaggcattcttcaagaggacaattcaaggcaatatagaatacagctgccctgccacgaatgaatgtgaaatcacaaagcgcagacgtaaatcctgccaggcttgccgcttcatgaagtgtttaaaagtgggcatgctgaaagaaggggtgcgtcttgacagagtacgtggaggtcggcagaagtacaagcgcaggatagatgcggagaacagcccatacctgaaccctcagctggttcagccagccaaaaagccatataacaagattgtctcacatttgttggtggctgaaccggagaagatctatgccatgcctgaccctactgtccccgacagtgacatcaaagccctcactacactgtgtgacttggccgaccgagagttggtggttatcattggatgggcgaagcatattccaggcttctccacgctgtccctggcggaccagatgagccttctgcagagtgcttggatggaaattttgatccttggtgtcgtataccggtctctttcgtttgaggatgaacttgtctatgcagacgattatataatggacgaagaccagtccaaattagcaggccttcttgatctaaataatgctatcctgcagctggtaaagaaatacaagagcatgaagctggaaaaagaagaatttgtcaccctcaaagctatagctcttgctaattcagactccatgcacatagaagatgttgaagccgttcagaagcttcaggatgtcttacatgaagcgctgcaggattatgaagctggccagcacatggaagaccctcgtcgagctggcaagatgctgatgacactgccactcctgaggcagacctctaccaaggccgtgcagcatttctacaacatcaaactagaaggcaaagtcccaatgcacaaactttttttggaaatgttggaggccaaggtctgactaaaagctccctgggccttcccatccttcatgttgaaaaagggaaaataaacccaagagtgatgtcgaagaaacttagagtttagttaacaacatcaaaaatcaacagactgcactgataatttagcagcaagactatgaagcagctttcagattcctccataggttcctgatgagtttctttctactttctccatcatcttctttcctctttcttcccacatttctctttctctttattttttctccttttcttctttcacctcccttatttctttgcttctttcattcctagttcccattctcctttattttcttcccgtctgcctgccttctttcttttctttacctactctcattcctctcttttctcatccttccccttttttctaaatttgaaatagctttagtttaaaaaaaaatcctcccttccccctttcctttccctttctttcctttttccctttccttttccctttcctttcctttcctcttgaccttctttccatctttctttttcttccttctgctgctgaacttttaaaagaggtctctaactgaagagagatggaagccagccctgccaaaggatggagatccataatatggatgccagtgaacttattgtgaaccatactgtccccaatgactaaggaatcaaagagagagaaccaacgttcctaaaagtacagtgcaacatatacaaattgactgagtgcagtattagatttcatgggagcagcctctaattagacaacttaagcaacgttgcatcggctgcttcttatcattgcttttccatctagatcagttacagccatttgattccttaattgttttttcaagtcttccaggtatttgttagtttagctactatgtaactttttcagggaatagtttaagctttattcattcatgcaatactaaagagaaataagaatactgcaattttgtgctggctttgaacaattacgaacaataatgaaggacaaatgaatcctgaaggaagatttttaaaaatgttttgtttcttcttacaaatggagatttttttgtaccagctttaccacttttcagccatttattaatatgggaatttaacttactcaagcaatagttgaagggaaggtgcatattatcacggatgcaatttatgttgtgtgccagtctggtcccaaacatcaatttcttaacatgagctccagtttacctaaatgttcactgacacaaaggatgagattacacctacagtgactctgagtagtcacatatataagcactgcacatgagatatagatccgtagaattgtcaggagtgcacctctctacttgggaggtacaattgccatatgatttctagctgccatggtggttaggaatgtgatactgcctgtttgcaaagtcacagaccttgcctcagaaggagctgtgagccagtattcatttaagaggcaataaggcaaatgccagaattaaaaaaaaaaatcatcaaagacagaaaatgcctgaccaaattctaaaacctaatccatataagtttattcatttaggaatgttcgtttaaattaatctgcagtttttaccaagagctaagccaatatatgtgcttttcaaccagtattgtcacagcatgaaagtcaagtcaggttccagactgttaagaggtgtaatctaatgaagaaatcaattagatgccccgaaatctacagtcgctgaataaccaataaacagtaacctccatcaaatgctataccaatggaccagtgttagtagctgctccctgtattatgtgaacagtcttattctatgtacacagatgtaattaaaattgtaatcctaacaaacaaaagaaatgtagttcagcttttcaatgtttcatgtttgctgtgcttttctgaattttatgttgcattcaaagactgttgtcttgttcttgtggtgtttggattcttgtggtgtgtgcttttagacacagggtagaattagagacaatattggatgtacaattcctcaggagactacagtagtatattctattccttaccagtaataaggttcttcctaataataattaagagattgaaactccaaacaagtattcattatgaacagatacacatcaaaatcataataatattttcaaaacaaggaataatttctctaatggtttattatagaataccaatgtatagcttagaaataaaactttgaatatttcaagaatatagataagtctaatttttaaatgctgtatatatggctttcactcaatcatctctcagatgttgttattaactcgctctgtgttgttgcaaaactttttggtgcagattcgtttccaaaactattgctactttgtgtgctttaaacaaaataccttgggttgatgaaacatcaacccagtgctaggaatactgtgtatctatcattagctatatgggactatattgtagattgtggtttctcagtagagaagtgactgtagtgtgattctagataaatcatcattagcaattcattcagatggtcaataacttgaaatttatagctgtgataggagttcagaaattggcacatccctttaaaaataacaacagaaaatacaactcctgggaaaaaaggtgctgattctataagattatttatatatgtaagtgtttaaaaagattattttccagaaagtttgtgcagggtttaagttgctactattcaactacactatatataaataaaatatatacaatatatacattgttttcactgtatcacattaaagtacttgggcttcagaagtaagagccaaccaactgaaaacctgagatggagatatgttcaaagaatgagatacaattttttagttttcagtttaagtaactctcagcattacaaaagagtaagtatctcacaaataggaaataaaactaaaacgtggatttaaaaagaactgcacgggctttagggtaaatgctcatcttaaacctcactagagggaagtcttctcaagtttcaagcaagaccatttacttaatgtgaagttttggaaagttataaaggtgtatgttttagccatatgattttaattttaattttgcttcttttaggttcgttcttatttaaagcaatatgattgtgtgactccttgtagttacacttgtgtttcaatcagatcagattgttgtatttattccactattttgcatttaaatgataacataaaagatataaaaaatttaaaactgctatttttcttatagaagagaaaatgggtgttggtgattgtattttaattatttaagcgtctctgtttacctgcctaggaaaacattttatggcagtcttatgtgcaaagatcgtaaaaggacaaaaaatttaaactgcttataataatccaggagttgcattatagccagtagtaaaaataataataataataataaaaccatgtctatagctgtagatgggcttcacatctgtaaagcaatcaattgtatatttttgtgatgtgtaccatactgtgtgctccagcaaatgtccatttgtgtaaatgtatttattttatattgtatatattgttaaatgcaaaaaggagatatgattctgtaactccaatcagttcagatgtgtaactcaaattattatgcctttcaggatgatggtagagcaatattaaacaagcttccacttt

SEQ ID NO: 297488 - DNA, 3015 bp, Artificial Sequence
  derived and/or modified sequence
tgacaatttactggttcatcaatgaaacaatattaaattatgaagatgtaaggaaaaaatcctacgctaacactgtcgcagtttgaaaggtccgtgagagaaaagttaattatgatgttatttcaaactttaaaaagttgaagtctattggaaaccttcttataagaaaccttcctagtcagagaattcaactttcttcttttcttcattcatgaaaatgcagatccactgagaaagggaataaggcttctctgcagaatgtcaaacaaagatcgacacattgattccagctgttcgtccttcatcaagacggaaccttccagcccagcctccctgacggacagcgtcaaccaccacagccctggtggctcttcagacgccagtgggagctacagttcaaccatgaatggccatcagaacggacttgactcgccacctctctacccttctgctcctatcctgggaggtagtgggcctgtcaggaaactgtatgatgactgctccagcaccattgttgaagatccccagaccaagtgtgaatacatgctcaactcgatgcccaagagactgtgtttagtgtgtggtgacatcgcttctgggtaccactatggggtagcatcatgtgaagcctgcaaggcattcttcaagaggacaattcaaggcaatatagaatacagctgccctgccacgaatgaatgtgaaatcacaaagcgcagacgtaaatcctgccaggcttgccgcttcatgaagtgtttaaaagtgggcatgctgaaagaaggggtgcgtcttgacagagtacgtggaggtcggcagaagtacaagcgcaggatagatgcggagaacagcccatacctgaaccctcagctggttcagccagccaaaaagccatataacaagattgtctcacatttgttggtggctgaaccggagaagatctatgccatgcctgaccctactgtccccgacagtgacatcaaagccctcactacactgtgtgacttggccgaccgagagttggtggttatcattggatgggcgaagcatattccaggcttctccacgctgtccctggcggaccagatgagccttctgcagagtgcttggatggaaattttgatccttggtgtcgtataccggtctctttcgtttgaggatgaacttgtctatgcagacgattatataatggacgaagaccagtccaaattagcaggccttcttgatctaaataatgctatcctgcagctggtaaagaaatacaagagcatgaagctggaaaaagaagaatttgtcaccctcaaagctatagctcttgctaattcagactccatgcacatagaagatgttgaagccgttcagaagcttcaggatgtcttacatgaagcgctgcaggattatgaagctggccagcacatggaagaccctcgtcgagctggcaagatgctgatgacactgccactcctgaggcagacctctaccaaggccgtgcagcatttctacaacatcaaactagaaggcaaagtcccaatgcacaaactttttttggaaatgttggaggccaaggtctgactaaaagctccctgggccttcccatccttcatgttgaaaaagggaaaataaacccaagagtgatgtcgaagaaacttagagtttagttaacaacatcaaaaatcaacagactgcactgataatttagcagcaagactatgaagcagctttcagattcctccataggttcctgatgagtttctttctactttctccatcatcttctttcctctttcttcccacatttctctttctctttattttttctccttttcttctttcacctcccttatttctttgcttctttcattcctagttcccattctcctttattttcttcccgtctgcctgccttctttcttttctttacctactctcattcctctcttttctcatccttccccttttttctaaatttgaaatagctttagtttaaaaaaaaatcctcccttccccctttcctttccctttctttcctttttccctttccttttccctttcctttcctttcctcttgaccttctttccatctttctttttcttccttctgctgctgaacttttaaaagaggtctctaactgaagagagatggaagccagccctgccaaaggatggagatccataatatggatgccagtgaacttattgtgaaccatactgtccccaatgactaaggaatcaaagagagagaaccaacgttcctaaaagtacagtgcaacatatacaaattgactgagtgcagtattagatttcatgggagcagcctctaattagacaacttaagcaacgttgcatcggctgcttcttatcattgcttttccatctagatcagttacagccatttgattccttaattgttttttcaagtcttccaggtatttgttagtttagctactatgtaactttttcagggaatagtttaagctttattcattcatgcaatactaaagagaaataagaatactgcaattttgtgctggctttgaacaattacgaacaataatgaaggacaaatgaatcctgaaggaagatttttaaaaatgttttgtttcttcttacaaatggagatttttttgtaccagctttaccacttttcagccatttattaatatgggaatttaacttactcaagcaatagttgaagggaaggtgcatattatcacggatgcaatttatgttgtgtgccagtctggtcccaaacatcaatttcttaacatgagctccagtttacctaaatgttcactgacacaaaggatgagattacacctacagtgactctgagtagtcacatatataagcactgcacatgagatatagatccgtagaattgtcaggagtgcacctctctacttgggaggtacaattgccatatgatttctagctgccatggtggttaggaatgtgatactgcctgtttgcaaagtcacagaccttgcctcagaaggagctgtgagccagtattcatttaag

SEQ ID NO: 297489 - DNA, 5304 bp, Artificial Sequence
  derived and/or modified sequence
gagggcgagggcgggctcctctggaggcggcgggctccaggccgggctccctaaacgggtcagcaattggagcgggaaggccggacagagctgacaatttactggttcatcaatgaaacaatattaaattatgaagatgtaaggaaaaaatcctacgctaacactgtcgcagtttgaaagctttaaaaagttgaagtctattggaaaccttcttataagaaaccttcctagtcagagaattcaactttcttcttttcttcattcatgaaaatgcagatccactgagaaagggaataaggcttctctgcagaatgtcaaacaaagatcgacacattgattccagctgttcgtccttcatcaagacggaaccttccagcccagcctccctgacggacagcgtcaaccaccacagccctggtggctcttcagacgccagtgggagctacagttcaaccatgaatggccatcagaacggacttgactcgccacctctctacccttctgctcctatcctgggaggtagtgggcctgtcaggaaactgtatgatgactgctccagcaccattgttgaagatccccagaccaagtgtgaatacatgctcaactcgatgcccaagagactgtgtttagtgtgtggtgacatcgcttctgggtaccactatggggtagcatcatgtgaagcctgcaaggcattcttcaagaggacaattcaaggcaatatagaatacagctgccctgccacgaatgaatgtgaaatcacaaagcgcagacgtaaatcctgccaggcttgccgcttcatgaagtgtttaaaagtgggcatgctgaaagaaggggtgcgtcttgacagagtacgtggaggtcggcagaagtacaagcgcaggatagatgcggagaacagcccatacctgaaccctcagctggttcagccagccaaaaagccatataacaagattgtctcacatttgttggtggctgaaccggagaagatctatgccatgcctgaccctactgtccccgacagtgacatcaaagccctcactacactgtgtgacttggccgaccgagagttggtggttatcattggatgggcgaagcatattccaggcttctccacgctgtccctggcggaccagatgagccttctgcagagtgcttggatggaaattttgatccttggtgtcgtataccggtctctttcgtttgaggatgaacttgtctatgcagacgattatataatggacgaagaccagtccaaattagcaggccttcttgatctaaataatgctatcctgcagctggtaaagaaatacaagagcatgaagctggaaaaagaagaatttgtcaccctcaaagctatagctcttgctaattcagactccatgcacatagaagatgttgaagccgttcagaagcttcaggatgtcttacatgaagcgctgcaggattatgaagctggccagcacatggaagaccctcgtcgagctggcaagatgctgatgacactgccactcctgaggcagacctctaccaaggccgtgcagcatttctacaacatcaaactagaaggcaaagtcccaatgcacaaactttttttggaaatgttggaggccaaggtctgactaaaagctccctgggccttcccatccttcatgttgaaaaagggaaaataaacccaagagtgatgtcgaagaaacttagagtttagttaacaacatcaaaaatcaacagactgcactgataatttagcagcaagactatgaagcagctttcagattcctccataggttcctgatgagtttctttctactttctccatcatcttctttcctctttcttcccacatttctctttctctttattttttctccttttcttctttcacctcccttatttctttgcttctttcattcctagttcccattctcctttattttcttcccgtctgcctgccttctttcttttctttacctactctcattcctctcttttctcatccttccccttttttctaaatttgaaatagctttagtttaaaaaaaaatcctcccttccccctttcctttccctttctttcctttttccctttccttttccctttcctttcctttcctcttgaccttctttccatctttctttttcttccttctgctgctgaacttttaaaagaggtctctaactgaagagagatggaagccagccctgccaaaggatggagatccataatatggatgccagtgaacttattgtgaaccatactgtccccaatgactaaggaatcaaagagagagaaccaacgttcctaaaagtacagtgcaacatatacaaattgactgagtgcagtattagatttcatgggagcagcctctaattagacaacttaagcaacgttgcatcggctgcttcttatcattgcttttccatctagatcagttacagccatttgattccttaattgttttttcaagtcttccaggtatttgttagtttagctactatgtaactttttcagggaatagtttaagctttattcattcatgcaatactaaagagaaataagaatactgcaattttgtgctggctttgaacaattacgaacaataatgaaggacaaatgaatcctgaaggaagatttttaaaaatgttttgtttcttcttacaaatggagatttttttgtaccagctttaccacttttcagccatttattaatatgggaatttaacttactcaagcaatagttgaagggaaggtgcatattatcacggatgcaatttatgttgtgtgccagtctggtcccaaacatcaatttcttaacatgagctccagtttacctaaatgttcactgacacaaaggatgagattacacctacagtgactctgagtagtcacatatataagcactgcacatgagatatagatccgtagaattgtcaggagtgcacctctctacttgggaggtacaattgccatatgatttctagctgccatggtggttaggaatgtgatactgcctgtttgcaaagtcacagaccttgcctcagaaggagctgtgagccagtattcatttaagaggcaataaggcaaatgccagaattaaaaaaaaaaatcatcaaagacagaaaatgcctgaccaaattctaaaacctaatccatataagtttattcatttaggaatgttcgtttaaattaatctgcagtttttaccaagagctaagccaatatatgtgcttttcaaccagtattgtcacagcatgaaagtcaagtcaggttccagactgttaagaggtgtaatctaatgaagaaatcaattagatgccccgaaatctacagtcgctgaataaccaataaacagtaacctccatcaaatgctataccaatggaccagtgttagtagctgctccctgtattatgtgaacagtcttattctatgtacacagatgtaattaaaattgtaatcctaacaaacaaaagaaatgtagttcagcttttcaatgtttcatgtttgctgtgcttttctgaattttatgttgcattcaaagactgttgtcttgttcttgtggtgtttggattcttgtggtgtgtgcttttagacacagggtagaattagagacaatattggatgtacaattcctcaggagactacagtagtatattctattccttaccagtaataaggttcttcctaataataattaagagattgaaactccaaacaagtattcattatgaacagatacacatcaaaatcataataatattttcaaaacaaggaataatttctctaatggtttattatagaataccaatgtatagcttagaaataaaactttgaatatttcaagaatatagataagtctaatttttaaatgctgtatatatggctttcactcaatcatctctcagatgttgttattaactcgctctgtgttgttgcaaaactttttggtgcagattcgtttccaaaactattgctactttgtgtgctttaaacaaaataccttgggttgatgaaacatcaacccagtgctaggaatactgtgtatctatcattagctatatgggactatattgtagattgtggtttctcagtagagaagtgactgtagtgtgattctagataaatcatcattagcaattcattcagatggtcaataacttgaaatttatagctgtgataggagttcagaaattggcacatccctttaaaaataacaacagaaaatacaactcctgggaaaaaaggtgctgattctataagattatttatatatgtaagtgtttaaaaagattattttccagaaagtttgtgcagggtttaagttgctactattcaactacactatatataaataaaatatatacaatatatacattgttttcactgtatcacattaaagtacttgggcttcagaagtaagagccaaccaactgaaaacctgagatggagatatgttcaaagaatgagatacaattttttagttttcagtttaagtaactctcagcattacaaaagagtaagtatctcacaaataggaaataaaactaaaacgtggatttaaaaagaactgcacgggctttagggtaaatgctcatcttaaacctcactagagggaagtcttctcaagtttcaagcaagaccatttacttaatgtgaagttttggaaagttataaaggtgtatgttttagccatatgattttaattttaattttgcttcttttaggttcgttcttatttaaagcaatatgattgtgtgactccttgtagttacacttgtgtttcaatcagatcagattgttgtatttattccactattttgcatttaaatgataacataaaagatataaaaaatttaaaactgctatttttcttatagaagagaaaatgggtgttggtgattgtattttaattatttaagcgtctctgtttacctgcctaggaaaacattttatggcagtcttatgtgcaaagatcgtaaaaggacaaaaaatttaaactgcttataataatccaggagttgcattatagccagtagtaaaaataataataataataataaaaccatgtctatagctgtagatgggcttcacatctgtaaagcaatcaattgtatatttttgtgatgtgtaccatactgtgtgctccagcaaatgtccatttgtgtaaatgtatttattttatattgtatatattgttaaatgcaaaaaggagatatgattctgtaactccaatcagttcagatgtgtaactcaaattattatgcctttcaggatgatggtagagcaatattaaacaagcttccacttt

SEQ ID NO: 297490 - DNA, 5532 bp, Artificial Sequence
  derived and/or modified sequence
aagtccttgattaggagagtgtgagagctttggtcccaactggctgtgcctataggcttgtcactaggagaacatttgtgttaattgcactgtgctctgtcaaggaaactttgatttatagctggggtgcacaaataatggttgccggtcgcacatggattcggtagaactttgccttcctgaatctttttccctgcactacgaggaagaacttgaatgagacctgcctcatcagtcatgggatcatagtgtcacagatggaaaagcaactatcagctgaattgtactgaactacacacttggctaattcatcttattgctctacacatctaaaggaaggctcattctgttcttggagtctagacagcatcaggagttgggctcagtgaacaaaactttaatgtctagagcatttatgagggttttaatgattggaaaatctatcctgagaatgtggtcaccatatgtgacagccttgctttctatcttgtcttcagtttctggggcttctctgcagaatgtcaaacaaagatcgacacattgattccagctgttcgtccttcatcaagacggaaccttccagcccagcctccctgacggacagcgtcaaccaccacagccctggtggctcttcagacgccagtgggagctacagttcaaccatgaatggccatcagaacggacttgactcgccacctctctacccttctgctcctatcctgggaggtagtgggcctgtcaggaaactgtatgatgactgctccagcaccattgttgaagatccccagaccaagtgtgaatacatgctcaactcgatgcccaagagactgtgtttagtgtgtggtgacatcgcttctgggtaccactatggggtagcatcatgtgaagcctgcaaggcattcttcaagaggacaattcaaggcaatatagaatacagctgccctgccacgaatgaatgtgaaatcacaaagcgcagacgtaaatcctgccaggcttgccgcttcatgaagtgtttaaaagtgggcatgctgaaagaaggggtgcgtcttgacagagtacgtggaggtcggcagaagtacaagcgcaggatagatgcggagaacagcccatacctgaaccctcagctggttcagccagccaaaaagccattgctctggtctgatcctgcagataacaagattgtctcacatttgttggtggctgaaccggagaagatctatgccatgcctgaccctactgtccccgacagtgacatcaaagccctcactacactgtgtgacttggccgaccgagagttggtggttatcattggatgggcgaagcatattccaggcttctccacgctgtccctggcggaccagatgagccttctgcagagtgcttggatggaaattttgatccttggtgtcgtataccggtctctttcgtttgaggatgaacttgtctatgcagacgattatataatggacgaagaccagtccaaattagcaggccttcttgatctaaataatgctatcctgcagctggtaaagaaatacaagagcatgaagctggaaaaagaagaatttgtcaccctcaaagctatagctcttgctaattcagactccatgcacatagaagatgttgaagccgttcagaagcttcaggatgtcttacatgaagcgctgcaggattatgaagctggccagcacatggaagaccctcgtcgagctggcaagatgctgatgacactgccactcctgaggcagacctctaccaaggccgtgcagcatttctacaacatcaaactagaaggcaaagtcccaatgcacaaactttttttggaaatgttggaggccaaggtctgactaaaagctccctgggccttcccatccttcatgttgaaaaagggaaaataaacccaagagtgatgtcgaagaaacttagagtttagttaacaacatcaaaaatcaacagactgcactgataatttagcagcaagactatgaagcagctttcagattcctccataggttcctgatgagtttctttctactttctccatcatcttctttcctctttcttcccacatttctctttctctttattttttctccttttcttctttcacctcccttatttctttgcttctttcattcctagttcccattctcctttattttcttcccgtctgcctgccttctttcttttctttacctactctcattcctctcttttctcatccttccccttttttctaaatttgaaatagctttagtttaaaaaaaaatcctcccttccccctttcctttccctttctttcctttttccctttccttttccctttcctttcctttcctcttgaccttctttccatctttctttttcttccttctgctgctgaacttttaaaagaggtctctaactgaagagagatggaagccagccctgccaaaggatggagatccataatatggatgccagtgaacttattgtgaaccatactgtccccaatgactaaggaatcaaagagagagaaccaacgttcctaaaagtacagtgcaacatatacaaattgactgagtgcagtattagatttcatgggagcagcctctaattagacaacttaagcaacgttgcatcggctgcttcttatcattgcttttccatctagatcagttacagccatttgattccttaattgttttttcaagtcttccaggtatttgttagtttagctactatgtaactttttcagggaatagtttaagctttattcattcatgcaatactaaagagaaataagaatactgcaattttgtgctggctttgaacaattacgaacaataatgaaggacaaatgaatcctgaaggaagatttttaaaaatgttttgtttcttcttacaaatggagatttttttgtaccagctttaccacttttcagccatttattaatatgggaatttaacttactcaagcaatagttgaagggaaggtgcatattatcacggatgcaatttatgttgtgtgccagtctggtcccaaacatcaatttcttaacatgagctccagtttacctaaatgttcactgacacaaaggatgagattacacctacagtgactctgagtagtcacatatataagcactgcacatgagatatagatccgtagaattgtcaggagtgcacctctctacttgggaggtacaattgccatatgatttctagctgccatggtggttaggaatgtgatactgcctgtttgcaaagtcacagaccttgcctcagaaggagctgtgagccagtattcatttaagaggcaataaggcaaatgccagaattaaaaaaaaaaatcatcaaagacagaaaatgcctgaccaaattctaaaacctaatccatataagtttattcatttaggaatgttcgtttaaattaatctgcagtttttaccaagagctaagccaatatatgtgcttttcaaccagtattgtcacagcatgaaagtcaagtcaggttccagactgttaagaggtgtaatctaatgaagaaatcaattagatgccccgaaatctacagtcgctgaataaccaataaacagtaacctccatcaaatgctataccaatggaccagtgttagtagctgctccctgtattatgtgaacagtcttattctatgtacacagatgtaattaaaattgtaatcctaacaaacaaaagaaatgtagttcagcttttcaatgtttcatgtttgctgtgcttttctgaattttatgttgcattcaaagactgttgtcttgttcttgtggtgtttggattcttgtggtgtgtgcttttagacacagggtagaattagagacaatattggatgtacaattcctcaggagactacagtagtatattctattccttaccagtaataaggttcttcctaataataattaagagattgaaactccaaacaagtattcattatgaacagatacacatcaaaatcataataatattttcaaaacaaggaataatttctctaatggtttattatagaataccaatgtatagcttagaaataaaactttgaatatttcaagaatatagataagtctaatttttaaatgctgtatatatggctttcactcaatcatctctcagatgttgttattaactcgctctgtgttgttgcaaaactttttggtgcagattcgtttccaaaactattgctactttgtgtgctttaaacaaaataccttgggttgatgaaacatcaacccagtgctaggaatactgtgtatctatcattagctatatgggactatattgtagattgtggtttctcagtagagaagtgactgtagtgtgattctagataaatcatcattagcaattcattcagatggtcaataacttgaaatttatagctgtgataggagttcagaaattggcacatccctttaaaaataacaacagaaaatacaactcctgggaaaaaaggtgctgattctataagattatttatatatgtaagtgtttaaaaagattattttccagaaagtttgtgcagggtttaagttgctactattcaactacactatatataaataaaatatatacaatatatacattgttttcactgtatcacattaaagtacttgggcttcagaagtaagagccaaccaactgaaaacctgagatggagatatgttcaaagaatgagatacaattttttagttttcagtttaagtaactctcagcattacaaaagagtaagtatctcacaaataggaaataaaactaaaacgtggatttaaaaagaactgcacgggctttagggtaaatgctcatcttaaacctcactagagggaagtcttctcaagtttcaagcaagaccatttacttaatgtgaagttttggaaagttataaaggtgtatgttttagccatatgattttaattttaattttgcttcttttaggttcgttcttatttaaagcaatatgattgtgtgactccttgtagttacacttgtgtttcaatcagatcagattgttgtatttattccactattttgcatttaaatgataacataaaagatataaaaaatttaaaactgctatttttcttatagaagagaaaatgggtgttggtgattgtattttaattatttaagcgtctctgtttacctgcctaggaaaacattttatggcagtcttatgtgcaaagatcgtaaaaggacaaaaaatttaaactgcttataataatccaggagttgcattatagccagtagtaaaaataataataataataataaaaccatgtctatagctgtagatgggcttcacatctgtaaagcaatcaattgtatatttttgtgatgtgtaccatactgtgtgctccagcaaatgtccatttgtgtaaatgtatttattttatattgtatatattgttaaatgcaaaaaggagatatgattctgtaactccaatcagttcagatgtgtaactcaaattattatgcctttcaggatgatggtagagcaatattaaacaagcttccacttt

SEQ ID NO: 297491 - DNA, 583 bp, Artificial Sequence
  derived and/or modified sequence
aactggctgtgcctataggcttgtcactaggagaacatttgtgttaattgcactgtgctctgtcaaggaaactttgatttatagctggggtgcacaaataatggttgccggtcgcacatggattcggtagaactttgccttcctgaatctttttccctgcactacgaggaagatgaacaaaactttaatgtctagagcatttatgagggttttaatgattggaaaatctatcctgagaatgtggtcaccatatgtgacagccttgctttctatcttgtcttcagtttctggggcttctctgcagaatgtcaaacaaagatcgacacattgattccagctgttcgtccttcatcaagacggaaccttccagcccagcctccctgacggacagcgtcaaccaccacagccctggtggctcttcagacgccagtgggagctacagttcaaccatgaatggccatcagaacggacttgactcgccacctctctacccttctgctcctatcctgggaggtagtgggcctgtcaggaaactgtatgatgactgctccagcaccattgttgaagatccccagaccaagtg

SEQ ID NO: 297492 - DNA, 584 bp, Artificial Sequence
  derived and/or modified sequence
tttggtcccaactggctgtgcctataggcttgtcactaggagaacatttgtgttaattgcactgtgctctgtcaaggaaactttgatttatagctggggtgcacaaataatggttgccggtcgcacatggattcggtagaactttgccttcctgaatctttttccctgcactacgaggaagactggacaacacctgataccaacaatataatgtcacctctgctatagatcacccaagaccagctgcatttacatccagatgttaactactgcagactaagctattaagagtttaacaaatacaagcactggctgagcttcagaccttccatcgaaatgcagaccactttgaacatcagcacgtgcatgtgggaattcaaactcctgacggttcattcacgatcacacatttacctggatgcttctctgcagaatgtcaaacaaagatcgacacattgattccagctgttcgtccttcatcaagacggaaccttccagcccagcctccctgacggacagcgtcaaccaccacagccctggtggctcttcagacgccagtgggagctacagttcaaccatgaatg

SEQ ID NO: 297493 - protein, 442 aa, Artificial Sequence
  derived and/or modified sequence
MSNKDRHIDSSCSSFIKTEPSSPASLTDSVNHHSPGGSSDASGSYSSTMNGHQNGLDSPPLYPSAPILGGSGPVRKLYDDCSSTIVEDPQTKCEYMLNSMPKRLCLVCGDIASGYHYGVASCEACKAFFKRTIQGNIEYSCPATNECEITKRRRKSCQACRFMKCLKVGMLKEGVRLDRVRGGRQKYKRRIDAENSPYLNPQLVQPAKKPLLWSDPADNKIVSHLLVAEPEKIYAMPDPTVPDSDIKALTTLCDLADRELVVIIGWAKHIPGFSTLSLADQMSLLQSAWMEILILGVVYRSLSFEDELVYADDYIMDEDQSKLAGLLDLNNAILQLVKKYKSMKLEKEEFVTLKAIALANSDSMHIEDVEAVQKLQDVLHEALQDYEAGQHMEDPRRAGKMLMTLPLLRQTSTKAVQHFYNIKLEGKVPMHKLFLEMLEAKV

SEQ ID NO: 297494 - DNA, 1329 bp, Artificial Sequence
  derived and/or modified sequence
atgtccaacaaggacaggcacattgacagttcttgctcttcctttatcaaaaccgaaccaagctccccagcaagtttaacagattccgtgaatcaccactccccgggtgggtctagcgatgcttctggctcatatagttccacaatgaacggccaccaaaacggcctggacagccccccactgtacccatctgccccaatcctgggtggtagtggcccagtacgaaagctgtatgacgactgctcctccactatcgtggaggacccacagactaagtgcgaatacatgctaaactccatgcctaaaaggctgtgcctcgtctgcggcgacatcgcttctggttaccactatggcgttgcatcctgtgaagcctgcaaagcgttcttcaaaaggaccatccaggggaatatagagtactcgtgtccagctactaatgaatgcgagattacgaaaaggcgaaggaaaagctgccaagcttgcaggtttatgaaatgcctgaaggtaggcatgctgaaagagggggtgcgtctggacagggtgagaggtgggcggcagaagtacaagcgccgtatcgacgcagaaaactcaccttacctgaatcctcagctggtccagccagcaaaaaagcctctcctctggagcgaccctgcggacaacaaaatcgtttcacacctactggtggctgagccagagaagatttatgccatgcctgaccccaccgtgcccgacagtgacattaaagccctgacaacgctttgtgacctggccgaccgcgagctggtggtcataattggctgggccaaacatataccaggtttctccactctcagcttggccgaccagatgtcattgctgcagagtgcatggatggagatcctaatccttggggtcgtgtataggtccttgtctttcgaagatgaactggtgtacgctgatgattacattatggacgaagatcagtccaagctcgccgggctcctggacctgaacaatgccatcctgcagctggttaagaagtacaagtcaatgaagctggaaaaagaagagtttgtcaccttaaaagctattgctttggctaatagcgactccatgcacatcgaggatgtggaagccgtccagaaactgcaggatgttttacacgaagctctgcaggattacgaggccgggcaacacatggaagacccaaggagagccgggaaaatgttgatgacactgcctctcctacggcaaacaagcacaaaagcagtccagcacttttataacatcaaacttgagggaaaggtccctatgcacaaactttttctcgaaatgctggaggctaaagtctag

SEQ ID NO: 297495 - DNA, 1329 bp, Artificial Sequence
  derived and/or modified sequence
atgagcaacaaggacagacacatcgacagcagctgcagcagcttcatcaagacagagcccagcagccctgccagcctgacagattctgtgaaccaccacagccctgggggcagcagtgatgccagcggcagctacagcagcaccatgaatggccaccagaatggcctggacagcccccccctgtaccccagcgcccccatcctgggcggcagcggccctgtgaggaagctgtatgatgactgcagcagcaccatcgtggaggacccccagaccaagtgtgagtacatgctgaacagcatgcccaagaggctgtgcctggtgtgtggggacatcgccagcggctaccactatggagtggccagctgtgaggcctgcaaggccttcttcaagaggaccatccagggcaacatcgagtacagctgcccagccaccaatgaatgtgagatcaccaagagaagaaggaagagctgccaggcctgccgcttcatgaagtgcctgaaggtgggcatgctgaaggagggcgtgcggctggacagagtgcggggcggccggcagaagtacaagagaagaattgatgctgagaacagcccctacctgaacccccagctggtgcagcctgccaagaagcccctgctgtggagcgaccctgctgacaacaagatcgtgagccacctgctggtggccgagcctgagaagatctatgccatgccagaccccaccgtgcctgacagcgacatcaaggccctgaccaccctgtgtgacctggccgaccgggagctggtggtgatcatcggctgggccaagcacatccctggcttcagcaccctgagcctggccgaccagatgagcctgctgcagagcgcctggatggagatcctgatcctgggcgtggtgtaccgcagcctgagctttgaagatgagctggtgtatgcagatgactacatcatggatgaggaccagagcaagctggccggcctgctggacctgaacaatgccatcctgcagctggtgaagaagtacaagtccatgaagctggagaaggaggagtttgtgaccctgaaggccatcgccctggccaacagcgacagcatgcacattgaagatgtggaggccgtgcagaagctgcaggatgtgctgcacgaggccctgcaggactatgaggccggccagcacatggaggacccccggcgggccggcaagatgctgatgaccctgcccctgctgcggcagaccagcaccaaggctgtgcagcacttctacaacatcaagctggagggcaaggtgcccatgcacaagctgttcctggagatgctggaggccaaggtgtag

SEQ ID NO: 297496 - DNA, 1329 bp, Artificial Sequence
  derived and/or modified sequence
atgagcaacaaggaccggcacatcgacagcagctgcagcagcttcattaagacagagcccagctccccagccagtttgacggattctgtaaaccaccattcacccggcggttcctcagatgcgtccggaagttactcttctacaatgaatggccaccaaaatggattagactccccacccttgtatccgagtgcgcccatcttgggcgggtccggcccagtcaggaagctgtacgacgattgcagctccaccatcgttgaggatccccagacaaaatgtgaatacatgctgaactcgatgcccaaacgcctatgcctggtgtgcggggatatcgcctctgggtaccactacggagtcgccagctgcgaggcgtgtaaggcctttttcaagcgaaccattcagggcaatattgagtacagctgccctgccacgaatgagtgtgagattacgaaacgccgccgcaagtcttgccaagcgtgccgtttcatgaagtgtttaaaagtgggcatgttgaaagagggggtgaggctcgaccgggtgcggggaggaagacagaagtacaagcggcgcattgacgcagaaaattcaccctacctcaaccctcagttggtccagcccgctaagaaaccacttctatggtctgatcccgccgataataagattgttagtcatctgcttgtggctgagccggagaagatttatgcaatgcccgacccaaccgtgccggactctgatatcaaggccctgaccactctctgcgatctcgctgatcgcgaactggttgtgatcatcgggtgggcgaagcatatccccggattcagcactctgtctttagcagatcaaatgtcgctactacagagcgcttggatggagatactaatcctgggtgtggtgtacaggagcctctcttttgaggatgaactcgtttacgctgatgactacatcatggatgaagatcaatccaaactggcaggcttgcttgacttgaacaatgcaatcctccagttagtgaaaaaatataaaagtatgaaactcgagaaagaggagtttgtgactcttaaggccatcgcccttgccaattccgatagtatgcacatagaagacgttgaagccgtccagaagttacaggacgttctccacgaggcactgcaggattatgaggctgggcagcacatggaggacccgcgccgcgccggcaaaatgctcatgactctgcccctgctacggcagacttctactaaggctgtgcagcacttctacaatataaaactggaaggaaaggttccaatgcacaagctgttcctcgagatgctggaggcaaaagtctag

SEQ ID NO: 297497 - DNA, 1329 bp, Artificial Sequence
  derived and/or modified sequence
atgagcaacaaggataggcatatagattcctcgtgctcctccttcattaagactgagcctagctcccctgcctcccttacagactctgttaaccatcactcaccagggggttccagcgatgcctcaggctcttactctagcacaatgaacgggcaccagaatgggttggactcgccacctctgtaccctagcgctccgatccttggaggttctggccctgtgcgaaagctgtatgatgattgtagcagcaccatcgtggaggatccacagacaaagtgcgagtatatgctcaattctatgccaaagagactatgtctcgtctgtggcgatattgcctccgggtatcactacggtgtggcgtcctgcgaggcctgcaaagcttttttcaagcggaccatccagggcaatatagaatatagctgccctgctacaaacgaatgtgaaatcaccaaaagacggaggaagtcttgtcaggcatgtaggttcatgaaatgtctgaaggtgggcatgctgaaagagggcgtgcggctggatagagtgcggggtggaaggcaaaagtataaaaggcgcatcgacgccgaaaacagcccctacctgaaccctcaactggtgcagcccgctaagaaacccctcctgtggagcgaccctgccgacaacaaaattgtgtcgcatttactcgtggctgagcccgagaagatctacgcaatgcccgaccctacagtgcctgattcagacattaaagctctgactactctgtgcgatctggccgaccgggaactagttgtgataattggctgggcaaagcacattccgggattcagtaccttaagcctggccgatcagatgtcactgctgcaatctgcttggatggagatcttgatcctgggcgtcgtgtatcggtctttaagctttgaggacgaactggtatatgctgatgactacattatggatgaagatcaatcaaaactagccggattacttgatcttaataacgcaatcctgcagcttgttaagaagtacaagtccatgaagttggagaaagaagagttcgtaacactcaaggccatcgctctggcaaactcggactccatgcacattgaggatgtggaggccgtgcagaagttgcaagacgtactgcacgaggcattgcaggactacgaggctgggcagcacatggaggacccgagacgtgcagggaagatgctgatgacgctgccattattgcgtcagaccagcaccaaggcggtacagcatttttataatattaaattggagggcaaggtaccgatgcataagctctttctcgagatgctggaggcaaaggtgtag

SEQ ID NO: 297498 - DNA, 1329 bp, Artificial Sequence
  derived and/or modified sequence
atgagcaacaaggacagacacatcgacagcagctgcagcagcttcatcaagaccgagcccagcagccccgccagcctgaccgacagcgtgaaccaccacagccccggcggcagcagcgacgccagcggcagctacagcagcaccatgaacggccaccagaacggcctggacagcccccccctgtaccccagcgcccccatcctgggcggcagcggccccgtgagaaagctgtacgacgactgcagcagcaccatcgtggaggacccccagaccaagtgcgagtacatgctgaacagcatgcccaagagactgtgcctggtgtgcggcgacatcgccagcggctaccactacggcgtggccagctgcgaggcctgcaaggccttcttcaagagaaccatccagggcaacatcgagtacagctgccccgccaccaacgagtgcgagatcaccaagagaagaagaaagagctgccaggcctgcagattcatgaagtgcctgaaggtgggcatgctgaaggagggcgtgagactggacagagtgagaggcggcagacagaagtacaagagaagaatcgacgccgagaacagcccctacctgaacccccagctggtgcagcccgccaagaagcccctgctgtggagcgaccccgccgacaacaagatcgtgagccacctgctggtggccgagcccgagaagatctacgccatgcccgaccccaccgtgcccgacagcgacatcaaggccctgaccaccctgtgcgacctggccgacagagagctggtggtgatcatcggctgggccaagcacatccccggcttcagcaccctgagcctggccgaccagatgagcctgctgcagagcgcctggatggagatcctgatcctgggcgtggtgtacagaagcctgagcttcgaggacgagctggtgtacgccgacgactacatcatggacgaggaccagagcaagctggccggcctgctggacctgaacaacgccatcctgcagctggtgaagaagtacaagagcatgaagctggagaaggaggagttcgtgaccctgaaggccatcgccctggccaacagcgacagcatgcacatcgaggacgtggaggccgtgcagaagctgcaggacgtgctgcacgaggccctgcaggactacgaggccggccagcacatggaggaccccagaagagccggcaagatgctgatgaccctgcccctgctgagacagaccagcaccaaggccgtgcagcacttctacaacatcaagctggagggcaaggtgcccatgcacaagctgttcctggagatgctggaggccaaggtgtag

SEQ ID NO: 297499 - protein, 234 aa, Artificial Sequence
  derived and/or modified sequence
MGILSFLPVLATESDWADCKSPQPWGHMLLWTAVLFLAPVAGTPAAPPKAVLKLEPQWINVLQEDSVTLTCRGTHSPESDSIQWFHNGNLIPTHTQPSYRFKANNNDSGEYTCQTGQTSLSDPVHLTVLSEWLVLQTPHLEFQEGETIVLRCHSWKDKPLVKVTFFQNGKSKKFSRSDPNFSIPQANHSHSGDYHCTGNIGYTLYSSKPVTITVQGPRLRTAAKQSSLVGAEVP

SEQ ID NO: 297500 - DNA, 847 bp, Artificial Sequence
  derived and/or modified sequence
tgatgggaatcctgtcattcttacctgtccttgccactgagagtgactgggctgactgcaagtccccccagccttggggtcatatgcttctgtggacagctgtgctattcctggctcctgttgctgggacacctgcagctcccccaaaggctgtgctgaaactcgagccccagtggatcaacgtgctccaggaggactctgtgactctgacatgccgggggactcacagccctgagagcgactccattcagtggttccacaatgggaatctcattcccacccacacgcagcccagctacaggttcaaggccaacaacaatgacagcggggagtacacgtgccagactggccagaccagcctcagcgaccctgtgcatctgactgtgctttctgagtggctggtgctccagacccctcacctggagttccaggagggagaaaccatcgtgctgaggtgccacagctggaaggacaagcctctggtcaaggtcacattcttccagaatggaaaatccaagaaattttcccgttcggatcccaacttctccatcccacaagcaaaccacagtcacagtggtgattaccactgcacaggaaacataggctacacgctgtactcatccaagcctgtgaccatcactgtccaaggccccagactaaggacggcagcgaagcagagctccctcgttggtgcagaggttccctaagctcctgggcattcctaagaactgagctcccagctcttcaccgatggggatcattgtggctgtggtcactgggattgctgtagcggccattgttgctgctgtagtggccttgatctactgcaggaaaaagcggatttcag

SEQ ID NO: 297501 - DNA, 705 bp, Artificial Sequence
  derived and/or modified sequence
atggggattctttcatttctgcctgtcctggctaccgaatcggactgggcagattgcaagagtccccagccatggggacacatgctgctctggactgccgtgctgttcctggctcccgtggctggaacaccagcagctccacctaaagctgtactgaaacttgaacctcagtggataaacgttctgcaagaggattctgttaccctcacttgtaggggaacgcactctcccgaatctgattccattcagtggtttcataatggcaacctgatcccaacccacacacagccctcttatagattcaaagccaacaacaacgatagtggcgagtatacatgtcagacaggacagaccagtctttccgaccctgtgcatttgactgtgctttccgaatggctggttcttcagacccctcacctggaattccaagagggggagactatcgttctgagatgtcatagctggaaggacaaaccactcgtgaaagtcactttctttcagaacggcaagtcaaaaaaattttcgcggtccgaccccaacttttccatacctcaggccaatcattcccactctggtgattatcactgtactgggaacataggatacaccctgtactcaagtaagcccgtgacaattaccgtccaggggcctagattaagaacggcggccaaacagagctcattggtgggggcagaagtgccgtag

SEQ ID NO: 297502 - DNA, 705 bp, Artificial Sequence
  derived and/or modified sequence
atgggcatcctgtccttcctgcctgtgctggccacagaaagtgactgggccgactgcaagagcccccagccctggggccacatgctgctgtggacagctgtgctcttcctggcccctgtggccggcaccccagctgccccacccaaggctgtgctgaagctggagccccagtggatcaacgtgctgcaggaggacagcgtgaccctgacctgccggggcacccacagccctgagagtgacagcatccagtggttccacaatggaaacctgatccccacccacacccagcccagctaccgcttcaaggccaacaacaatgacagcggggagtacacctgccagacaggccagaccagcctgagtgaccctgtgcacctgactgtgctgtctgagtggctggtgctgcagaccccccacctggagttccaggagggggagaccatcgtgctgcgctgccacagctggaaggacaagcccctggtgaaggtgaccttcttccagaatggcaagagcaagaagttcagcagaagtgaccccaacttcagcatcccccaggccaaccacagccacagcggggactaccactgcaccggcaacatcggctacaccctgtacagcagcaagcctgtgaccatcaccgtgcagggcccccggctgaggacagctgccaagcagagcagcctggtgggcgctgaggtgccctag

SEQ ID NO: 297503 - DNA, 705 bp, Artificial Sequence
  derived and/or modified sequence
atgggcatcctgagcttcctgcccgtgctggccaccgagagcgactgggccgactgtaagtcaccgcagccttggggacacatgcttctgtggacagcggtactgttcctggcaccagttgctggtactcccgccgccccacccaaggcagtgttgaaactcgaacctcagtggataaacgtactccaagaggactctgtcacactgacctgtcgtggaacccactcacccgaaagcgattccattcagtggttccacaatgggaatctgatcccgacccacacacagccctcatataggttcaaagccaacaataatgactccggagaatatacctgtcagacaggtcagacatcactatcagatcctgtgcatctgaccgtgctctcggaatggctcgtactacagacaccacacctcgagtttcaggagggtgaaacgatagttctgcgctgtcatagttggaaagacaagcccctagtgaaagtgacattcttccagaacggaaagtccaagaaattcagtaggtctgacccaaactttagcataccccaggccaaccattcccactcgggggattatcactgcacaggcaacattgggtatactctctactccagcaaaccagtgacaattactgtacagggtccaaggctgcgaactgcggccaaacagagctctctcgtcggcgcagaggttccatag

SEQ ID NO: 297504 - DNA, 705 bp, Artificial Sequence
  derived and/or modified sequence
atgggcattctgtctttcttgcccgttcttgccactgaaagcgattgggccgattgcaagagccctcagccttggggccatatgctactctggacagccgtgctgttcttagcacccgttgcgggtacgccggctgccccaccaaaggcagtgctaaaattagagccccagtggattaacgtgttacaggaggatagtgtgacactcacatgccgaggcactcactcgcctgagagcgattctatccaatggttccacaatggtaatctaattcctactcatacacagccttcttaccgctttaaggcgaataacaatgacagtggggagtacacttgtcaaacaggtcagacatcattatccgatcctgtgcacctgaccgtgctgtcagagtggctggttctgcagacaccccacttagagttccaggaaggcgaaaccatcgttctcaggtgccactcatggaaggacaaaccactcgtgaaagtgacgttttttcagaacgggaaatctaaaaaattttcaaggtctgacccaaattttagtatcccccaggctaaccatagtcattccggtgattaccactgtaccggaaacataggatatacgctgtacagttcaaaacccgttacgatcaccgtgcagggcccacggctgaggactgcagcaaaacaaagttccctggtgggagctgaggtcccttag

SEQ ID NO: 297505 - DNA, 705 bp, Artificial Sequence
  derived and/or modified sequence
atgggcatcctgagcttcctgcccgtgctggccaccgagagcgactgggccgactgcaagagcccccagccctggggccacatgctgctgtggaccgccgtgctgttcctggcccccgtggccggcacccccgccgccccccccaaggccgtgctgaagctggagccccagtggatcaacgtgctgcaggaggacagcgtgaccctgacctgcagaggcacccacagccccgagagcgacagcatccagtggttccacaacggcaacctgatccccacccacacccagcccagctacagattcaaggccaacaacaacgacagcggcgagtacacctgccagaccggccagaccagcctgagcgaccccgtgcacctgaccgtgctgagcgagtggctggtgctgcagaccccccacctggagttccaggagggcgagaccatcgtgctgagatgccacagctggaaggacaagcccctggtgaaggtgaccttcttccagaacggcaagagcaagaagttcagcagaagcgaccccaacttcagcatcccccaggccaaccacagccacagcggcgactaccactgcaccggcaacatcggctacaccctgtacagcagcaagcccgtgaccatcaccgtgcagggccccagactgagaaccgccgccaagcagagcagcctggtgggcgccgaggtgccctag

SEQ ID NO: 297506 - DNA, 1275 bp, Artificial Sequence
  derived and/or modified sequence
atggaaagatgtagaatcctgctggaagctgctcggataatcagggagcgcgaggacgagatcgcgacgatggagtgtattaataacgggaagagtatctttgaagcacggttggacatcgacatatcatggcaatgtctggagtattacgcgggcctggccgctagcatggccggcgaacatatacagcttccaggcggaagcttcggctacacccggagagagccattgggagtgtgcgtaggcataggtgcctggaactaccctttccagatcgcaagctggaagtccgccccggctctggcttgcggaaacgctatggtcttcaaaccctcccccttcactcctgtgtctgccctgcttctcgccgaaatctattccgaagctggcgtccctcctgggttattcaacgtggtgcaggggggcgcagccacaggtcagtttctttgtcagcatccagacgtagccaaagtgagctttactgggtccgtccctaccggaatgaaaatcatggagatgtctgcaaagggaatcaagccagtgacattagaactgggaggcaagagccccttgatcatttttagtgactgcgacatgaacaatgctgttaagggcgctctcatggctaacttcctgacccagggccaagtttgttgcaacggcaccagggtcttcgtccagaaggagatcctcgacaagttcactgaggaggtagttaagcagactcaacggattaaaataggcgatcctctgctagaggacacacgaatgggaccactcatcaatcgtccccaccttgagcgtgtactgggcttcgtcaaggttgctaaggaacagggggcgaaagtgttgtgcggaggtgacatttacgtgcccgaggatccaaaactaaaggacggttactacatgagaccctgcgtgcttaccaactgccgcgacgatatgacctgtgtgaaggaggagatcttcggccccgtgatgtctatcctctcttttgatactgaggccgaggtgctggagagagctaatgacaccacttttggtctggccgccggtgtgttcacccgtgatatacaaagggcccatagagtcgtggcagaactccaggccggtacctgctttataaacaattataacgtgtcaccagtagagctgcctttcgggggctataagaagagcggcttcggacgagagaacggtcgtgtaaccatcgagtattactcccagctgaagacagtgtgcgtcgagatgggcgacgtggagagtgccttttag

SEQ ID NO: 297507 - DNA, 1275 bp, Artificial Sequence
  derived and/or modified sequence
atggagcgctgccgcatcctgctggaggccgcccgcatcatccgggagcgggaggatgaaattgccaccatggagtgcatcaacaacgggaagagcatctttgaggcccggctggacatcgacatctcctggcagtgcctggagtactatgccggcctggccgcctccatggccggggagcacatccagctgcccggcggcagctttggctacacccggcgggagcccctgggcgtgtgtgtgggcattggagcctggaactaccccttccagatcgcctcctggaagagcgccccagccctggcctgtggaaatgccatggtgttcaagcccagccccttcacccctgtgtctgccctgctgctggccgagatctacagcgaggccggcgtgcccccaggcctcttcaacgtggtgcagggcggggccgccaccggccagttcctgtgccagcacccagatgtggccaaggtgtccttcaccggctctgtgcccaccggcatgaagatcatggagatgtctgccaagggcatcaagcctgtgaccctggagctgggcggcaagagccccctcatcatcttcagtgactgtgacatgaacaatgctgtgaagggggccctgatggccaacttcctgacccagggccaggtgtgctgcaatggcaccagggtgtttgtgcagaaggagatcctggacaagttcacagaggaggtggtgaagcagacccagaggatcaagattggagaccccctgctggaggacaccaggatgggccccctcatcaaccggccccacctggagcgggtgctgggctttgtgaaggtggccaaggagcagggcgccaaggtgctgtgtggcggggacatctacgtgcctgaggaccccaagctgaaggatggctactacatgaggccctgtgtgctgaccaactgcagagatgacatgacctgtgtgaaggaggagatctttggacctgtgatgagcatcctgagctttgacacagaggccgaggtgctggagcgggccaatgacaccaccttcggcctggccgccggggtcttcacccgggacatccagagggcccaccgggtggtggccgagctgcaggccggcacctgcttcatcaacaactacaacgtgtcccctgtggagctgccctttggaggctacaagaagagcggcttcggccgggagaatggccgggtgaccatcgagtactacagccagctgaagacagtgtgtgtggagatgggagatgtggagagcgccttctag

SEQ ID NO: 297508 - DNA, 1275 bp, Artificial Sequence
  derived and/or modified sequence
atggagcggtgccggatcctgctggaggccgcccggatcatccgggagcgggaggatgagattgccactatggaatgcattaataatgggaagagcatcttcgaggccaggctcgacatcgacatctcctggcagtgcctggagtactatgctggtctcgccgcctcgatggccggagaacacatccaactccccggcggtagtttcggatatacgcgccgtgaaccgttaggagtgtgtgtcggcatcggagcatggaactatccatttcagatcgcctcatggaagagtgccccagcgctggcctgcggaaatgctatggtctttaaaccgtctccttttacccctgtgtcagctcttctcctggctgagatatatagcgaggcaggagttccacccggattatttaacgtggtccagggtggcgccgctactgggcagtttctgtgtcagcatcctgacgtggccaaggtgtcattcaccgggagtgttccaaccggtatgaagattatggagatgagcgccaaagggattaaaccggtcacactcgagttgggtggaaaatcccccctgattatattctcagactgtgatatgaacaacgccgtgaagggggccttaatggccaacttccttactcagggacaggtttgctgtaacgggacaagagtttttgtgcagaaggagatcctcgacaaattcaccgaagaggtggtcaaacaaacccagaggattaagatcggtgacccccttctagaggataccagaatggggcccctcatcaacagacctcacctggagagagtcctgggattcgtaaaggtggccaaagaacagggcgccaaagtgctttgtgggggcgatatctacgtaccagaggacccaaaacttaaagacgggtactatatgcgaccgtgcgtccttactaactgcagagatgacatgacttgtgtaaaggaggagatcttcggacctgtcatgagcattctgtctttcgataccgaagctgaagtgctggagcgggccaacgatacgactttcggactggctgctggcgtctttacgcgcgacattcagagagcacacagagtggtcgcggaacttcaggctgggacttgttttatcaataattataacgtgtctccagtagagttgccttttggtgggtacaagaaaagtggattcgggagagagaatgggcgcgtaactatcgaatactacagtcagctgaaaacggtctgcgttgagatgggcgatgtggagagtgctttttag

SEQ ID NO: 297509 - DNA, 1275 bp, Artificial Sequence
  derived and/or modified sequence
atggagcggtgccgtatcctgctggaggctgcccgaataattcgggagcgcgaggatgagatcgcaactatggagtgtatcaataacggaaagtccatattcgaggccagactggacattgatatctcctggcagtgtcttgaatactatgcaggactcgccgcttcaatggctggcgaacatattcagttgccaggaggtagcttcggttacaccaggagggaacccttaggtgtctgcgttgggataggcgcatggaactacccgtttcagattgctagttggaagtctgctcccgctctggcctgtggcaatgctatggtcttcaaaccttcaccctttacccccgtgtcagcactcctacttgccgagatctacagcgaggctggtgtcccgccaggactgtttaacgtagttcagggaggagccgctaccggacagttcctgtgccagcacccggacgtggccaaggtctcctttacagggagtgtgcctaccgggatgaaaattatggagatgtcagctaaaggtatcaagcctgtgacattggagttggggggtaaaagccctctcatcattttcagcgattgcgacatgaacaacgcagtgaagggagcactcatggccaattttctaactcagggccaggtgtgctgcaatggtacaagggttttcgtccagaaagaaatactggacaagttcactgaggaggtcgtgaagcagacccagcgcataaaaatcggggatcctctgctcgaagatacccgcatgggacccttgattaaccgaccacatctggaaagagtactgggctttgtcaaggttgctaaggaacagggagctaaagtgttgtgtggaggggacatctacgttccagaggatccaaaactgaaggatggctattacatgcggccatgcgtgctgactaactgcagggacgacatgacatgtgtgaaggaagagatttttgggcctgtcatgtccattctgtctttcgacaccgaggctgaagtcctggaacgcgcaaacgacaccaccttcggcctcgcagccggagtgtttactcgagacattcagagagcgcacagagtagtggcagagctgcaggccggaacctgtttcattaataactacaacgtgtcacctgtggaactccccttcggcggttataagaagagtggcttcggcagggaaaatggcagagttaccatcgagtattactcacagttgaagacagtttgcgtggagatgggtgacgttgagtccgccttctag

SEQ ID NO: 297510 - DNA, 1275 bp, Artificial Sequence
  derived and/or modified sequence
atggagagatgcagaatcctgctggaggccgccagaatcatcagagagagagaggacgagatcgccaccatggagtgcatcaacaacggcaagagcatcttcgaggccagactggacatcgacatcagctggcagtgcctggagtactacgccggcctggccgccagcatggccggcgagcacatccagctgcccggcggcagcttcggctacaccagaagagagcccctgggcgtgtgcgtgggcatcggcgcctggaactaccccttccagatcgccagctggaagagcgcccccgccctggcctgcggcaacgccatggtgttcaagcccagccccttcacccccgtgagcgccctgctgctggccgagatctacagcgaggccggcgtgccccccggcctgttcaacgtggtgcagggcggcgccgccaccggccagttcctgtgccagcaccccgacgtggccaaggtgagcttcaccggcagcgtgcccaccggcatgaagatcatggagatgagcgccaagggcatcaagcccgtgaccctggagctgggcggcaagagccccctgatcatcttcagcgactgcgacatgaacaacgccgtgaagggcgccctgatggccaacttcctgacccagggccaggtgtgctgcaacggcaccagagtgttcgtgcagaaggagatcctggacaagttcaccgaggaggtggtgaagcagacccagagaatcaagatcggcgaccccctgctggaggacaccagaatgggccccctgatcaacagaccccacctggagagagtgctgggcttcgtgaaggtggccaaggagcagggcgccaaggtgctgtgcggcggcgacatctacgtgcccgaggaccccaagctgaaggacggctactacatgagaccctgcgtgctgaccaactgcagagacgacatgacctgcgtgaaggaggagatcttcggccccgtgatgagcatcctgagcttcgacaccgaggccgaggtgctggagagagccaacgacaccaccttcggcctggccgccggcgtgttcaccagagacatccagagagcccacagagtggtggccgagctgcaggccggcacctgcttcatcaacaactacaacgtgagccccgtggagctgcccttcggcggctacaagaagagcggcttcggcagagagaacggcagagtgaccatcgagtactacagccagctgaagaccgtgtgcgtggagatgggcgacgtggagagcgccttctag

SEQ ID NO: 297511 - protein, 124 aa, Artificial Sequence
  derived and/or modified sequence
RARIYSPVRSPSARFERLPPRSEDIYADPAAYVMRRSISSPKYDYLGDRRPVPAGLFPYNYPPSPTVHDKMDELLDLQLQRNLEYLDQQVPPYPEVFRDSLHTYKLNEQDTDKLLGKLCEQNKV

SEQ ID NO: 297512 - DNA, 375 bp, Artificial Sequence
  derived and/or modified sequence
agagccagaatctacagccccgtgagaagccccagcgccagattcgagagactgccccccagaagcgaggacatctacgccgaccccgccgcctacgtgatgagaagaagcatcagcagccccaagtacgactacctgggcgacagaagacccgtgcccgccggcctgttcccctacaactacccccccagccccaccgtgcacgacaagatggacgagctgctggacctgcagctgcagagaaacctggagtacctggaccagcaggtgcccccctaccccgaggtgttcagagacagcctgcacacctacaagctgaacgagcaggacaccgacaagctgctgggcaagctgtgcgagcagaacaaggtgtag

SEQ ID NO: 297513 - DNA, 375 bp, Artificial Sequence
  derived and/or modified sequence
cgcgctcggatatacagccctgtacgtagtccttctgcccgcttcgaacggctcccgccacggagcgaggacatatacgcagatcccgccgcttacgtgatgaggagaagcatcagctccccaaagtacgactatttaggagacaggcgacccgtccccgccggcctcttcccatacaactaccccccttcgcctactgtgcatgataagatggatgaactactggacctacagctgcagaggaacctggagtacctggaccagcaggtgcctccctatcccgaggtcttccgggattctttacacacctataaactaaacgaacaggacaccgacaagcttctgggcaagctttgcgaacaaaacaaggtatag

SEQ ID NO: 297514 - DNA, 375 bp, Artificial Sequence
  derived and/or modified sequence
cgggcccgcatctacagccctgtgcgcagccccagcgccaggtttgagcggctgcccccaagaagtgaggacatctatgctgaccctgctgcctacgtgatgagaagaagcatcagcagccccaagtatgactacctgggggacagaagacctgtgcctgctggcctcttcccctacaactacccacccagccccaccgtgcatgacaagatggatgagctgctggacctgcagctgcagaggaacctggagtacctggaccagcaggtgcccccctacccagaggtgttccgggacagcctgcacacctacaagctgaatgagcaggacacagacaagctgctgggcaagctgtgtgagcagaacaaggtgtag

SEQ ID NO: 297515 - DNA, 375 bp, Artificial Sequence
  derived and/or modified sequence
cgggcccggatctacagccccgtgcggagccccagcgcccggttcgagcgacttccgcctcggtccgaggatatctacgcagatccagcggcctatgtgatgcgccgctccatctcttcaccaaagtatgattacttgggcgacaggcgcccagttcccgctgggctcttcccttataactatcctccatcaccaactgtgcatgataaaatggacgaactcctcgacctgcagcttcaacgtaatctggaatacttggaccagcaagtgcccccatacccggaggtcttcagggacagcctgcacacatacaaactgaacgagcaggacaccgacaaactgctcggcaaactgtgcgagcagaataaggtctag

SEQ ID NO: 297516 - DNA, 373 bp, Artificial Sequence
  derived and/or modified sequence
ccgtgcccgcatttactcccctgtccgctcacccagtgcccgttttgagcggctgccacctcgcagtgaggacatctatgctgaccctgctgcctatgtgatgaggcgatccatcagctcccccaagtatgattacctgggagacaggcggccagtccctgcaggactgttcccctacaactacccaccatcccccacggtccacgataagatggatgaacttttagatcttcagttgcaaagaaacctagagtatttggatcagcaggtccctccatacccagaagtgttccgggacagcctccacacctacaagttaaacgagcaagacacagataagctgctgggaaaattgtgtgagcagaacaaggtg

SEQ ID NO: 297517 - DNA, 375 bp, Artificial Sequence
  derived and/or modified sequence
cgtgcgaggatttactctcctgtccgaagcccaagtgccagatttgaacggttaccaccacggagcgaagatatctacgcagatcctgccgcatacgtgatgcggaggtctatctccagtcctaagtatgactaccttggcgacagaaggccagttccagccggattattcccatacaattaccctccatcaccaactgtgcacgataaaatggatgaacttctggacttgcagctccagcggaatcttgaatacctggaccagcaggtgcccccttatcccgaggtcttcagagacagccttcacacctacaaactgaatgaacaagacaccgacaagcttctcggcaaattgtgcgagcaaaacaaagtgtag

SEQ ID NO: 297518 - DNA, 456 bp, Artificial Sequence
  derived and/or modified sequence
agagccagaatctacagccccgtgagaagccccagcgccagattcgagagactgccccccagaagcgaggacatctacgccgaccccgccgcctacgtgatgagaagaagcatcagcagccccaagtacgactacctgggcgacagaagacccgtgcccgccggcctgttcccctacaactacccccccagccccaccgtgcacgacaagatggacgagctgctggacctgcagctgcagagaaacctggagtacctggaccagcagatgagcgagagcgagaccctgatcagcatggtgaacagaatggtggagaacagcagccccagaagccagctgttcatgcaggtgcccccctaccccgaggtgttcagagacagcctgcacacctacaagctgaacgagcaggacaccgacaagctgctgggcaagctgtgcgagcagaacaaggtgtag

SEQ ID NO: 297519 - DNA, 456 bp, Artificial Sequence
  derived and/or modified sequence
cgcgcccgcatctactctccagtgaggagtccttctgctagattcgagcggctgccgccgagatctgaggatatatacgccgaccccgctgcatacgtcatgagaaggagcattagcagcccaaagtacgactatctgggagataggcggccagttcctgcagggcttttcccgtacaactacccaccaagtcccaccgtgcacgataagatggatgaactgctggacctgcagcttcagcgtaatctggagtacctagaccagcagatgtccgagtcagaaaccctgattagcatggttaaccgtatggttgagaatagtagccctagatcgcaactgtttatgcaggtaccaccttaccctgaggtgtttcgtgacagcctgcacacttataagctgaatgaacaggacacagataaactccttggaaagctgtgcgaacagaataaggtgtag

SEQ ID NO: 297520 - DNA, 456 bp, Artificial Sequence
  derived and/or modified sequence
cgggcccgcatctacagccctgtgcgcagccccagcgccaggtttgagcggctgcccccaagaagtgaggacatctatgctgaccctgctgcctacgtgatgagaagaagcatcagcagccccaagtatgactacctgggggacagaagacctgtgcctgctggcctcttcccctacaactacccacccagccccaccgtgcatgacaagatggatgagctgctggacctgcagctgcagaggaacctggagtacctggaccagcagatgtctgagagcgagaccctcatctccatggtgaacaggatggtggagaacagcagccccaggagccagctgttcatgcaggtgcccccctacccagaggtgttccgggacagcctgcacacctacaagctgaatgagcaggacacagacaagctgctgggcaagctgtgtgagcagaacaaggtgtag

SEQ ID NO: 297521 - DNA, 456 bp, Artificial Sequence
  derived and/or modified sequence
cgggcccggatctacagccccgtgcggagccccagcgcccggttcgagcgcctcccacctaggtcagaggacatttatgcagatcctgctgcctatgtcatgaggcgcagcatctccagccctaaatacgactatctgggggatcggagaccagtccccgctggactctttccatataactaccccccaagccctacagtccacgacaaaatggacgaactgcttgatttgcaactccagcggaatctggaatacctggatcagcagatgtcagagtctgaaaccctgatttctatggtcaataggatggtagaaaactccagtcctcgaagtcaacttttcatgcaagtgcccccataccccgaagtctttcgagattctctccatacctataaactcaacgaacaggacaccgataagttactgggcaaactctgtgagcaaaataaagtgtag

SEQ ID NO: 297522 - DNA, 454 bp, Artificial Sequence
  derived and/or modified sequence
ccgtgcccgcatttactcccctgtccgctcacccagtgcccgttttgagcggctgccacctcgcagtgaggacatctatgctgaccctgctgcctatgtgatgaggcgatccatcagctcccccaagtatgattacctgggagacaggcggccagtccctgcaggactgttcccctacaactacccaccatcccccacggtccacgataagatggatgaacttttagatcttcagttgcaaagaaacctagagtatttggatcagcagatgagtgagagcgagactctcatcagtatggtgaaccgcatggtggaaaactcctcccccaggtcccaactcttcatgcaagtccctccatacccagaagtgttccgggacagcctccacacctacaagttaaacgagcaagacacagataagctgctgggaaaattgtgtgagcagaacaaggtg

SEQ ID NO: 297523 - DNA, 456 bp, Artificial Sequence
  derived and/or modified sequence
agagcccgtatctacagtccggtacgctctccctctgccaggttcgagaggctccctccccgttctgaggacatctacgcggaccctgccgcatacgtaatgcgtcgcagtatctcttcccccaaatatgactacctgggagaccggaggcctgtgccagccggtctattcccatataattaccctccttccccaacggtccacgacaagatggacgagctgctcgacctccagttgcagcgcaacctcgaatatctagatcagcagatgtctgaatctgagacactaataagtatggtgaaccgtatggtggagaattcttctcctcgatcacagctgttcatgcaggttcctccctacccagaagtcttcagggactcgcttcatacttacaaactgaatgaacaggataccgacaagttgctcggaaagttgtgtgagcagaataaagtttag

SEQ ID NO: 297524 - protein, 1332 aa, Artificial Sequence
  derived and/or modified sequence
MARQPPPPWVHAAFLLCLLSLGGAIEIPMDLSIETTVTQPPTITKQSAKDHIVDPRDNILIECEAKGNPAPSFHWTRNSRFFNIAKDPRVSMRRRSGTLVIDFRSGGRPEEYEGEYQCFARNKFGTALSNRIRLQVSKSPLWPKENLDPVVVQEGAPLTLQCNPPPGLPSPVIFWMSSSMEPITQDKRVSQGHNGDLYFSNVMLQDMQTDYSCNARFHFTHTIQQKNPFTLKVLTTRGVAERTPSFMYPQGTASSQMVLRGMDLLLECIASGVPTPDIAWYKKGGDLPSDKAKFENFNKALRITNVSEEDSGEYFCLASNKMGSIRHTISVRVKAAPYWLDEPKNLILAPGEDGRLVCRANGNPKPTVQWMVNGEPLQSAPPNPNREVAGDTIIFRDTQISSRAVYQCNTSNEHGYLLANAFVSVLDVPPRMLSPRNQLIRVILYNRTRLDCPFFGSPIPTLRWFKNGQGSNLDGGNYHVYENGSLEIKMIRKEDQGIYTCVATNILGKAENQVRLEVKDPTRIYRMPEDQVARRGTTVQLECRVKHDPSLKLTVSWLKDDEPLYIGNRMKKEDDSLTIFGVAERDQGSYTCVASTELDQDLAKAYLTVLGRPDRPRDLELTDLAERSVRLTWIPGDANNSPITDYVVQFEEDQFQPGVWHDHSKYPGSVNSAVLRLSPYVNYQFRVIAINEVGSSHPSLPSERYRTSGAPPESNPGDVKGEGTRKNNMEITWTPMNATSAFGPNLRYIVKWRRRETREAWNNVTVWGSRYVVGQTPVYVPYEIRVQAENDFGKGPEPESVIGYSGEDYPRAAPTEVKVRVMNSTAISLQWNRVYSDTVQGQLREYRAYYWRESSLLKNLWVSQKRQQASFPGDRLRGVVSRLFPYSNYKLEMVVVNGRGDGPRSETKEFTTPEGVPSAPRRFRVRQPNLETINLEWDHPEHPNGIMIGYTLKYVAFNGTKVGKQIVENFSPNQTKFTVQRTDPVSRYRFTLSARTQVGSGEAVTEESPAPPNEGRCMAAAPGVKGPSVGATGAVSSTDATAIAATTEATTVPIIPTVAPTTIATTTTVATTTTTTAAATTTTESPPTTTSGTKIHESAPDEQSIWNVTVLPNSKWANITWKHNFGPGTDFVVEYIDSNHTKKTVPVKAQAQPIQLTDLYPGMTYTLRVYSRDNEGISSTVITFMTSTAYTNNQADIATQGWFIGLMCAIALLVLILLIVCFIKRSRGGKYPVREKKDVPLGPEDPKEEDGSFDYSDEDNKPLQGSQTSLDGTIKQQESDDSLVDYGEGGEGQFNEDGSFIGQYTVKKDKEETEGNESSEATSPVNAIYSLA

SEQ ID NO: 297525 - DNA, 3999 bp, Artificial Sequence
  derived and/or modified sequence
atggccagacagcccccccccccctgggtgcacgccgccttcctgctgtgcctgctgagcctgggcggcgccatcgagatccccatggacctgagcatcgagaccaccgtgacccagccccccaccatcaccaagcagagcgccaaggaccacatcgtggaccccagagacaacatcctgatcgagtgcgaggccaagggcaaccccgcccccagcttccactggaccagaaacagcagattcttcaacatcgccaaggaccccagagtgagcatgagaagaagaagcggcaccctggtgatcgacttcagaagcggcggcagacccgaggagtacgagggcgagtaccagtgcttcgccagaaacaagttcggcaccgccctgagcaacagaatcagactgcaggtgagcaagagccccctgtggcccaaggagaacctggaccccgtggtggtgcaggagggcgcccccctgaccctgcagtgcaaccccccccccggcctgcccagccccgtgatcttctggatgagcagcagcatggagcccatcacccaggacaagagagtgagccagggccacaacggcgacctgtacttcagcaacgtgatgctgcaggacatgcagaccgactacagctgcaacgccagattccacttcacccacaccatccagcagaagaaccccttcaccctgaaggtgctgaccaccagaggcgtggccgagagaacccccagcttcatgtacccccagggcaccgccagcagccagatggtgctgagaggcatggacctgctgctggagtgcatcgccagcggcgtgcccacccccgacatcgcctggtacaagaagggcggcgacctgcccagcgacaaggccaagttcgagaacttcaacaaggccctgagaatcaccaacgtgagcgaggaggacagcggcgagtacttctgcctggccagcaacaagatgggcagcatcagacacaccatcagcgtgagagtgaaggccgccccctactggctggacgagcccaagaacctgatcctggcccccggcgaggacggcagactggtgtgcagagccaacggcaaccccaagcccaccgtgcagtggatggtgaacggcgagcccctgcagagcgccccccccaaccccaacagagaggtggccggcgacaccatcatcttcagagacacccagatcagcagcagagccgtgtaccagtgcaacaccagcaacgagcacggctacctgctggccaacgccttcgtgagcgtgctggacgtgccccccagaatgctgagccccagaaaccagctgatcagagtgatcctgtacaacagaaccagactggactgccccttcttcggcagccccatccccaccctgagatggttcaagaacggccagggcagcaacctggacggcggcaactaccacgtgtacgagaacggcagcctggagatcaagatgatcagaaaggaggaccagggcatctacacctgcgtggccaccaacatcctgggcaaggccgagaaccaggtgagactggaggtgaaggaccccaccagaatctacagaatgcccgaggaccaggtggccagaagaggcaccaccgtgcagctggagtgcagagtgaagcacgaccccagcctgaagctgaccgtgagctggctgaaggacgacgagcccctgtacatcggcaacagaatgaagaaggaggacgacagcctgaccatcttcggcgtggccgagagagaccagggcagctacacctgcgtggccagcaccgagctggaccaggacctggccaaggcctacctgaccgtgctgggcagacccgacagacccagagacctggagctgaccgacctggccgagagaagcgtgagactgacctggatccccggcgacgccaacaacagccccatcaccgactacgtggtgcagttcgaggaggaccagttccagcccggcgtgtggcacgaccacagcaagtaccccggcagcgtgaacagcgccgtgctgagactgagcccctacgtgaactaccagttcagagtgatcgccatcaacgaggtgggcagcagccaccccagcctgcccagcgagagatacagaaccagcggcgccccccccgagagcaaccccggcgacgtgaagggcgagggcaccagaaagaacaacatggagatcacctggacccccatgaacgccaccagcgccttcggccccaacctgagatacatcgtgaagtggagaagaagagagaccagagaggcctggaacaacgtgaccgtgtggggcagcagatacgtggtgggccagacccccgtgtacgtgccctacgagatcagagtgcaggccgagaacgacttcggcaagggccccgagcccgagagcgtgatcggctacagcggcgaggactaccccagagccgcccccaccgaggtgaaggtgagagtgatgaacagcaccgccatcagcctgcagtggaacagagtgtacagcgacaccgtgcagggccagctgagagagtacagagcctactactggagagagagcagcctgctgaagaacctgtgggtgagccagaagagacagcaggccagcttccccggcgacagactgagaggcgtggtgagcagactgttcccctacagcaactacaagctggagatggtggtggtgaacggcagaggcgacggccccagaagcgagaccaaggagttcaccacccccgagggcgtgcccagcgcccccagaagattcagagtgagacagcccaacctggagaccatcaacctggagtgggaccaccccgagcaccccaacggcatcatgatcggctacaccctgaagtacgtggccttcaacggcaccaaggtgggcaagcagatcgtggagaacttcagccccaaccagaccaagttcaccgtgcagagaaccgaccccgtgagcagatacagattcaccctgagcgccagaacccaggtgggcagcggcgaggccgtgaccgaggagagccccgccccccccaacgagggcagatgcatggccgccgcccccggcgtgaagggccccagcgtgggcgccaccggcgccgtgagcagcaccgacgccaccgccatcgccgccaccaccgaggccaccaccgtgcccatcatccccaccgtggcccccaccaccatcgccaccaccaccaccgtggccaccaccaccaccaccaccgccgccgccaccaccaccaccgagagcccccccaccaccaccagcggcaccaagatccacgagagcgcccccgacgagcagagcatctggaacgtgaccgtgctgcccaacagcaagtgggccaacatcacctggaagcacaacttcggccccggcaccgacttcgtggtggagtacatcgacagcaaccacaccaagaagaccgtgcccgtgaaggcccaggcccagcccatccagctgaccgacctgtaccccggcatgacctacaccctgagagtgtacagcagagacaacgagggcatcagcagcaccgtgatcaccttcatgaccagcaccgcctacaccaacaaccaggccgacatcgccacccagggctggttcatcggcctgatgtgcgccatcgccctgctggtgctgatcctgctgatcgtgtgcttcatcaagagaagcagaggcggcaagtaccccgtgagagagaagaaggacgtgcccctgggccccgaggaccccaaggaggaggacggcagcttcgactacagcgacgaggacaacaagcccctgcagggcagccagaccagcctggacggcaccatcaagcagcaggagagcgacgacagcctggtggactacggcgagggcggcgagggccagttcaacgaggacggcagcttcatcggccagtacaccgtgaagaaggacaaggaggagaccgagggcaacgagagcagcgaggccaccagccccgtgaacgccatctacagcctggcctag

SEQ ID NO: 297526 - DNA, 3999 bp, Artificial Sequence
  derived and/or modified sequence
atggcccgccaaccaccgcctccttgggtccatgccgcttttttgctgtgtctcctgtcactgggaggggcaatagaaattcctatggacctttcaattgagacaactgtcacccagccgcccaccattacaaagcagtctgcaaaggatcatatcgtggacccacgagataacattctgatagaatgcgaggcaaaggggaacccagcaccaagtttccactggacccgcaattctcgcttctttaacatcgctaaagatccccgggtgtccatgcgtcgccgcagtggaaccttagtcatagactttaggtcaggaggtcggccagaggaatacgagggcgagtatcaatgcttcgctcggaacaagtttggcacagccctctccaaccgtattagactgcaggttagcaaaagcccactgtggcccaaggagaacctagacccagtcgtagtgcaggagggcgcccctctaactctgcagtgtaatcccccccctggcttgccaagcccagtaatcttttggatgagctcctctatggagcccatcacccaggataaacgggtgagccagggccacaatggcgacctttacttctcaaacgtaatgctacaggatatgcaaaccgattactcctgtaatgcacgttttcacttcacccacacgattcaacagaaaaatcccttcaccctgaaagtgctgactactaggggcgtggcagaacgaacaccatctttcatgtatcctcagggcacggccagttcccagatggtgcttaggggcatggatttactcctggagtgcattgcctccggagtgcctacgccggacatagcttggtacaagaaaggcggggacctgccatccgacaaagccaagtttgagaacttcaataaggccctgcgcattaccaacgtctcagaggaggattccggcgagtatttctgtctggcttctaacaaaatgggctctatacgccacaccatttcggtgagagtgaaagccgctccttactggctcgacgagcctaaaaacctgatcctcgcacctggggaggatggccgtctagtgtgtcgagccaacggtaatccaaagcccaccgtgcagtggatggtgaacggagaacccctgcagagcgcaccccccaacccaaatcgggaagtggccggcgacacgattattttccgcgacacgcagatttcctcaagagcggtctaccagtgcaacacttccaacgagcatggttatctccttgcaaacgctttcgtttcggtgcttgatgtccctcctcggatgttgtcgccacgtaaccagctgattagggtaattctgtacaatcggacaagattagactgtccctttttcggatcgccaatcccgactttgcgctggtttaagaacggacagggctcaaacctggatggtggtaattatcacgtgtatgaaaatgggtcgcttgaaatcaaaatgattcgcaaggaggatcaaggcatctatacttgcgtggccacaaatatcttaggcaaggccgagaatcaggttcgccttgaagtgaaagacccaactcgaatttatagaatgcctgaagatcaggtcgctcggcgcggcaccaccgtgcaactcgagtgtagggttaaacacgacccgagtcttaagctgactgtgagctggctgaaggacgatgaaccactttacattggcaacaggatgaagaaagaagacgacagcctgacaatatttggagtggctgaacgggatcagggctcctacacatgcgttgcctccacagaattagaccaggacctggctaaagcctacctgactgtcctgggtagacctgaccgccccagagatctcgagctgactgatctggctgaaaggtcagtgcgactgacctggatcccgggcgacgctaataactccccaatcacggattatgtcgttcagttcgaggaggaccagttccagccgggggtatggcacgatcacagtaagtatcctggtagcgttaattccgctgttctgaggctgtcaccatacgtgaattaccagttccgagtgattgctattaacgaggtcggctcctcacatccctcattgccttccgagagataccggacatcgggagctccgcctgaaagtaatcccggcgacgttaagggtgaagggacacgaaaaaacaacatggagattacttggaccccaatgaatgccacatccgctttcggacccaacctcagatacattgtgaagtggagacggcgagaaacccgagaagcatggaacaacgtgaccgtctggggcagcaggtacgtcgtcggccagacacccgtgtacgtcccttatgaaattcgcgtccaggcagagaacgacttcggtaagggtccggagccagagagtgtgattggatattcaggtgaggattaccctcgggccgccccaacagaggtgaaagtacgggtgatgaactccacagccatctcactccagtggaatagggtgtattctgacaccgtacagggacagctgcgcgaatacagagcctactattggcgggagtcctcgctcctgaaaaatctgtgggtgagccagaaaagacagcaagctagttttcctggcgacaggctgcggggtgtcgtgtcaagattgttcccctacagcaactataaacttgaaatggtggtggttaacgggcggggggatgggccaagatcggagacaaaggagtttaccacccccgagggcgttccctccgctccgagacgcttcagggtgcgtcagcccaatctcgagaccatcaaccttgaatgggatcaccctgagcaccctaatggaattatgatcggctatactcttaaatatgttgctttcaacggcaccaaagttggaaagcagatcgtggagaacttttcccccaatcagacgaagtttacagtgcagcgaacagacccagttagccgctatcgctttaccttgagcgccaggacacaggtgggctccggggaggccgtgacagaggaatcccccgcaccacctaatgagggccggtgtatggctgcagctcctggtgtgaaaggacctagcgtcggggctaccggtgctgtctcatctaccgatgccaccgctatagcggccacgaccgaggctaccaccgtaccaatcatcccaacagtagcgcccacgactatcgctaccaccactaccgttgccactacaactacaacaacagcagccgcaacgactacaaccgagagcccacccactaccaccagcggaactaaaatacacgagagtgcccctgacgaacaatctatctggaacgtgacagtgctgcctaattctaagtgggccaacattacctggaagcacaatttcgggcccggcacagacttcgtagtggagtacattgatagtaatcacaccaaaaaaactgtcccagtgaaggcccaagcccagcctatacagctgaccgatctgtacccaggcatgacatatacacttagggtgtacagcagggataacgaaggaatttcctcaaccgtaatcaccttcatgacctccaccgcttacaccaacaaccaggcagatatcgctacccaggggtggtttatcggccttatgtgcgcaatagcattactcgtcctgatactcctgatcgtatgtttcattaagcggagccgcggagggaagtatcctgtccgcgagaagaaggacgtccctctgggtcccgaggatcctaaggaggaggacggatcctttgactactccgatgaagataacaaacctctgcagggaagtcagacttccttggatggaacaattaaacagcaggagtccgacgactcgctggtcgattacggagagggaggcgaaggacagtttaatgaagatggctcctttatcggccagtatacagttaaaaaagataaggaggagactgaagggaacgagtcttctgaagccacgagcccggtgaacgctatttattccctggcatag

SEQ ID NO: 297527 - DNA, 3999 bp, Artificial Sequence
  derived and/or modified sequence
atggcccggcagcccccaccaccctgggtgcacgccgccttcctgctgtgcctgctgagcctgggcggggccatcgagatccccatggacctgagcattgagaccaccgtgacccagccccccaccatcaccaagcagagcgccaaggaccacatcgtggacccccgggacaacatcctgattgaatgtgaggccaagggcaacccagcccccagcttccactggaccaggaacagccgcttcttcaacatcgccaaggacccccgggtgtccatgagaagaagaagtggcaccctggtgattgacttccgcagcggcggccggcctgaggagtatgaaggagagtaccagtgctttgccaggaacaagtttggaacagccctgagcaaccgcatccggctgcaggtgtccaagagccccctgtggcccaaggagaacctggaccctgtggtggtgcaggagggcgcccccctgaccctgcagtgcaaccccccacctggcctgcccagccctgtgatcttctggatgagcagctccatggagcccatcacccaggacaagagggtgtcccagggccacaacggggacctgtacttcagcaatgtgatgctgcaggacatgcagacagactacagctgcaatgcccgcttccacttcacccacaccatccagcagaagaaccccttcaccctgaaggtgctgaccacccggggcgtggccgagaggacccccagcttcatgtacccccagggcacagccagcagccagatggtgctgcggggcatggacctgctgctggagtgcatcgccagcggcgtgcccaccccagacatcgcctggtacaagaagggcggggacctgcccagcgacaaggccaagtttgagaacttcaacaaggccctgcgcatcaccaacgtgtctgaagaagattctggagagtacttctgcctggccagcaacaagatgggcagcatccgccacaccatctctgtgcgggtgaaggccgccccctactggctggatgagcccaagaacctgatcctggcccctggagaagatggccgcctggtgtgccgggccaatggaaaccccaagcccaccgtgcagtggatggtgaatggagagcccctgcagagcgccccacccaaccccaaccgggaggtggccggggacaccatcatcttccgggacacccagatcagcagcagagctgtgtaccagtgcaacaccagcaatgagcacggctacctgctggccaatgcctttgtgtctgtgctggatgtgccccccaggatgctgagccccaggaaccagctgatccgggtcatcctgtacaacagaacccggctggactgccccttcttcggcagccccatccccaccctgcgctggttcaagaatggccagggcagcaacctggatggcggcaactaccacgtgtatgaaaatggcagcctggagatcaagatgatcaggaaggaggaccagggcatctacacctgtgtggccaccaacatcctgggcaaggccgagaaccaggtgcggctggaggtgaaggaccccacccgcatctacaggatgcctgaggaccaggtggcccggcggggcaccaccgtgcagctggagtgccgggtgaagcatgaccccagcctgaagctgactgtgtcctggctgaaggatgatgagcccctgtacatcggcaacaggatgaagaaggaggatgacagcctgaccatcttcggcgtggccgagcgggaccagggcagctacacctgtgtggccagcacagagctggaccaggacctggccaaggcctacctgactgtgctgggccgcccagaccggccccgggacctggagctgacagacctggccgagaggtctgtgcggctgacctggatccctggagatgccaacaacagccccatcacagattatgtggtgcagtttgaggaggaccagttccagcccggggtgtggcatgaccacagcaagtacccaggctctgtgaacagcgctgtgctgcggctgagcccctacgtgaactaccagttccgggtcatcgccatcaatgaggtgggcagcagccaccccagcctgcccagcgagcgctaccgcaccagcggggcccctcctgagagcaaccctggagatgtgaagggggagggcaccaggaagaacaacatggagatcacctggacccccatgaatgccaccagcgccttcggccccaacctgcgctacatcgtgaagtggaggcggcgggagacccgggaggcctggaacaacgtgacagtgtggggcagccgctacgtggtgggccagacccctgtgtatgtgccctatgagatccgggtgcaggctgaaaatgactttgggaagggccctgagcctgagagcgtcatcggctacagcggggaggactacccccgggccgcccccacagaggtgaaggtgcgggtgatgaacagcacagccatcagcctgcagtggaacagagtgtacagcgacacagtgcagggccagctgcgggagtaccgggcctactactggagggagagcagcctgctgaagaacctgtgggtgtcccagaagaggcagcaggccagcttccctggggaccggctgcggggcgtggtgagccgcctcttcccctacagcaactacaagctggagatggtggtggtgaatggaagaggagatggccccaggtctgagaccaaggagttcaccaccccagagggcgtgcccagcgccccccggcgcttccgggtgcggcagcccaacctggagaccatcaacctggagtgggaccaccctgagcaccccaacggcatcatgattggctacaccctgaagtatgtggccttcaacggcaccaaggtgggcaagcagatcgtggagaacttcagccccaaccagaccaagttcaccgtgcagaggacagatcctgtgagccgctaccgcttcaccctgagcgcccggacccaggtgggcagcggggaggccgtgacagaggagagccctgcccccccaaatgaaggccgctgcatggccgccgcccctggggtgaagggccccagcgtgggcgccaccggggctgtgagcagcacagatgccacagccatcgccgccaccacagaggccaccaccgtgcccatcatccccaccgtggcccccaccaccatcgccaccaccaccaccgtggccaccaccaccaccaccacagctgctgccaccaccaccacagagagcccccccaccaccaccagcggcaccaagatccacgagagcgccccagatgagcagagcatctggaatgtgacagtgctgcccaacagcaagtgggccaacatcacctggaagcacaactttggacctggaacagactttgtggtggagtacatcgacagcaaccacaccaagaagacagtgcctgtgaaggcccaggcccagcccatccagctgacagacctgtacccaggcatgacctacaccctgcgggtgtacagccgggacaatgaaggcatcagcagcaccgtcatcaccttcatgaccagcacagcctacaccaacaaccaggccgacatcgccacccagggctggttcatcggcctgatgtgtgccatcgccctgctggtgctgatcctgctgattgtgtgcttcatcaagaggagccggggcggcaagtaccctgtgcgggagaagaaggatgtgcccctgggccctgaggaccccaaggaggaggatggcagctttgactacagtgatgaggacaacaagcccctgcagggcagccagaccagcctggatggcaccatcaagcagcaggagagtgatgacagcctggtggactatggagagggcggggagggccagttcaatgaagatggcagcttcatcggccagtacacagtgaagaaggacaaggaggagacagagggcaatgaatcttctgaggccaccagccctgtgaatgccatctacagcctggcctag

SEQ ID NO: 297528 - DNA, 3999 bp, Artificial Sequence
  derived and/or modified sequence
atggcccggcagcccccccccccctgggtgcacgccgccttcctgttgtgtttgctgagccttggcggcgcaatagagatccctatggacctgtctattgaaacaactgtaacacagccaccaactatcaccaagcaaagtgccaaggaccacatcgttgatcctcgggataacattcttatcgaatgcgaggccaaaggaaatcctgccccgagctttcattggaccagaaacagccgattcttcaacattgccaaagatccacgggtaagtatgcgcaggagatcaggaacactcgtgatcgactttcggtctggggggcgacctgaagagtatgagggtgagtaccagtgcttcgcgcgcaacaagttcgggacagcattgtcaaacaggattcggctccaggtaagcaagtcacctctctggcctaaggaaaatctggaccctgtggtcgtgcaggaaggcgcaccattgacgttacagtgtaacccacctcccggacttccttccccagtcattttttggatgagttcctccatggaaccaattactcaggacaagcgagtgtcacagggacataatggtgacctctacttctctaatgtgatgctgcaagacatgcagaccgactactcttgtaatgccaggtttcacttcacccataccatccagcagaaaaatccttttactctgaaggtgttaactacaaggggcgtggcggagcggaccccctctttcatgtacccacaaggtaccgcttccagccagatggtgcttcggggcatggacctactcctcgagtgcattgctagtggggttcccacacccgatattgcatggtacaagaagggaggtgacctgccatccgacaaagcgaagtttgaaaattttaataaagcccttagaatcaccaatgtgtccgaagaagactctggtgaatatttttgcctcgcgagtaacaaaatgggctccatcaggcatactatcagtgtgcgagttaaagccgccccctattggctagatgagcctaagaatttgatattggcacccggagaggatggccgactggtgtgccgggctaacggcaaccccaagccaactgtgcagtggatggtcaacggggagccactgcaaagtgcgccgccaaaccctaaccgcgaagtcgcaggggacactattatctttagagatacccagatttcatctagggcagtgtaccagtgtaatacttccaacgaacatggatacttgcttgcgaacgccttcgtcagcgttctggacgtgccaccaagaatgctatcgccacgcaaccagctgatcagggtgatcctttacaatcgcacccggcttgattgtccctttttcgggagtcctatccctaccttgcgttggtttaagaatggccagggctcaaacttagatggcggcaattaccatgtgtacgagaatgggtctcttgaaataaagatgatccgcaaggaagatcaagggatctatacctgcgtggccactaatatcttaggcaaggccgagaaccaggtgagactggaggtgaaagatccaaccagaatttacaggatgcccgaagatcaagttgctcgccgtggcacaactgtgcaactcgagtgtcgcgtgaaacacgacccttccctgaagctgaccgtatcctggttgaaggatgacgagccactgtatatcgggaaccgaatgaagaaagaggacgattcactgaccattttcggcgtggctgagagggatcagggaagttacacctgcgtggctagcacagagttggatcaggatctggccaaggcttatctgaccgtgctcggtaggcccgaccggcctagagacttggagctcaccgatctcgctgagagatcagtcaggttgacgtggatccctggagatgcaaataattctccgattaccgattatgttgtgcagtttgaagaggatcaatttcagcctggggtatggcatgaccacagcaaatacccagggtccgtcaattctgctgtgctacgcctctccccatacgtcaattaccagtttcgagttattgccattaatgaagtcggctccagccaccctagcctgcctagcgaacgatataggactagcggcgctccacccgagagtaatccgggcgacgtgaaaggcgaaggaactagaaagaacaatatggaaatcacttggaccccaatgaacgccacctccgcatttgggccgaatctgcggtatatcgtcaaatggaggcgaagagagactcgtgaagcctggaacaacgtgaccgtctgggggtctcggtacgtcgtgggacagaccccagtttacgtgccgtacgagatccgagttcaagctgaaaatgatttcggcaaaggccccgagccagagagtgtcatcgggtattctggcgaagattaccctcgggctgctcccaccgaagttaaggtccgcgtgatgaatagcactgccatttccttacaatggaatagggtatactctgacactgtccaagggcagctgcgtgaatatagagcatattactggagagaaagctccctgctgaagaacctctgggtctcccaaaaaaggcagcaggcctcttttccaggagaccgcctcagaggcgtcgtgtctagattgttcccgtactccaactataagctcgaaatggtggtagtcaacgggcgcggcgatggtcccaggtccgaaaccaaagaattcaccacacccgaaggggtcccatctgccccacgtcgctttcgagtgcgccagccaaatctcgagacaatcaatctggaatgggatcatccagagcatcctaatggcatcatgataggttacactctgaagtatgtggcattcaatgggacaaaggtaggtaagcaaatcgtggagaatttctcccctaaccaaactaagtttactgttcaaagaacggacccagtgtcgcgctaccggtttaccttaagcgcccgtacacaggtgggcagcggcgaggcagtgaccgaagagtccccggcacctcccaatgagggtagatgcatggctgctgcccctggcgtcaagggccctagcgttggcgctactggtgctgtatcctcaaccgacgctaccgccatagcagcaaccaccgaggctacaacagtgccaatcattccgacagttgcccccactaccattgcaacgactacaacagtcgccacgaccacaactacaaccgccgccgcaaccacaacaactgaaagccccccaacgacaacttccggcaccaaaattcatgagagtgctccggatgaacagtcgatttggaatgtgacagtgttgccgaatagtaaatgggcgaacattacttggaagcacaacttcgggcctggcacagatttcgtcgtggagtacattgacagcaatcacacaaagaagacggtacccgtcaaagctcaggctcagcccatccagctaactgatctttatcctggaatgacctatactctgagggtgtactctcgcgataacgagggaataagcagtaccgtgatcaccttcatgactagcacggcctacacaaacaaccaggctgatattgcaacccaggggtggttcattggcctcatgtgtgcgattgcactactggttcttatcctgcttatcgtgtgttttattaagcggagccgtgggggcaagtatcccgttagggagaagaaggacgtacctctgggacccgaggatcccaaagaagaggacggctccttcgactacagtgacgaggataacaaaccactacagggatctcaaacctcactggatgggacaataaagcagcaagaatccgatgactccctagttgactatggcgaagggggtgaggggcaattcaacgaagacgggagttttattggtcagtacaccgtaaaaaaagacaaggaggaaactgaaggaaacgagagctcagaggccaccagtcctgtaaatgccatctactctcttgcctag

SEQ ID NO: 297529 - DNA, 3999 bp, Artificial Sequence
  derived and/or modified sequence
atggcccgacagcctcccccaccgtgggtgcacgctgcgttcctcctgtgtctgctgtcccttggcggagcaattgagatacctatggatttgagcattgagactaccgtcacacaacctcctactattacaaaacagtctgccaaggatcatattgtcgaccctcgagacaacatactgatcgagtgcgaggcaaagggcaatcctgcccctagcttccactggactagaaattcccgatttttcaacattgccaaagacccccgtgtttctatgaggcggagaagcggcactctggttattgatttcagaagcggaggacgaccggaagagtacgagggtgaataccagtgttttgctcggaacaagttcggcactgccttgtctaaccgcattcggctccaagtctcaaagagccctctttggccaaaggaaaacttggatcccgtggtcgttcaagaaggagccccattgaccctacagtgtaacccgccacccggactgcctagtccggtaatcttttggatgtcatccagcatggaaccaattacccaggataagcgggtcagccagggacataacggggacctctatttttccaacgtcatgttgcaagatatgcaaactgactacagttgtaatgctcgttttcatttcactcacacaatacagcagaagaatccctttaccctgaaagtgttgactactaggggagtggccgagagaacaccatcgtttatgtaccctcagggaactgcctcaagccagatggttctgagaggcatggatcttcttttggagtgtatcgcaagtggtgtccctacacccgatatcgcctggtacaaaaaggggggtgatctcccctccgacaaggcaaagtttgaaaactttaacaaagcgctcaggatcactaacgtctcggaggaggactctggcgagtacttctgcctggcctccaataaaatgggctccattcgacacactatttccgtaagggtgaaagctgccccttattggctcgatgaaccaaaaaacctcatccttgcgccaggcgaggatggcaggctagtctgtagagccaacggtaaccccaaacccaccgtgcagtggatggtaaacggagaacctctgcaatctgcgcctcccaacccaaatcgcgaggtagccggagataccataatcttcagggacacgcagatttcttcgagagcagtgtaccagtgtaacaccagcaacgagcatggatatttgctagctaatgcatttgtgtcggtactagatgtaccacccagaatgctcagcccacggaaccagctcataagagttattctgtataataggactcgactggattgtccgttttttggtagtccgataccaacgctgagatggtttaagaacgggcaggggagcaacttggacggtggaaattaccacgtgtatgaaaacggctctctggagatcaaaatgatcagaaaagaagatcaggggatatatacttgtgtggcaacaaacatcttagggaaagctgaaaatcaggtcagactggaagtcaaagatccaacaagaatatatcgtatgcctgaagaccaggtggcccgacggggtaccacagtgcagctggaatgccgggtcaaacacgacccgagcctgaaactaacagtcagttggctaaaggacgacgagcctctgtacatcggaaaccgcatgaaaaaggaggacgattctttgaccattttcggtgtcgctgaacgcgatcagggaagctacacctgtgttgcgagcacagaattggatcaggacctggctaaggcgtatctgaccgtcctggggagacccgacaggccacgggatctcgagctgaccgacctcgcagaaaggagtgtgaggcttacctggattccaggcgacgctaacaattctcccatcaccgattatgttgtgcaattcgaagaagaccagttccagcctggcgtctggcatgaccatagtaaataccccggaagcgtgaattcggctgtccttcggctttcaccgtatgtgaactatcagtttagggttatcgccatcaatgaagtgggcagttcccacccttcgctgccgtctgagagataccgaaccagcggggctcccccagagtccaatcccggagacgtgaagggagaaggaacccgcaagaacaacatggagatcacgtggaccccaatgaacgccacgagcgccttcggcccaaatctccggtatatcgtgaaatggagacgcagggaaacccgcgaggcgtggaataatgtgactgtttggggtagtcggtatgtcgtcggccagactcccgtctacgtgccatatgaaatcagagtacaggccgagaacgacttcggcaagggaccagagcctgaaagcgtcataggctactcaggcgaagattaccccagagccgctcctaccgaggtgaaggtccgggtgatgaattcgaccgctatctccctgcagtggaaccgggtttactccgataccgtgcagggtcagcttagggaatatagagcctattattggcgggagtcctctctgctgaagaacctatgggtctctcaaaagcgccagcaggcgtcttttcctggcgatcgactcaggggagtggtctctaggctcttcccttattccaactacaagctcgagatggtggtcgtgaatggcaggggagacggcccacggtccgaaaccaaagagtttacaacccccgagggcgtgccctctgccccacgtcggttccgcgtccggcagcccaatctcgagactattaatctcgagtgggatcaccctgagcaccctaatggaattatgatagggtatacactgaaatacgtcgctttcaacggcactaaggtgggcaaacagatcgtggaaaacttttcccctaatcagactaagtttaccgtgcagaggacagacccagtgtcaaggtacagattcaccctttccgcaagaactcaggtcggctccggagaggctgtaacagaagaatcaccagctccccctaatgaggggaggtgtatggccgctgcacccggagtaaaggggccttccgtcggggctacaggtgccgtcagcagcaccgacgccaccgctatagccgctactactgaagctaccaccgtacccatcatcccaaccgtggctccgactacaattgctaccaccacaacagttgcaaccactaccactaccactgccgcagcgaccaccactacagaaagtccgcctactacaacttcggggacaaagatccatgagagcgctcctgatgagcaatcaatatggaatgtgaccgtgctgccgaattccaagtgggccaacatcacgtggaagcataacttcgggcctggtactgatttcgtagttgaatacattgactcaaatcatactaaaaaaacggtgcctgtgaaagctcaggctcaaccgattcaattaacggatctttacccgggtatgacttacacactcagagtctactcccgcgacaacgagggcatatctagtacagtgattaccttcatgacttctacagcctatacgaacaaccaggcggatatcgctacgcagggctggtttattggactcatgtgcgcaatcgcactgctggttctgatactcctcatagtatgctttataaaaaggagccgtggtggtaaataccccgtacgggaaaagaaagatgtgcctcttgggcctgaagatcccaaggaggaagatggctctttcgactatagcgatgaggataataagcccctgcaaggttctcagacctccctggacggcactatcaagcagcaggagagcgatgactcactggtcgattacggcgagggtggggagggtcagttcaatgaggatggaagctttatcggccagtatacagtgaaaaaagataaagaggaaacagaaggcaacgagtcaagcgaagccacttccccggtcaatgccatctactctttggcctag

SEQ ID NO: 297530 - protein, 1347 aa, Artificial Sequence
  derived and/or modified sequence
MARQPPPPWVHAAFLLCLLSLGGAIEIPMDPNPQHRLTQPPTITKQSAKDHIVDPRDNILIECEAKGNPAPSFHWTRNSRFFNIAKDPRVSMRRRSGTLVIDFRSGGRPEEYEGEYQCFARNKFGTALSNRIRLQVSKSPLWPKENLDPVVVQEGAPLTLQCNPPPGLPSPVIFWMSSSMEPITQDKRVSQGHNGDLYFSNVMLQDMQTDYSCNARFHFTHTIQQKNPFTLKVLTTRGVAERTPSFMYPQGTASSQMVLRGMDLLLECIASGVPTPDIAWYKKGGDLPSDKAKFENFNKALRITNVSEEDSGEYFCLASNKMGSIRHTISVRVKAAPYWLDEPKNLILAPGEDGRLVCRANGNPKPTVQWMVNGEPLQSAPPNPNREVAGDTIIFRDTQISSRAVYQCNTSNEHGYLLANAFVSVLDVPPRMLSPRNQLIRVILYNRTRLDCPFFGSPIPTLRWFKNGQGSNLDGGNYHVYENGSLEIKMIRKEDQGIYTCVATNILGKAENQVRLEVKDPTRIYRMPEDQVARRGTTVQLECRVKHDPSLKLTVSWLKDDEPLYIGNRMKKEDDSLTIFGVAERDQGSYTCVASTELDQDLAKAYLTVLADQATPTNRLAALPKGRPDRPRDLELTDLAERSVRLTWIPGDANNSPITDYVVQFEEDQFQPGVWHDHSKYPGSVNSAVLRLSPYVNYQFRVIAINEVGSSHPSLPSERYRTSGAPPESNPGDVKGEGTRKNNMEITWTPMNATSAFGPNLRYIVKWRRRETREAWNNVTVWGSRYVVGQTPVYVPYEIRVQAENDFGKGPEPESVIGYSGEDYPRAAPTEVKVRVMNSTAISLQWNRVYSDTVQGQLREYRAYYWRESSLLKNLWVSQKRQQASFPGDRLRGVVSRLFPYSNYKLEMVVVNGRGDGPRSETKEFTTPEGVPSAPRRFRVRQPNLETINLEWDHPEHPNGIMIGYTLKYVAFNGTKVGKQIVENFSPNQTKFTVQRTDPVSRYRFTLSARTQVGSGEAVTEESPAPPNEGSPVMSPPTLPPTTVGATGAVSSTDATAIAATTEATTVPIIPTVAPTTIATTTTVATTTTTTAAATTTTESPPTTTSGTKIHESAPDEQSIWNVTVLPNSKWANITWKHNFGPGTDFVVEYIDSNHTKKTVPVKAQAQPIQLTDLYPGMTYTLRVYSRDNEGISSTVITFMTSTAYTNNQADIATQGWFIGLMCAIALLVLILLIVCFIKRSRGGKYPVREKKDVPLGPEDPKEEDGSFDYSDEDNKPLQGSQTSLDGTIKQQESDDSLVDYGEGGEGQFNEDGSFIGQYTVKKDKEETEGNESSEATSPVNAIYSLA

SEQ ID NO: 297531 - protein, 302 aa, Artificial Sequence
  derived and/or modified sequence
MARQPPPPWVHAAFLLCLLSLGGAIEIPMDPSIQNELTQPPTITKQSAKDHIVDPRDNILIECEAKGNPAPSFHWTRNSRFFNIAKDPRVSMRRRSGTLVIDFRSGGRPEEYEGEYQCFARNKFGTALSNRIRLQVSKSPLWPKENLDPVVVQEGAPLTLQCNPPPGLPSPVIFWMSSSMEPITQDKRVSQGHNGDLYFSNVMLQDMQTDYSCNARFHFTHTIQQKNPFTLKVLTTRGVAERTPSFMYPQGTASSQMVLRGMDLLLECIASGVPTPDIAWYKKGGDLPSDKAKFENFNKALR

SEQ ID NO: 297532 - protein, 129 aa, Artificial Sequence
  derived and/or modified sequence
MARQPPPPWVHAAFLLCLLSLGGAIEIPMDPSIQNELTQPPTITKQSAKDHIVDPRDNILIECEAKGNPAPSFHWTRNSRFFNIAKDPRVSMRRRSGTLVIDFRSGGRPEEYEGEYQCFARNKFGTALS

SEQ ID NO: 297533 - DNA, 4044 bp, Artificial Sequence
  derived and/or modified sequence
atggccagacagcccccccccccctgggtgcacgccgccttcctgctgtgcctgctgagcctgggcggcgccatcgagatccccatggaccccaacccccagcacagactgacccagccccccaccatcaccaagcagagcgccaaggaccacatcgtggaccccagagacaacatcctgatcgagtgcgaggccaagggcaaccccgcccccagcttccactggaccagaaacagcagattcttcaacatcgccaaggaccccagagtgagcatgagaagaagaagcggcaccctggtgatcgacttcagaagcggcggcagacccgaggagtacgagggcgagtaccagtgcttcgccagaaacaagttcggcaccgccctgagcaacagaatcagactgcaggtgagcaagagccccctgtggcccaaggagaacctggaccccgtggtggtgcaggagggcgcccccctgaccctgcagtgcaaccccccccccggcctgcccagccccgtgatcttctggatgagcagcagcatggagcccatcacccaggacaagagagtgagccagggccacaacggcgacctgtacttcagcaacgtgatgctgcaggacatgcagaccgactacagctgcaacgccagattccacttcacccacaccatccagcagaagaaccccttcaccctgaaggtgctgaccaccagaggcgtggccgagagaacccccagcttcatgtacccccagggcaccgccagcagccagatggtgctgagaggcatggacctgctgctggagtgcatcgccagcggcgtgcccacccccgacatcgcctggtacaagaagggcggcgacctgcccagcgacaaggccaagttcgagaacttcaacaaggccctgagaatcaccaacgtgagcgaggaggacagcggcgagtacttctgcctggccagcaacaagatgggcagcatcagacacaccatcagcgtgagagtgaaggccgccccctactggctggacgagcccaagaacctgatcctggcccccggcgaggacggcagactggtgtgcagagccaacggcaaccccaagcccaccgtgcagtggatggtgaacggcgagcccctgcagagcgccccccccaaccccaacagagaggtggccggcgacaccatcatcttcagagacacccagatcagcagcagagccgtgtaccagtgcaacaccagcaacgagcacggctacctgctggccaacgccttcgtgagcgtgctggacgtgccccccagaatgctgagccccagaaaccagctgatcagagtgatcctgtacaacagaaccagactggactgccccttcttcggcagccccatccccaccctgagatggttcaagaacggccagggcagcaacctggacggcggcaactaccacgtgtacgagaacggcagcctggagatcaagatgatcagaaaggaggaccagggcatctacacctgcgtggccaccaacatcctgggcaaggccgagaaccaggtgagactggaggtgaaggaccccaccagaatctacagaatgcccgaggaccaggtggccagaagaggcaccaccgtgcagctggagtgcagagtgaagcacgaccccagcctgaagctgaccgtgagctggctgaaggacgacgagcccctgtacatcggcaacagaatgaagaaggaggacgacagcctgaccatcttcggcgtggccgagagagaccagggcagctacacctgcgtggccagcaccgagctggaccaggacctggccaaggcctacctgaccgtgctggccgaccaggccacccccaccaacagactggccgccctgcccaagggcagacccgacagacccagagacctggagctgaccgacctggccgagagaagcgtgagactgacctggatccccggcgacgccaacaacagccccatcaccgactacgtggtgcagttcgaggaggaccagttccagcccggcgtgtggcacgaccacagcaagtaccccggcagcgtgaacagcgccgtgctgagactgagcccctacgtgaactaccagttcagagtgatcgccatcaacgaggtgggcagcagccaccccagcctgcccagcgagagatacagaaccagcggcgccccccccgagagcaaccccggcgacgtgaagggcgagggcaccagaaagaacaacatggagatcacctggacccccatgaacgccaccagcgccttcggccccaacctgagatacatcgtgaagtggagaagaagagagaccagagaggcctggaacaacgtgaccgtgtggggcagcagatacgtggtgggccagacccccgtgtacgtgccctacgagatcagagtgcaggccgagaacgacttcggcaagggccccgagcccgagagcgtgatcggctacagcggcgaggactaccccagagccgcccccaccgaggtgaaggtgagagtgatgaacagcaccgccatcagcctgcagtggaacagagtgtacagcgacaccgtgcagggccagctgagagagtacagagcctactactggagagagagcagcctgctgaagaacctgtgggtgagccagaagagacagcaggccagcttccccggcgacagactgagaggcgtggtgagcagactgttcccctacagcaactacaagctggagatggtggtggtgaacggcagaggcgacggccccagaagcgagaccaaggagttcaccacccccgagggcgtgcccagcgcccccagaagattcagagtgagacagcccaacctggagaccatcaacctggagtgggaccaccccgagcaccccaacggcatcatgatcggctacaccctgaagtacgtggccttcaacggcaccaaggtgggcaagcagatcgtggagaacttcagccccaaccagaccaagttcaccgtgcagagaaccgaccccgtgagcagatacagattcaccctgagcgccagaacccaggtgggcagcggcgaggccgtgaccgaggagagccccgccccccccaacgagggcagccccgtgatgagcccccccaccctgccccccaccaccgtgggcgccaccggcgccgtgagcagcaccgacgccaccgccatcgccgccaccaccgaggccaccaccgtgcccatcatccccaccgtggcccccaccaccatcgccaccaccaccaccgtggccaccaccaccaccaccaccgccgccgccaccaccaccaccgagagcccccccaccaccaccagcggcaccaagatccacgagagcgcccccgacgagcagagcatctggaacgtgaccgtgctgcccaacagcaagtgggccaacatcacctggaagcacaacttcggccccggcaccgacttcgtggtggagtacatcgacagcaaccacaccaagaagaccgtgcccgtgaaggcccaggcccagcccatccagctgaccgacctgtaccccggcatgacctacaccctgagagtgtacagcagagacaacgagggcatcagcagcaccgtgatcaccttcatgaccagcaccgcctacaccaacaaccaggccgacatcgccacccagggctggttcatcggcctgatgtgcgccatcgccctgctggtgctgatcctgctgatcgtgtgcttcatcaagagaagcagaggcggcaagtaccccgtgagagagaagaaggacgtgcccctgggccccgaggaccccaaggaggaggacggcagcttcgactacagcgacgaggacaacaagcccctgcagggcagccagaccagcctggacggcaccatcaagcagcaggagagcgacgacagcctggtggactacggcgagggcggcgagggccagttcaacgaggacggcagcttcatcggccagtacaccgtgaagaaggacaaggaggagaccgagggcaacgagagcagcgaggccaccagccccgtgaacgccatctacagcctggcctag

SEQ ID NO: 297534 - DNA, 4044 bp, Artificial Sequence
  derived and/or modified sequence
atggctaggcagcctccgccaccttgggtccacgcagcatttctcctttgtctgctgtccttgggtggagccatcgagatccctatggatccaaatccgcaacatcggctgacccagccaccgacaattacgaaacagagcgccaaggatcatatcgtggatcctcgcgacaacatcctaatcgaatgcgaggctaaagggaatcctgctccttcttttcactggacccgcaattctcgcttcttcaacattgccaaggatccacgagtttctatgagacgacggtccgggacactggtaatcgacttcagatccggcggccggcccgaggaatacgaaggggaatatcagtgttttgcaaggaacaaattcggtactgcactgtcaaacagaattagactgcaggtcagcaagagccctctgtggcctaaggagaatcttgaccccgtggtcgtgcaggaaggggcacctctgactctgcagtgcaatcctcccccaggactgccttctccagtgatcttctggatgagttcctccatggaaccaatcactcaggacaagagggtttcccaaggacacaacggagatttgtatttcagtaatgtgatgctccaagacatgcagactgattactcctgtaatgcaaggttccacttcacacacactatccagcagaaaaatccattcacactaaaggtcctcacgacccgcggtgtggctgaaagaactccctcatttatgtacccccaaggtaccgcttcgtcccaaatggtccttagggggatggatttgctgcttgaatgtatcgctagtggcgtccccacaccagatatcgcatggtacaagaaagggggagatttgccatccgataaagccaaatttgagaacttcaataaggccttgaggatcactaacgtctccgaggaggattcgggagagtatttctgcttggcttcgaacaagatgggctctatcagacacacaataagtgttagggtgaaggccgcaccctactggcttgatgagcctaagaaccttatcctcgccccaggcgaggacgggaggttagtgtgccgtgccaatggaaatccaaagcctaccgtccagtggatggtgaatggcgagcccttacagtctgcacctccaaatccaaaccgcgaggttgctggcgacaccataattttccgcgatacacagatcagcagtcgcgcagtctatcagtgtaacacgagcaatgagcatggctatctcctcgctaatgccttcgtcagcgtgctggatgtgcctcctcggatgctctcgcctcggaaccagctgattcgagtcattctgtataacaggacacgcctggattgcccattcttcggttcccccattcccacgttacgctggttcaagaacgggcagggaagcaacctggacggtggaaattatcacgtgtacgaaaatggatctttagaaataaaaatgataaggaaagaggatcaaggcatctatacatgtgtggcgacaaatattctgggcaaggcagaaaaccaggtgaggcttgaagtcaaggacccaactaggatctacagaatgccggaggaccaggttgcaaggaggggcactacggttcagctcgagtgtcgagtgaaacacgatcccagtctgaaattgaccgtttcatggttgaaggacgacgagcctctgtacataggaaaccggatgaagaaagaggacgacagcctgactatttttggggtcgctgagcgcgatcagggaagttatacatgcgtcgcgagcactgagttagaccaagacctggcaaaggcgtatctcaccgttttagcagaccaggccacgccaacgaatagacttgcagcccttcctaagggaaggcctgaccgaccaagagacttggagctcaccgaccttgcagagaggtcagttagactgacttggattccgggcgacgcgaacaatagccccattacagactatgtggtgcagttcgaagaggatcagttccaacccggcgtgtggcatgatcacagtaagtaccctggctccgttaacagcgccgtcctccgtttgagcccttacgtcaactaccaattcagagtaatcgccatcaatgaggtcggaagcagccacccttctctgcccagcgagaggtataggacgtctggagccccacctgaatccaatcccggtgacgttaaaggagagggcacacgaaagaacaacatggagattacctggaccccgatgaatgcaacttctgctttcgggcccaacctcagatatattgtcaagtggcggagacgcgaaactagggaggcctggaacaacgtaaccgtgtgggggtccagatatgttgtcggacagacccctgtgtacgttccttacgagatcagagtgcaggccgagaatgactttggaaaaggtccagagcctgagagcgtcattggctactccggcgaagactacccacgcgcagcgcccactgaggtcaaggtccgcgttatgaactcaacggcgattagtcttcagtggaatagggtgtacagcgatacagtgcagggccaactcagggagtacagggcttactactggagagaatccagtctcctcaaaaatctgtgggtctctcagaaacggcagcaggctagcttccccggtgaccgcctcagaggagtggtgtctcgcttgttcccgtactcaaactataaactggaaatggtcgttgtgaacgggaggggggacggacccaggagcgagacaaaagagtttactacacccgagggtgtgccttcggcgcctagacgttttcgggtcagacagccaaatctcgaaacaatcaacctggagtgggaccatcctgagcacccaaatgggattatgataggctatacactcaagtatgtggcttttaacggaaccaaagtcgggaagcagatcgtcgaaaatttcagcccaaatcagacgaaattcactgtgcagaggacagacccggtctctcggtacagattcaccctgtcggcccgcacacaggtcggcagtggtgaagccgtcacagaggagtctcctgcgccccctaacgaaggaagtccagtgatgagccctccaacattgccaccaacaactgtaggtgcaactggcgctgtgagctcaaccgatgcgacggccattgctgccacaacagaggcaactaccgtgcctatcatcccgactgtcgcacccactacgatcgcaaccacaactacagtcgccacaactaccaccaccaccgccgccgctaccacgacgaccgaaagcccccctactaccacgagcggcacaaagattcacgagagcgcccccgatgagcaaagcatatggaatgttacggtgttgccaaattccaagtgggctaacattacttggaaacataatttcggaccgggtaccgacttcgttgtggaatatatcgattccaaccacaccaagaaaacggtgcctgtaaaggcccaggcgcagcctatccagctgacagatctgtatcccggcatgacatataccctgcgggtctactcaagagacaatgagggcatttcttcaaccgttatcacctttatgacatctactgcctatacgaacaatcaggctgacatcgccactcaaggctggtttatcggattaatgtgcgccatcgctctgctagttctaatcttattaatcgtatgttttataaaacggtctcggggtggaaaatacccagtaagagagaagaaggacgtgccgctgggccccgaggaccctaaagaagaggacggtagtttcgactacagtgacgaggacaataaaccactccagggaagccaaaccagcctggacggaacgatcaagcagcaggaaagtgacgactctctggttgactacggcgagggtggtgaaggccagttcaatgaagatgggagctttataggacagtacacagttaagaaggataaagaagaaactgaaggcaatgaatccagtgaggctacttcccctgtgaacgcaatatactcactggcctag

SEQ ID NO: 297535 - DNA, 4044 bp, Artificial Sequence
  derived and/or modified sequence
atggcccggcagcccccaccaccctgggtgcacgccgccttcctgctgtgcctgctgagcctgggcggggccatcgagatccccatggaccccaacccccagcaccggctgacccagccccccaccatcaccaagcagagcgccaaggaccacatcgtggacccccgggacaacatcctgattgaatgtgaggccaagggcaacccagcccccagcttccactggaccaggaacagccgcttcttcaacatcgccaaggacccccgggtgtccatgagaagaagaagtggcaccctggtgattgacttccgcagcggcggccggcctgaggagtatgaaggagagtaccagtgctttgccaggaacaagtttggaacagccctgagcaaccgcatccggctgcaggtgtccaagagccccctgtggcccaaggagaacctggaccctgtggtggtgcaggagggcgcccccctgaccctgcagtgcaaccccccacctggcctgcccagccctgtgatcttctggatgagcagctccatggagcccatcacccaggacaagagggtgtcccagggccacaacggggacctgtacttcagcaatgtgatgctgcaggacatgcagacagactacagctgcaatgcccgcttccacttcacccacaccatccagcagaagaaccccttcaccctgaaggtgctgaccacccggggcgtggccgagaggacccccagcttcatgtacccccagggcacagccagcagccagatggtgctgcggggcatggacctgctgctggagtgcatcgccagcggcgtgcccaccccagacatcgcctggtacaagaagggcggggacctgcccagcgacaaggccaagtttgagaacttcaacaaggccctgcgcatcaccaacgtgtctgaagaagattctggagagtacttctgcctggccagcaacaagatgggcagcatccgccacaccatctctgtgcgggtgaaggccgccccctactggctggatgagcccaagaacctgatcctggcccctggagaagatggccgcctggtgtgccgggccaatggaaaccccaagcccaccgtgcagtggatggtgaatggagagcccctgcagagcgccccacccaaccccaaccgggaggtggccggggacaccatcatcttccgggacacccagatcagcagcagagctgtgtaccagtgcaacaccagcaatgagcacggctacctgctggccaatgcctttgtgtctgtgctggatgtgccccccaggatgctgagccccaggaaccagctgatccgggtcatcctgtacaacagaacccggctggactgccccttcttcggcagccccatccccaccctgcgctggttcaagaatggccagggcagcaacctggatggcggcaactaccacgtgtatgaaaatggcagcctggagatcaagatgatcaggaaggaggaccagggcatctacacctgtgtggccaccaacatcctgggcaaggccgagaaccaggtgcggctggaggtgaaggaccccacccgcatctacaggatgcctgaggaccaggtggcccggcggggcaccaccgtgcagctggagtgccgggtgaagcatgaccccagcctgaagctgactgtgtcctggctgaaggatgatgagcccctgtacatcggcaacaggatgaagaaggaggatgacagcctgaccatcttcggcgtggccgagcgggaccagggcagctacacctgtgtggccagcacagagctggaccaggacctggccaaggcctacctgactgtgctggccgaccaggccacccccaccaaccggctggccgccctgcccaagggccgcccagaccggccccgggacctggagctgacagacctggccgagaggtctgtgcggctgacctggatccctggagatgccaacaacagccccatcacagattatgtggtgcagtttgaggaggaccagttccagcccggggtgtggcatgaccacagcaagtacccaggctctgtgaacagcgctgtgctgcggctgagcccctacgtgaactaccagttccgggtgattgccatcaatgaggtgggcagcagccaccccagcctgcccagcgagcgctaccgcaccagcggggcccctcctgagagcaaccctggagatgtgaagggggagggcaccaggaagaacaacatggagatcacctggacccccatgaatgccaccagcgccttcggccccaacctgcgctacatcgtgaagtggaggagaagagagacccgggaggcctggaacaacgtgacagtgtggggcagccgctacgtggtgggccagacccctgtgtatgtgccctatgagatccgggtgcaggccgagaatgactttggaaaaggacctgagcctgagagcgtgattggctacagcggggaggactaccccagggctgcccccacagaggtgaaggtgcgggtgatgaacagcacagccatcagcctgcagtggaacagagtgtacagcgacacagtgcagggccagctgcgggagtaccgggcctactactggagggagagcagcctgctgaagaacctgtgggtgtcccagaagaggcagcaggccagcttccctggggaccggctgcggggcgtggtgtcccggctcttcccctacagcaactacaagctggagatggtggtggtgaatggaagaggagatggccccaggtctgagaccaaggagttcaccaccccagagggcgtgcccagcgccccccggcgcttccgggtgcggcagcccaacctggagaccatcaacctggagtgggaccaccctgagcaccccaacggcatcatgattggctacaccctgaagtatgtggccttcaacggcaccaaggtgggcaagcagatcgtggagaacttcagccccaaccagaccaagttcaccgtgcagaggacagatcctgtgagccgctaccgcttcaccctgagcgcccggacccaggtgggcagcggggaggccgtgacagaggagagccctgcccccccaaatgaaggcagccctgtgatgagcccccccaccctgccccccaccaccgtgggcgccactggagctgtgagcagcacagatgccacagccatcgccgccaccacagaggccaccaccgtgcccatcatccccaccgtggcccccaccaccatcgccaccaccaccaccgtggccaccaccaccaccaccacagctgctgccaccaccaccacagagagcccccccaccaccaccagcggcaccaagatccatgaaagtgccccagatgagcagagcatctggaatgtgacagtgctgcccaacagcaagtgggccaacatcacctggaagcacaactttggacctggaacagactttgtggtggagtacatcgacagcaaccacaccaagaagacagtgcctgtgaaggcccaggcccagcccatccagctgacagacctgtacccaggcatgacctacaccctgcgggtgtacagccgggacaatgaaggcatcagcagcaccgtcatcaccttcatgaccagcacagcctacaccaacaaccaggccgacatcgccacccagggctggttcatcggcctgatgtgtgccatcgccctgctggtgctgatcctgctgattgtgtgcttcatcaagaggagcagaggaggcaagtaccctgtgcgggagaagaaggatgtgcccctgggccctgaggaccccaaggaggaggatggcagctttgactacagtgatgaggacaacaagcccctgcagggcagccagaccagcctggatggcaccatcaagcagcaggagagtgatgacagcctggtggactatggagagggcggggagggccagttcaatgaagatggcagcttcatcggccagtacacagtgaagaaggacaaggaggagacagagggcaatgaaagcagcgaggccaccagccctgtgaatgccatctacagcctggcctag

SEQ ID NO: 297536 - DNA, 4044 bp, Artificial Sequence
  derived and/or modified sequence
atggcccggcagcccccccccccctgggtgcacgccgccttcctgctctgtttgctttctctggggggcgccattgaaataccaatggatcctaaccctcagcaccgcctgactcagccaccgacaataaccaagcaaagtgcaaaagaccatattgtcgatcctagagataacatcttgatcgaatgcgaggctaaaggtaaccctgcaccctctttccactggacccggaactcccggttttttaacattgcaaaagatccacgcgtatctatgagaaggcgcagcggaacactggttatcgactttaggagcggaggccgtccagaagagtacgagggtgagtatcaatgtttcgcccgcaacaagttcgggacagcactttctaatagaatcaggttacaggtctcaaaaagcccactctggcccaaggaaaatctggaccccgtggtagtccaggagggagcccctttgaccctacagtgtaacccccctccaggcctcccctcccctgtgatcttttggatgtcttcaagcatggaacccataactcaggacaagagggtttcccagggtcacaacggggatctttacttcagcaacgtgatgctgcaagatatgcagacagactattcatgcaatgccaggttccactttacccataccatccaacagaaaaacccctttacactgaaggtgctgacaactcgcggggtggctgagaggaccccatccttcatgtacccacagggtacagcttcgagtcagatggtcttaaggggcatggatttgctgctcgaatgcatcgccagcggcgtccccacaccagatatcgcctggtacaagaagggaggggacctcccatctgataaggcaaagttcgaaaatttcaataaagcccttagaataacaaacgtatcggaagaggactcgggagagtacttctgcctagcctctaataaaatgggctcaataagacacacgatctccgttcgggtgaaagctgctccatactggctggacgagccgaaaaatttaattctcgctcctggcgaagatggacggctggtgtgtcgtgcgaatgggaatcctaaacccaccgtccagtggatggttaacggagaaccccttcagtcagctcccccaaatcccaaccgcgaagtggctggggacaccatcatctttagagatacacagatttccagtagggcagtataccagtgcaatacaagtaacgaacatggatacctgctcgccaacgcttttgtgtcagtcttggatgttccccccagaatgctcagcccgcgaaaccagcttattcgtgtgatcttatacaaccgtacccgcttggactgcccattttttggctcacctattcctaccctgaggtggtttaagaatggccagggttcaaatctggacggcggaaattaccacgtgtatgagaatggaagcctggaaattaaaatgataaggaaagaagaccagggtatctacacatgcgtggccacgaatattttgggtaaagcggagaaccaagtgagattggaggttaaagatccaacacggatttatcggatgcccgaggaccaagttgctcgaaggggtacaaccgtccaacttgagtgccgcgttaaacacgatccttctctgaagctaaccgtatcctggctgaaagacgatgaacctttatatatcggcaatagaatgaagaaggaggacgattcgttaacaatttttggcgtggcagagcgcgatcaggggagctacacttgtgtcgccagcactgagctggaccaagatctagcaaaggcctacctgaccgtactcgctgaccaggctactccaactaaccgcctggcagctctgcctaagggacggccagaccgtcctcgggacctggagcttacggacctggccgagagatctgtcagactaacttggattccaggagatgctaataactctcctatcacagactacgtggtccagtttgaagaagaccaattccaaccaggggtgtggcacgaccatagtaagtacccaggctctgtgaactccgccgttctgcggcttagcccatacgtgaattaccagttccgcgtgatcgcgataaatgaggtaggttcatctcacccttcgcttcctagtgagcgataccgaacatcaggagctcctccggaatccaaccctggggacgtaaaaggtgagggcacaaggaagaacaacatggaaattacctggactcctatgaatgctacctccgcatttggacctaacctgagatacattgtgaagtggaggaggagggaaacacgcgaagcttggaataacgtcaccgtgtggggcagccgttacgttgtgggtcagactcccgtgtatgtgccttacgagatacgcgtgcaggcagagaacgattttggcaaaggcccagaaccagaatctgtgatagggtattctggcgaggactacccacgagcagcccccacagaagtcaaggtgagagtgatgaacagcaccgctatttcacttcagtggaatcgcgtttactccgatactgtccaggggcagttaagagagtaccgagcctattactggagagagagcagtctgctgaaaaatctgtgggtttcacagaaacgacagcaagcctcattccccggggaccggctacggggcgtggtctcaagactgttcccctattcaaactacaagttggaaatggtggtggtaaatgggagaggggacggtcctagatcggaaaccaaggaatttaccacaccggagggggtcccaagcgccccccgccggttcagagtgcgccaaccgaacctagagaccataaatctcgagtgggatcacccagaacatccaaatggtataatgatcggatatactctcaagtacgtagcatttaacgggacaaaggttgggaagcagatcgtagaaaatttctccccaaaccagacaaagttcactgtgcagagaaccgaccccgtgtctcgatatagatttacgctctctgctcgcacccaagtgggatcaggcgaggcggtgacagaggaaagccctgcacccccaaatgaggggagcccagtgatgagccctcctacattgccacccactaccgtgggggccaccggggcagtgagttcaacggacgccactgccatagccgctaccaccgaggcaacaacagtccccataattcctaccgtcgctcctactaccatcgctaccaccaccaccgtcgctactactaccacgactactgctgccgccacgactacaactgagtcaccccctaccaccacttctgggacaaagatacacgaaagtgcacctgacgaacagagtatttggaacgtgactgtgcttcctaacagtaaatgggccaacatcacgtggaagcacaactttggacccggcacagactttgtggtcgagtatatagactctaaccataccaaaaaaactgttcctgtcaaagcccaagcacagccaatccagcttactgacctgtatcccggtatgacctacaccctgagagtctattcacgagacaacgaaggcatatcctccaccgtgattacattcatgacctctaccgcctatactaataatcaagctgacattgccacacagggctggtttatcggacttatgtgtgccattgctctactcgttttaatccttctgatcgtgtgcttcatcaaaaggtcccgtggcggtaagtatccagtgagagaaaagaaggatgtgcctctcggacctgaggatcccaaggaggaagacggctccttcgattacagtgacgaggacaataagcccctgcaagggagtcaaacatcacttgacgggacaatcaagcagcaagagagcgatgattccctggtggactacggggaaggaggcgagggacagtttaacgaagacggcagcttcataggacaatacaccgtgaaaaaagataaggaagagacggaagggaacgagagcagtgaggctaccagtcccgtgaacgccatttacagtctggcttag

SEQ ID NO: 297537 - DNA, 4044 bp, Artificial Sequence
  derived and/or modified sequence
atggcgagacagccacctcccccttgggtccacgccgcatttctgctctgccttcttagcctcggcggtgctatcgaaatccccatggaccctaatcctcagcataggctgacccagcccccaaccatcaccaagcaatcagccaaggatcatatagtggacccaagggataacattctgattgagtgtgaagctaaggggaacccagcaccctcatttcattggacccgaaattccagatttttcaacattgctaaggatccacgcgttagcatgcgtcgcagaagtggcactctggttatagatttccgcagtggaggcaggcctgaagaatacgagggagaataccagtgttttgctcgaaataaattcggcacagctctcagtaatagaattcgcctgcaagtcagcaaatcaccattatggcccaaggaaaacctggaccccgtcgtggtccaggagggggcacccctcacactccaatgcaatccacctcccggtctgcccagtcccgtgatcttctggatgtcatccagcatggagccgatcactcaggataagagagtttcgcaagggcataacggagacctgtatttctccaacgtaatgcttcaggatatgcagacagattactcatgtaatgcgcgttttcacttcacccacacgatccaacagaaaaatccgttcaccctaaaagtgcttactacgcgcggtgtcgccgaaaggacgccctctttcatgtacccgcaggggacggccagctcacagatggtgcttcgaggaatggatttactgctagagtgtatagcctcgggggtgccaactcccgacatagcatggtacaagaagggcggagatcttccctcagacaaggctaaattcgaaaatttcaacaaggctctgcggattaccaacgttagcgaagaggacagcggtgagtacttttgtctcgcatccaataagatgggttctatcaggcacaccatatcagttcgagtgaaggccgcaccgtactggttggatgagccaaagaatctaattctagcacctggcgaagacggcaggctggtgtgccgggcaaacggaaatcccaagcctaccgttcagtggatggtcaacggcgaaccgctccagagcgcccctccaaacccaaaccgggaggtggccggtgatacaatcatcttcagagacacccaaatctcctcaagggccgtgtaccaatgcaatacttctaatgagcacggctatctgttggcgaacgcttttgtgtccgttcttgacgtgcccccaagaatgctatccccccgaaatcagctgatcagggtgatcttgtacaatagaaccaggctcgactgtccattcttcggttctccgattcctacgttacgctggttcaaaaacggccaggggtctaatctcgacggaggcaactaccacgtgtatgagaacgggtctctcgagatcaagatgatcagaaaggaggatcagggaatctacacctgtgtagcaacaaacatcctcgggaaagccgagaatcaggtgaggctggaggtcaaggatccaacccggatataccggatgcccgaggaccaagtggcgagaagaggaacaaccgtgcagctagaatgtagagtgaagcacgatccgtccctgaaactgacagttagctggctgaaagatgacgagcctttatatattggtaacagaatgaagaaagaggatgactccctcactatctttggagtcgctgaacgggatcagggctcctacacctgtgtagctagcacggaactcgatcaagaccttgcgaaagcttatctcactgtgctggctgaccaggctactcccaccaaccggctagccgcactgccaaaaggacggcctgaccgcccaagagatctcgagctaactgacctcgcagaaagaagtgttaggctgacttggattcccggagatgctaacaactcaccgatcacagattatgtcgtccagtttgaggaagaccagtttcaaccaggtgtgtggcatgaccacagcaagtatcctgggagcgtgaatagcgcagtgctgcgcctgagcccctacgtcaattaccagtttagggttatcgcaataaatgaggttgggagcagccacccctccttaccgtctgagcggtataggacgagcggcgcaccacccgaaagtaacccaggagatgtcaagggggaaggtactcggaaaaacaacatggaaatcacctggacccctatgaatgccacctccgctttcggtcccaatctacgctatattgtgaagtggagaaggcgggagacccgagaggcatggaacaacgttactgtgtggggtagccggtacgttgtcggacagacgcctgtgtatgtcccctacgagattcgagtacaagccgagaacgatttcggcaagggtcccgagcccgagtctgtgatcggctactccggagaagactatcccagagctgcacccacggaagtgaaggtccgagttatgaattccaccgccatttccctccagtggaaccgtgtgtattcagacaccgtgcaagggcagcttagggagtatagggcctactactggagagagtcttctctgcttaaaaatctttgggtgagccagaagaggcagcaagcgtcatttcctggtgaccgactccgcggagtggtaagtcggcttttcccatattccaactataagctcgagatggtggttgttaatgggcgtggagatgggccaagaagcgagaccaaggagtttaccactccggagggcgtcccctcggctcctaggagatttcgggtccgacaacccaacctcgaaacaataaaccttgagtgggatcacccggaacaccccaatggtatcatgattgggtacactctgaagtacgtggcattcaatggcaccaaggtgggtaagcagattgtcgagaacttttcccctaaccaaactaagttcacagtgcagcgcacagacccagtctcccgttatcgcttcacactatcagcgcgtactcaggtcggatctggagaggctgttacagaagagtctcctgcccctccaaacgagggcagtcctgtgatgtccccccctaccctaccgccaaccactgtgggcgcaacaggcgcagtttcatccacagatgctacagctatcgctgctaccaccgaggccaccacagtacctattattccaacagtggccccaacaaccatagccacaacaaccaccgtggccacaacaacaactactaccgcagccgcaacgacgaccacagagtccccaccaacaacaacgagcggaacaaagatacatgagtctgctccagacgaacagagcatctggaacgtgactgtgctccctaattctaaatgggctaatataacatggaagcataactttgggccaggaacggattttgttgtggagtatatagacagcaaccatactaaaaaaaccgtgccagtgaaagcacaagctcagccaatacagcttactgatctgtaccccggtatgacctacaccctgcgagtgtactcacgggataacgaagggatatcatctactgtgattacattcatgacatccactgcttatacgaacaatcaggccgacattgctacacaaggctggttcatcggactgatgtgcgcaattgccctgctggtgcttatccttctgatcgtctgcttcatcaagcgatcccggggagggaaataccccgtgagagaaaaaaaggacgtgccgctaggcccagaggatcccaaagaggaggatggaagcttcgactacagtgacgaggacaacaagccacttcagggtagccagacaagcttggatggcactataaaacagcaggagtccgatgacagtctggtggactacggtgagggaggggaggggcagtttaacgaagatggatccttcatcggccagtacactgtcaaaaaagataaggaagaaacagaggggaatgagtcaagtgaggccaccagcccagtgaacgccatttactcccttgcttag

SEQ ID NO: 297538 - DNA, 10609 bp, Artificial Sequence
  derived and/or modified sequence
gcacgggctggtctctgccctaatgcggcggctggcggcgagaggcgctgcaggggacgcgggggaagtggcggcgccggcagcggacagctcggacagcgcccagggccggagcccgagcccttggaggttgattgacttatgtgcaatttgggacgctggagtttaccttccctccgcagcctggaacagagcctcctctggtgttgcaaggaagaggctgaatgaggcagagaagctgagtgctgtccaggaggcccagttaaagcggctcgaggtgacaagaccccgagtgctggggagcagggagcagggccaggtgccgaggatggccaggcagccaccgccgccctgggtccatgcagccttcctcctctgcctcctcagtcttggcggagccatcgaaattcctatggatctttctatagaaacaacagtgacgcagccgccaaccatcaccaagcagtcagcgaaggatcacatcgtggacccccgtgataacatcctgattgagtgtgaagcaaaagggaaccctgcccccagcttccactggacacgaaacagcagattcttcaacatcgccaaggacccccgggtgtccatgaggaggaggtctgggaccctggtgattgacttccgcagtggcgggcggccggaggaatatgagggggaatatcagtgcttcgcccgcaacaaatttggcacggccctgtccaataggatccgcctgcaggtgtctaaatctcctctgtggcccaaggaaaacctagaccctgtcgtggtccaagagggcgctcctttgacgctccagtgcaaccccccgcctggacttccatccccggtcatcttctggatgagcagctccatggagcccatcacccaagacaaacgtgtctctcagggccataacggagacctatacttctccaacgtgatgctgcaggacatgcagaccgactacagttgtaacgcccgcttccacttcacccacaccatccagcagaagaaccctttcaccctcaaggtcctcaccacccgaggagttgcagaaagaacaccaagcttcatgtatccccagggcaccgcgagcagccagatggtgcttcgtggcatggacctcctgctggaatgcatcgcctccggggtcccaacaccagacatcgcatggtacaagaaaggtggggacctcccatctgataaggccaagtttgagaactttaataaggccctgcgtatcacaaatgtctctgaggaagactccggggagtatttctgcctggcctccaacaagatgggcagcatccggcacacgatctcggtgagagtaaaggctgctccctactggctggacgaacccaagaaccttattctggctcctggcgaggatgggagactggtgtgtcgagccaatggaaaccccaaacccactgtccagtggatggtgaatggggaacctttgcaatcggcaccacctaacccaaaccgtgaggtggccggagacaccatcatcttccgggacacccagatcagcagcagggctgtgtaccagtgcaacacctccaacgagcatggctacctgctggccaacgcctttgtcagtgtgctggatgtgccgcctcggatgctgtcgccccggaaccagctcattcgagtgattctttacaaccggacgcggctggactgccctttctttgggtctcccatccccacactgcgatggtttaagaatgggcaaggaagcaacctggatggtggcaactaccatgtttatgagaacggcagtctggaaattaagatgatccgcaaagaggaccagggcatctacacctgtgtcgccaccaacatcctgggcaaagctgaaaaccaagtccgcctggaggtcaaagaccccaccaggatctaccggatgcccgaggaccaggtggccagaaggggcaccacggtgcagctggagtgtcgggtgaagcacgacccctccctgaaactcaccgtctcctggctgaaggatgacgagccgctctatattggaaacaggatgaagaaggaagacgactccctgaccatctttggggtggcagagcgggaccagggcagttacacgtgtgtcgccagcaccgagctagaccaagacctggccaaggcctacctcaccgtgctaggacggccagaccggccccgggacctggagctgaccgacctggccgagaggagcgtgcggctgacctggatccccggggatgctaacaacagccccatcacagactacgtcgtccagtttgaagaagaccagttccaacctggggtctggcatgaccattccaagtaccccggcagcgttaactcagccgtcctccggctgtccccgtatgtcaactaccagttccgtgtcattgccatcaacgaggttgggagcagccaccccagcctcccatccgagcgctaccgaaccagtggagcaccccccgagtccaatcctggtgacgtgaagggagaggggaccagaaagaacaacatggagatcacgtggacgcccatgaatgccacctcggcctttggccccaacctgcgctacattgtcaagtggaggcggagagagactcgagaggcctggaacaacgtcacagtgtggggctctcgctacgtggtggggcagaccccagtctacgtgccctatgagatccgagtccaggctgaaaatgacttcgggaagggccctgagccagagtccgtcatcggttactccggagaagattatcccagggctgcgcccactgaagttaaagtccgagtcatgaacagcacagccatcagccttcagtggaaccgcgtctactccgacacggtccagggccagctcagagagtaccgagcctactactggagggagagcagcttgctgaagaacctgtgggtgtctcagaagagacagcaagccagcttccctggtgaccgcctccgtggcgtggtgtcccgcctcttcccctacagtaactacaagctggagatggttgtggtcaatgggagaggtgatgggcctcgcagtgagaccaaggagttcaccaccccggaaggagtacccagtgcccctaggcgtttccgagtccggcagcccaacctggagacaatcaacctggaatgggatcatcctgagcatccaaatgggatcatgattggatacactctcaaatatgtggcctttaacgggaccaaagtaggaaagcagatagtggaaaacttctctcccaatcagaccaagttcacggtgcaaagaacggaccccgtgtcacgctaccgctttaccctcagcgccaggacgcaggtgggctctggggaagccgtcacagaggagtcaccagcacccccgaatgaaggtaggtgcatggcagcagcccctggggtaaaaggtcccagcgtgggtgcgacgggcgctgtgagcagtaccgatgctactgccattgctgccaccaccgaagccacaacagtccccatcatcccaactgtcgcacctaccaccatcgccaccaccaccaccgtcgccacaactactacaaccactgctgccgccaccaccaccacggagagtcctcccaccaccacctccgggactaagatacacgaatccgcccctgatgagcagtccatatggaacgtcacggtgctccccaacagtaaatgggccaacatcacctggaagcacaatttcgggcccggaactgactttgtggttgagtacatcgacagcaaccatacgaaaaaaactgtcccagttaaggcccaggctcagcctatacagctgacagacctctatcccgggatgacatacacgttgcgggtttattcccgggacaacgagggcatcagcagtaccgtcatcacctttatgaccagtacagcttacaccaacaaccaagcggacatcgccacccagggctggttcattgggcttatgtgcgccatcgccctcctggtgctgatcctgctcatcgtctgtttcatcaagaggagtcgcggcggcaagtacccagtacgagaaaagaaggatgttccccttggccctgaagaccccaaggaagaggatggctcatttgactatagtgatgaggacaacaagcccctgcagggcagtcagacatctctggacggcaccatcaagcagcaggagagtgacgacagcctggtggactatggcgagggtggcgagggtcagttcaatgaagacggctccttcatcggccagtacacggtcaaaaaggacaaggaggaaacagagggcaacgaaagctcagaggccacgtcacctgtcaatgctatctactctctggcctaacggagcccacccaggcacagccaccactttgcaagtgggaggaggggagaaggggagacaaaaccactgcagacctaccacgaagccaccaccaccttcagtaacaagggtacgatatgggggtctgccaagctgtgaggaccagtagccaccaagccacccacaagccccctcccaatgaccccccttcagccccgggtgccaccagtgtgggagagctggagccgtggctgagctcagctggagggagcctggccccttgcccggtctcgcagccaccccgagcgttccaccacactgtccgcccttggcctcggcacacgctcaccttttctgttggttacgggacttctcattgtcttaatttcgctttgtgcatcttcccctccagacccaatgtctctgttttcttttccttttgaaaaagagtccctggaaaagaaagaataagtggattctcccccaggagaatcctttttgcaaagataggcaaaaaggattgaatccataccagaacacgtagacaggctgtaatattcaaaccacctctgggccaatgcatttccaaaggatgcctttctcgccatatgcctcccctggcccccagcccctctgcctcggccttgtcagttgctgagctgggcttggctcctttctggaaaatgacagtatttttggcagggagaaggtgcgcaggcctccttgctgctctctggtttggttgggaggtgtgtttacctcttgctcctcattcctcccctgcccttttctctggaatatctaagatgtgagctgcattgactctgaagacgtttgaggaacaggagtgggcactgatagaaaggacttcaacgccagtgactgtgtacctccagcagaagaaaatcaggtgtctggtcttgggggcactgtgctcacttctagagagaagaaaaaggctgggtttggacttcatgcctcctcactggtgaaacccaggatgtagatagagggccacacccaccctgtccagagtagagggcacctgtccacgtggccagggcccatgctgccaccctcgaggagatggaaccctgtgatgcaaaagctttgctggtgtgtttggggcataaggcactgctccccttccatctctagcagatatcatcttctcagccaattctgtaggacactgaggctcttgtttgacatggtgtgtggatggggacttgccccaagactgagcaggtctgccctttcattggggtgtatacatatcaggggaccctgaggtggcaccgtactcagtgttgtgatgcccccacctagggaggactcaatgctctttgtatgccttatgcagcgctgatctgtccctggagttcccaggttcccagctccccccctgcaagccttgaagcctccagcaacgtctatctccaggagagcagggcagcctatgcaagtgttccggcaggaccagaagtggccactcaacacacgtcctcaccagtcaccccaaatggagacactcgcagacctgcagttctcagaccgaaggtgctgccttcatcctccccacctaatgcatttttgaaaccaaaggtacctagcctcagagacagagaaggagagggggagatcttgagtctaagaggaaccctttagctgtttctgcagctgaggtcagtttcaggagggtgaagctgatccccaggaatggatcagctgccatgggcacagcctccgatttgagcctctccggctgccagccagggggcctgggccagaccagggctctgtccttccgtgactttattaaagcaacatttgccacatgtttaagccgcaaaggtattagcaatgcttgcatcattaataatcattcagttgaaggtcaagcccatagacacacactctctgctggtaagaaaccatagcccagaactgagccaataaggttgtttgaacctgagagtgtgtaatggtcatttgggccaagcctcagctagggctgctgcctggacgcctgaggggcagcttatcacagtgcaaggggacagggtaaacagcagggggtggggtgtgagcttggagggcccctcccctggatttcctccaacacctgcttggatactaggcccactgtccctgaagggaatgtcagggaagtgtgcctgtgagctgaattaaaggactggcctttccagaaaacgctttggatctgagcagagtagtcagtttctcagacactcattccatactgcaccgtacatgccagcgtacccattgcaccgaaagcaggcccttagggcaggaagggacgatgagcaagtctgccacaccacctggtgactgggaagggctgcttctctcgtaagggtcttggggagaagtaagcccgcagcctgcctctgcacctcgttccagtgtcctgccaggctctgtactgtcctttgtgtatgaagaaaatgctgttagccctctctcaggctgctgttctgtgggtgctgagagctgccccccatcaccacgccatcacacccctctgagcagaagcaaatctgaggctgaagaattaagttttccccaagcaaggaaggcaggtggtcagagagatcaaacgctgaggcgtggggattgcaggattcaggaggcagcccctttggggaagaggagggtgcattttccatggagcccatgtcagagtccactccagctcagcaggaaagtggaattgcccagtactgcctgccagctgggtctcccaagcaactaccccaagacataccaacagtgaagccaggacagcaccatgccatcggcgctccagtctgtctggctgggaggaaagtgctgggcatcttacagtaactctagaagttcctttgactaggctgcaatcccacctatatgctcagccctaagagctgtggtttcctgtgctctcatttgtccattcattcattcattcattcattcagcaaataatctgaaatccagtctgaactaaggcctgagctgtggataccatggcgcgtgagttagatgtggtccctgccctcatggggctgacagtcctaaaatcaagtgctaggacacagtggccattgagctgggagcattcttccctctaccgcttaagccactgatggctgcgagcttgaagagagggattctgagggagagcttggtccatctggtcaccaaggctgggcgggacagagcagtcaagaaccacggtgtggcttgagaaacagtcctgcttcctgagcctctttgctctgcctcttggggcaagctccttaacctgtctgtatttttatgcctctgtctcccattcagttcctccttgaatacctctttctacagagaggcacgggctcccctgaaggattgtcgaggccagggttcgggaagtacactgccatcggtcaggggacagctgcctcccaccttgcctgggtgatggtgaatgggactcatcttttcctgccttgcttttgaggagatggttgaatttaagctaacaggaaagccaaaccagcaccctcctttgtgctctgagaggttggagacatctggtccaccccattgcccctgcccctggcaagccctgaagtcgggagaggtgaccacaggtctgaaaatcagccagtgccaacattgcttgccctgcaaggtgcaactgagcccacatagcgcattcatagtttccctgaccacagccttgggaagacggtggaaacccgaggatgtgtgggtttcccagctaacggacaagctcccctgccacacccagtgcccacgcatgctcacatacatacagcagaccacaaccctgttgccaagcagtgcttccaagggatagcgatccagattccaacattgtcttggagagggttagtccacatccaagttgcgtgagataagatgcaaagggctctgtgtggatgaggaacgcaccttagaggagtgggaaaggccaccagggttgggccctgtttaggtaattcctgttggcagcacctagagagagcatctgagctgaaggagtgggaaactttgcccaagcaatggcacgggcagcgggctctttctggcgccctgtgctggagcagggccaagtcttagggcatcacaaacagcccatttgatggagggagcagggacatagcacatttttgtctgtctttgtgaggctgctttgctaactctctgaggagaggaagcctctcgggctttccgtcggctggggctagtgccagagaatcccttctcagtggccagcaggttcctgggaggccggcacaaggcaccgctccccactcatgacaccttggtgcagagtgacctcctgcccagtcaccactccggccagccccagccaaacacacaaaagcccatggttgcggttgcatctacaccgttagttggcaaaggatcctgcttgagctctgcgtggtggccaaggagtagcatggaggagggccctgattttaaaaaggaaaaatagagaggcctcaaaacaatgaaacaaagagcttgatatgtcaagaggagaccaaggccctgggaggcataggcaagccgggcagagtcagaccagtgccctcccttgaccatctcctagcattccttaacctagacaggggctaccccatgtgagtccaagccagactttgtggctgtccccagcctgcacagcccaagcccagggaagtgtcctttctttcccttccttactaataatgggccttcctgagacacattcagagaaggatcagagagaaaggagaaccatccaggagagccacaagcgtccaccaaacagtgtctcaggcctcacctgaagctgctgttcctcctatcagcacactagtattaaatgggtgttccataatgaggagaatggaaataggtacaaggcatctagcttaggacagaatcggatttcggcatgtgaaggaatcccagagctgatctcattgaaatgatctatcgtacagacaaggatatgcaaatccacagaagtgaagggatttttgctcaagatcacatagctggtaaactaaggtaaggttagggcttgaacttgggccttctgactccttgtccagtcagtgttctttcatctcaccacagctgcctcctttgaaacagaggtattaagatctgtccttctggttcaccctctcatacctctttactgcgtctcccacatcccccacatgcctcccaaaatgaaagacaaacaggattgtttctgagaccaagatcagtctgtctgtgatcagcctgtgtgtggttcacccagtcatgcaattaagggcagatctgggccagtggaataggatagctgattggtgtttgttactgtgaaccctagaccgtaccccgtagaatggtgtctcttgctttgtaacacatcgggccttcagtgtgctgtattcctcagaagtgagggcatctcggtccattctgcccatggccacagggtgcagagaggcagcagggcccatgcaagctgccaccctgggatttgctgggctggagttcaacagatgtaaagacttcagtgaagcaataaacacaaaactctgggagaagatatccagaattttgtacattactctgtttctttttcaaaaatgaggcagatcagatgcccctgagctgcccctttttttctgattcccaactgcaatgtcctcagtcagtgttgtccctctgcccggctccccagctctttgccaacctcttcacactccccttgagctgagcatcagtcgcctgtgacgtggccaccttctgtcctgctcccactcccgacccatgctggaccccggaggacctcctgccccgcccccaccacacacccatatcccccaccattccaatttgttctttcccgtggggaattttttttcccagcgtctccatcccttcctacatatccacacacacacaaattggtctgatcttttttccattggttaaacatttaactccatgccagaccttgttttaacccctctcacatcatgttctttccttttttgcgagttattttgcattaaccaactttgtcagtgacagatgcgtatctgagggtgtcacacacgaccttcagcagggaagacttctgggccatggagggccgtctaatacatggacttataaactgactgcatgagcaatgaaaaggccaaattattctgaattttttttgaatcactgtaaaaaaactgatttcttttgtatagagaacactaaacgtataataaaagttgttcaaaatgg

SEQ ID NO: 297539 - DNA, 10654 bp, Artificial Sequence
  derived and/or modified sequence
gcacgggctggtctctgccctaatgcggcggctggcggcgagaggcgctgcaggggacgcgggggaagtggcggcgccggcagcggacagctcggacagcgcccagggccggagcccgagcccttggaggttgattgacttatgtgcaatttgggacgctggagtttaccttccctccgcagcctggaacagagcctcctctggtgttgcaaggaagaggctgaatgaggcagagaagctgagtgctgtccaggaggcccagttaaagcggctcgaggtgacaagaccccgagtgctggggagcagggagcagggccaggtgccgaggatggccaggcagccaccgccgccctgggtccatgcagccttcctcctctgcctcctcagtcttggcggagccatcgaaattcctatggatcctaaccctcaacataggttgacgcagccgccaaccatcaccaagcagtcagcgaaggatcacatcgtggacccccgtgataacatcctgattgagtgtgaagcaaaagggaaccctgcccccagcttccactggacacgaaacagcagattcttcaacatcgccaaggacccccgggtgtccatgaggaggaggtctgggaccctggtgattgacttccgcagtggcgggcggccggaggaatatgagggggaatatcagtgcttcgcccgcaacaaatttggcacggccctgtccaataggatccgcctgcaggtgtctaaatctcctctgtggcccaaggaaaacctagaccctgtcgtggtccaagagggcgctcctttgacgctccagtgcaaccccccgcctggacttccatccccggtcatcttctggatgagcagctccatggagcccatcacccaagacaaacgtgtctctcagggccataacggagacctatacttctccaacgtgatgctgcaggacatgcagaccgactacagttgtaacgcccgcttccacttcacccacaccatccagcagaagaaccctttcaccctcaaggtcctcaccacccgaggagttgcagaaagaacaccaagcttcatgtatccccagggcaccgcgagcagccagatggtgcttcgtggcatggacctcctgctggaatgcatcgcctccggggtcccaacaccagacatcgcatggtacaagaaaggtggggacctcccatctgataaggccaagtttgagaactttaataaggccctgcgtatcacaaatgtctctgaggaagactccggggagtatttctgcctggcctccaacaagatgggcagcatccggcacacgatctcggtgagagtaaaggctgctccctactggctggacgaacccaagaaccttattctggctcctggcgaggatgggagactggtgtgtcgagccaatggaaaccccaaacccactgtccagtggatggtgaatggggaacctttgcaatcggcaccacctaacccaaaccgtgaggtggccggagacaccatcatcttccgggacacccagatcagcagcagggctgtgtaccagtgcaacacctccaacgagcatggctacctgctggccaacgcctttgtcagtgtgctggatgtgccgcctcggatgctgtcgccccggaaccagctcattcgagtgattctttacaaccggacgcggctggactgccctttctttgggtctcccatccccacactgcgatggtttaagaatgggcaaggaagcaacctggatggtggcaactaccatgtttatgagaacggcagtctggaaattaagatgatccgcaaagaggaccagggcatctacacctgtgtcgccaccaacatcctgggcaaagctgaaaaccaagtccgcctggaggtcaaagaccccaccaggatctaccggatgcccgaggaccaggtggccagaaggggcaccacggtgcagctggagtgtcgggtgaagcacgacccctccctgaaactcaccgtctcctggctgaaggatgacgagccgctctatattggaaacaggatgaagaaggaagacgactccctgaccatctttggggtggcagagcgggaccagggcagttacacgtgtgtcgccagcaccgagctagaccaagacctggccaaggcctacctcaccgtgctagctgatcaggccactccaactaaccgtttggctgccctgcccaaaggacggccagaccggccccgggacctggagctgaccgacctggccgagaggagcgtgcggctgacctggatccccggggatgctaacaacagccccatcacagactacgtcgtccagtttgaagaagaccagttccaacctggggtctggcatgaccattccaagtaccccggcagcgttaactcagccgtcctccggctgtccccgtatgtcaactaccagttccgtgtcattgccatcaacgaggttgggagcagccaccccagcctcccatccgagcgctaccgaaccagtggagcaccccccgagtccaatcctggtgacgtgaagggagaggggaccagaaagaacaacatggagatcacgtggacgcccatgaatgccacctcggcctttggccccaacctgcgctacattgtcaagtggaggcggagagagactcgagaggcctggaacaacgtcacagtgtggggctctcgctacgtggtggggcagaccccagtctacgtgccctatgagatccgagtccaggctgaaaatgacttcgggaagggccctgagccagagtccgtcatcggttactccggagaagattatcccagggctgcgcccactgaagttaaagtccgagtcatgaacagcacagccatcagccttcagtggaaccgcgtctactccgacacggtccagggccagctcagagagtaccgagcctactactggagggagagcagcttgctgaagaacctgtgggtgtctcagaagagacagcaagccagcttccctggtgaccgcctccgtggcgtggtgtcccgcctcttcccctacagtaactacaagctggagatggttgtggtcaatgggagaggtgatgggcctcgcagtgagaccaaggagttcaccaccccggaaggagtacccagtgcccctaggcgtttccgagtccggcagcccaacctggagacaatcaacctggaatgggatcatcctgagcatccaaatgggatcatgattggatacactctcaaatatgtggcctttaacgggaccaaagtaggaaagcagatagtggaaaacttctctcccaatcagaccaagttcacggtgcaaagaacggaccccgtgtcacgctaccgctttaccctcagcgccaggacgcaggtgggctctggggaagccgtcacagaggagtcaccagcacccccgaatgaaggtagcccagtcatgtctcctcccacattgcccccgactaccgtgggtgcgacgggcgctgtgagcagtaccgatgctactgccattgctgccaccaccgaagccacaacagtccccatcatcccaactgtcgcacctaccaccatcgccaccaccaccaccgtcgccacaactactacaaccactgctgccgccaccaccaccacggagagtcctcccaccaccacctccgggactaagatacacgaatccgcccctgatgagcagtccatatggaacgtcacggtgctccccaacagtaaatgggccaacatcacctggaagcacaatttcgggcccggaactgactttgtggttgagtacatcgacagcaaccatacgaaaaaaactgtcccagttaaggcccaggctcagcctatacagctgacagacctctatcccgggatgacatacacgttgcgggtttattcccgggacaacgagggcatcagcagtaccgtcatcacctttatgaccagtacagcttacaccaacaaccaagcggacatcgccacccagggctggttcattgggcttatgtgcgccatcgccctcctggtgctgatcctgctcatcgtctgtttcatcaagaggagtcgcggcggcaagtacccagtacgagaaaagaaggatgttccccttggccctgaagaccccaaggaagaggatggctcatttgactatagtgatgaggacaacaagcccctgcagggcagtcagacatctctggacggcaccatcaagcagcaggagagtgacgacagcctggtggactatggcgagggtggcgagggtcagttcaatgaagacggctccttcatcggccagtacacggtcaaaaaggacaaggaggaaacagagggcaacgaaagctcagaggccacgtcacctgtcaatgctatctactctctggcctaacggagcccacccaggcacagccaccactttgcaagtgggaggaggggagaaggggagacaaaaccactgcagacctaccacgaagccaccaccaccttcagtaacaagggtacgatatgggggtctgccaagctgtgaggaccagtagccaccaagccacccacaagccccctcccaatgaccccccttcagccccgggtgccaccagtgtgggagagctggagccgtggctgagctcagctggagggagcctggccccttgcccggtctcgcagccaccccgagcgttccaccacactgtccgcccttggcctcggcacacgctcaccttttctgttggttacgggacttctcattgtcttaatttcgctttgtgcatcttcccctccagacccaatgtctctgttttcttttccttttgaaaaagagtccctggaaaagaaagaataagtggattctcccccaggagaatcctttttgcaaagataggcaaaaaggattgaatccataccagaacacgtagacaggctgtaatattcaaaccacctctgggccaatgcatttccaaaggatgcctttctcgccatatgcctcccctggcccccagcccctctgcctcggccttgtcagttgctgagctgggcttggctcctttctggaaaatgacagtatttttggcagggagaaggtgcgcaggcctccttgctgctctctggtttggttgggaggtgtgtttacctcttgctcctcattcctcccctgcccttttctctggaatatctaagatgtgagctgcattgactctgaagacgtttgaggaacaggagtgggcactgatagaaaggacttcaacgccagtgactgtgtacctccagcagaagaaaatcaggtgtctggtcttgggggcactgtgctcacttctagagagaagaaaaaggctgggtttggacttcatgcctcctcactggtgaaacccaggatgtagatagagggccacacccaccctgtccagagtagagggcacctgtccacgtggccagggcccatgctgccaccctcgaggagatggaaccctgtgatgcaaaagctttgctggtgtgtttggggcataaggcactgctccccttccatctctagcagatatcatcttctcagccaattctgtaggacactgaggctcttgtttgacatggtgtgtggatggggacttgccccaagactgagcaggtctgccctttcattggggtgtatacatatcaggggaccctgaggtggcaccgtactcagtgttgtgatgcccccacctagggaggactcaatgctctttgtatgccttatgcagcgctgatctgtccctggagttcccaggttcccagctccccccctgcaagccttgaagcctccagcaacgtctatctccaggagagcagggcagcctatgcaagtgttccggcaggaccagaagtggccactcaacacacgtcctcaccagtcaccccaaatggagacactcgcagacctgcagttctcagaccgaaggtgctgccttcatcctccccacctaatgcatttttgaaaccaaaggtacctagcctcagagacagagaaggagagggggagatcttgagtctaagaggaaccctttagctgtttctgcagctgaggtcagtttcaggagggtgaagctgatccccaggaatggatcagctgccatgggcacagcctccgatttgagcctctccggctgccagccagggggcctgggccagaccagggctctgtccttccgtgactttattaaagcaacatttgccacatgtttaagccgcaaaggtattagcaatgcttgcatcattaataatcattcagttgaaggtcaagcccatagacacacactctctgctggtaagaaaccatagcccagaactgagccaataaggttgtttgaacctgagagtgtgtaatggtcatttgggccaagcctcagctagggctgctgcctggacgcctgaggggcagcttatcacagtgcaaggggacagggtaaacagcagggggtggggtgtgagcttggagggcccctcccctggatttcctccaacacctgcttggatactaggcccactgtccctgaagggaatgtcagggaagtgtgcctgtgagctgaattaaaggactggcctttccagaaaacgctttggatctgagcagagtagtcagtttctcagacactcattccatactgcaccgtacatgccagcgtacccattgcaccgaaagcaggcccttagggcaggaagggacgatgagcaagtctgccacaccacctggtgactgggaagggctgcttctctcgtaagggtcttggggagaagtaagcccgcagcctgcctctgcacctcgttccagtgtcctgccaggctctgtactgtcctttgtgtatgaagaaaatgctgttagccctctctcaggctgctgttctgtgggtgctgagagctgccccccatcaccacgccatcacacccctctgagcagaagcaaatctgaggctgaagaattaagttttccccaagcaaggaaggcaggtggtcagagagatcaaacgctgaggcgtggggattgcaggattcaggaggcagcccctttggggaagaggagggtgcattttccatggagcccatgtcagagtccactccagctcagcaggaaagtggaattgcccagtactgcctgccagctgggtctcccaagcaactaccccaagacataccaacagtgaagccaggacagcaccatgccatcggcgctccagtctgtctggctgggaggaaagtgctgggcatcttacagtaactctagaagttcctttgactaggctgcaatcccacctatatgctcagccctaagagctgtggtttcctgtgctctcatttgtccattcattcattcattcattcattcagcaaataatctgaaatccagtctgaactaaggcctgagctgtggataccatggcgcgtgagttagatgtggtccctgccctcatggggctgacagtcctaaaatcaagtgctaggacacagtggccattgagctgggagcattcttccctctaccgcttaagccactgatggctgcgagcttgaagagagggattctgagggagagcttggtccatctggtcaccaaggctgggcgggacagagcagtcaagaaccacggtgtggcttgagaaacagtcctgcttcctgagcctctttgctctgcctcttggggcaagctccttaacctgtctgtatttttatgcctctgtctcccattcagttcctccttgaatacctctttctacagagaggcacgggctcccctgaaggattgtcgaggccagggttcgggaagtacactgccatcggtcaggggacagctgcctcccaccttgcctgggtgatggtgaatgggactcatcttttcctgccttgcttttgaggagatggttgaatttaagctaacaggaaagccaaaccagcaccctcctttgtgctctgagaggttggagacatctggtccaccccattgcccctgcccctggcaagccctgaagtcgggagaggtgaccacaggtctgaaaatcagccagtgccaacattgcttgccctgcaaggtgcaactgagcccacatagcgcattcatagtttccctgaccacagccttgggaagacggtggaaacccgaggatgtgtgggtttcccagctaacggacaagctcccctgccacacccagtgcccacgcatgctcacatacatacagcagaccacaaccctgttgccaagcagtgcttccaagggatagcgatccagattccaacattgtcttggagagggttagtccacatccaagttgcgtgagataagatgcaaagggctctgtgtggatgaggaacgcaccttagaggagtgggaaaggccaccagggttgggccctgtttaggtaattcctgttggcagcacctagagagagcatctgagctgaaggagtgggaaactttgcccaagcaatggcacgggcagcgggctctttctggcgccctgtgctggagcagggccaagtcttagggcatcacaaacagcccatttgatggagggagcagggacatagcacatttttgtctgtctttgtgaggctgctttgctaactctctgaggagaggaagcctctcgggctttccgtcggctggggctagtgccagagaatcccttctcagtggccagcaggttcctgggaggccggcacaaggcaccgctccccactcatgacaccttggtgcagagtgacctcctgcccagtcaccactccggccagccccagccaaacacacaaaagcccatggttgcggttgcatctacaccgttagttggcaaaggatcctgcttgagctctgcgtggtggccaaggagtagcatggaggagggccctgattttaaaaaggaaaaatagagaggcctcaaaacaatgaaacaaagagcttgatatgtcaagaggagaccaaggccctgggaggcataggcaagccgggcagagtcagaccagtgccctcccttgaccatctcctagcattccttaacctagacaggggctaccccatgtgagtccaagccagactttgtggctgtccccagcctgcacagcccaagcccagggaagtgtcctttctttcccttccttactaataatgggccttcctgagacacattcagagaaggatcagagagaaaggagaaccatccaggagagccacaagcgtccaccaaacagtgtctcaggcctcacctgaagctgctgttcctcctatcagcacactagtattaaatgggtgttccataatgaggagaatggaaataggtacaaggcatctagcttaggacagaatcggatttcggcatgtgaaggaatcccagagctgatctcattgaaatgatctatcgtacagacaaggatatgcaaatccacagaagtgaagggatttttgctcaagatcacatagctggtaaactaaggtaaggttagggcttgaacttgggccttctgactccttgtccagtcagtgttctttcatctcaccacagctgcctcctttgaaacagaggtattaagatctgtccttctggttcaccctctcatacctctttactgcgtctcccacatcccccacatgcctcccaaaatgaaagacaaacaggattgtttctgagaccaagatcagtctgtctgtgatcagcctgtgtgtggttcacccagtcatgcaattaagggcagatctgggccagtggaataggatagctgattggtgtttgttactgtgaaccctagaccgtaccccgtagaatggtgtctcttgctttgtaacacatcgggccttcagtgtgctgtattcctcagaagtgagggcatctcggtccattctgcccatggccacagggtgcagagaggcagcagggcccatgcaagctgccaccctgggatttgctgggctggagttcaacagatgtaaagacttcagtgaagcaataaacacaaaactctgggagaagatatccagaattttgtacattactctgtttctttttcaaaaatgaggcagatcagatgcccctgagctgcccctttttttctgattcccaactgcaatgtcctcagtcagtgttgtccctctgcccggctccccagctctttgccaacctcttcacactccccttgagctgagcatcagtcgcctgtgacgtggccaccttctgtcctgctcccactcccgacccatgctggaccccggaggacctcctgccccgcccccaccacacacccatatcccccaccattccaatttgttctttcccgtggggaattttttttcccagcgtctccatcccttcctacatatccacacacacacaaattggtctgatcttttttccattggttaaacatttaactccatgccagaccttgttttaacccctctcacatcatgttctttccttttttgcgagttattttgcattaaccaactttgtcagtgacagatgcgtatctgagggtgtcacacacgaccttcagcagggaagacttctgggccatggagggccgtctaatacatggacttataaactgactgcatgagcaatgaaaaggccaaattattctgaattttttttgaatcactgtaaaaaaactgatttcttttgtatagagaacactaaacgtataataaaagttgttcaaaatgg

SEQ ID NO: 297540 - DNA, 2462 bp, Artificial Sequence
  derived and/or modified sequence
gaggcgctgcaggggacgcgggggaagtggcggcgccggcagcggacagctcggacagcgcccagggccggagcccgagcccttggaggttgattgacttatgtgcaatttgggacgctggagtttaccttccctccgcagcctggaacagagcctcctctggtgttgcaaggaagaggctgaatgaggcagagaagctgagtgctgtccaggaggcccagttaaagcggctcgaggtgacaagaccccgagtgctggggagcagggagcagggccaggtgccgaggatggccaggcagccaccgccgccctgggtccatgcagccttcctcctctgcctcctcagtcttggcggagccatcgaaattcctatggatccaagcattcagaatgagctgacgcagccgccaaccatcaccaagcagtcagcgaaggatcacatcgtggacccccgtgataacatcctgattgagtgtgaagcaaaagggaaccctgcccccagcttccactggacacgaaacagcagattcttcaacatcgccaaggacccccgggtgtccatgaggaggaggtctgggaccctggtgattgacttccgcagtggcgggcggccggaggaatatgagggggaatatcagtgcttcgcccgcaacaaatttggcacggccctgtccaataggatccgcctgcaggtgtctaaatctcctctgtggcccaaggaaaacctagaccctgtcgtggtccaagagggcgctcctttgacgctccagtgcaaccccccgcctggacttccatccccggtcatcttctggatgagcagctccatggagcccatcacccaagacaaacgtgtctctcagggccataacggagacctatacttctccaacgtgatgctgcaggacatgcagaccgactacagttgtaacgcccgcttccacttcacccacaccatccagcagaagaaccctttcaccctcaaggtcctcaccacccgaggagttgcagaaagaacaccaagcttcatgtatccccagggcaccgcgagcagccagatggtgcttcgtggcatggacctcctgctggaatgcatcgcctccggggtcccaacaccagacatcgcatggtacaagaaaggtggggacctcccatctgataaggccaagtttgagaactttaataaggccctgcgtatcacaaatgtctctgaggaagactccggggagtatttctgcctggcctccaacaagatgggcagcatccggcacacgatctcggtgagagtaaaggctgctccctactggctggacgaacccaagaaccttattctggctcctggcgaggatgggagactggtgtgtcgagccaatggaaaccccaaacccactgtccagtggatggtgaatggggaacctttgcaatcggcaccacctaacccaaaccgtgaggtggccggagacaccatcatcttccgggacacccagatcagcagcagggctgtgtaccagtgcaacacctccaacgagcatggctacctgctggccaacgcctttgtcagtgtgctggatgtgccgcctcggatgctgtcgccccggaaccagctcattcgagtgattctttacaaccggacgcggctggactgccctttctttgggtctcccatccccacactgcgatggtttaagaatgggcaaggaagcaacctggatggtggcaactaccatgtttatgagaacggcagtctggaaattaagatgatccgcaaagaggaccagggcatctacacctgtgtcgccaccaacatcctgggcaaagctgaaaaccaagtccgcctggaggtcaaagaccccaccaggatctaccggatgcccgaggaccaggtggccagaaggggcaccacggtgcagctggagtgtcgggtgaagcacgacccctccctgaaactcaccgtctcctggctgaaggatgacgagccgctctatattggaaacaggatgaagaaggaagacgactccctgaccatctttggggtggcagagcgggaccagggcagttacacgtgtgtcgccagcaccgagctagaccaagacctggccaaggcctacctcaccgtgctaggtaactgcccatgctcaccctggcactgaccagccccaccccctccccagcagccagagaagcagtggcccggggcagttccgagggcagtgcctgcagtcaagtggccgggtcaggcgtggtgatctcttcttgcctcgtgatgtcagggttagggagctgccagtttcagaacaagctgtgctggacaggttacctcctgagtggagtcattaacttccccacgtctcaactgaaaggggcctgagtgatatagagaaagtggagaggggtttctcgttgtgatcattttacctttcttacagctaactccaccactaagtcaattaaaacaatccatcctt

SEQ ID NO: 297541 - protein, 1224 aa, Artificial Sequence
  derived and/or modified sequence
MARQPPPPWVHAAFLLCLLSLGGAIEIPMDPNPQHRLTQPPTITKQSAKDHIVDPRDNILIECEAKGNPAPSFHWTRNSRFFNIAKDPRVSMRRRSGTLVIDFRSGGRPEEYEGEYQCFARNKFGTALSNRIRLQVSKSPLWPKENLDPVVVQEGAPLTLQCNPPPGLPSPVIFWMSSSMEPITQDKRVSQGHNGDLYFSNVMLQDMQTDYSCNARFHFTHTIQQKNPFTLKVLTTRGVAERTPSFMYPQGTASSQMVLRGMDLLLECIASGVPTPDIAWYKKGGDLPSDKAKFENFNKALRITNVSEEDSGEYFCLASNKMGSIRHTISVRVKAAPYWLDEPKNLILAPGEDGRLVCRANGNPKPTVQWMVNGEPLQSAPPNPNREVAGDTIIFRDTQISSRAVYQCNTSNEHGYLLANAFVSVLDVPPRMLSPRNQLIRVILYNRTRLDCPFFGSPIPTLRWFKNGQGSNLDGGNYHVYENGSLEIKMIRKEDQGIYTCVATNILGKAENQVRLEVKDPTRIYRMPEDQVARRGTTVQLECRVKHDPSLKLTVSWLKDDEPLYIGNRMKKEDDSLTIFGVAERDQGSYTCVASTELDQDLAKAYLTVLADQATPTNRLAALPKGRPDRPRDLELTDLAERSVRLTWIPGDANNSPITDYVVQFEEDQFQPGVWHDHSKYPGSVNSAVLRLSPYVNYQFRVIAINEVGSSHPSLPSERYRTSGAPPESNPGDVKGEGTRKNNMEITWTPMNATSAFGPNLRYIVKWRRRETREAWNNVTVWGSRYVVGQTPVYVPYEIRVQAENDFGKGPEPESVIGYSGEDYPRAAPTEVKVRVMNSTAISLQWNRVYSDTVQGQLREYRAYYWRESSLLKNLWVSQKRQQASFPGDRLRGVVSRLFPYSNYKLEMVVVNGRGDGPRSETKEFTTPEGVPSAPRRFRVRQPNLETINLEWDHPEHPNGIMIGYTLKYVAFNGTKVGKQIVENFSPNQTKFTVQRTDPVSRYRFTLSARTQVGSGEAVTEESPAPPNEGNHTKKTVPVKAQAQPIQLTDLYPGMTYTLRVYSRDNEGISSTVITFMTSTAYTNNQADIATQGWFIGLMCAIALLVLILLIVCFIKRSRGGKYPVREKKDVPLGPEDPKEEDGSFDYSDEDNKPLQGSQTSLDGTIKQQESDDSLVDYGEGGEGQFNEDGSFIGQYTVKKDKEETEGNESSEATSPVNAIYSLA

SEQ ID NO: 297542 - protein, 1268 aa, Artificial Sequence
  derived and/or modified sequence
MARQPPPPWVHAAFLLCLLSLGGAIEIPMDPNPQHRLTQPPTITKQSAKDHIVDPRDNILIECEAKGNPAPSFHWTRNSRFFNIAKDPRVSMRRRSGTLVIDFRSGGRPEEYEGEYQCFARNKFGTALSNRIRLQVSKSPLWPKENLDPVVVQEGAPLTLQCNPPPGLPSPVIFWMSSSMEPITQDKRVSQGHNGDLYFSNVMLQDMQTDYSCNARFHFTHTIQQKNPFTLKVLTTRGVAERTPSFMYPQGTASSQMVLRGMDLLLECIASGVPTPDIAWYKKGGDLPSDKAKFENFNKALRITNVSEEDSGEYFCLASNKMGSIRHTISVRVKAAPYWLDEPKNLILAPGEDGRLVCRANGNPKPTVQWMVNGEPLQSAPPNPNREVAGDTIIFRDTQISSRAVYQCNTSNEHGYLLANAFVSVLDVPPRMLSPRNQLIRVILYNRTRLDCPFFGSPIPTLRWFKNGQGSNLDGGNYHVYENGSLEIKMIRKEDQGIYTCVATNILGKAENQVRLEVKDPTRIYRMPEDQVARRGTTVQLECRVKHDPSLKLTVSWLKDDEPLYIGNRMKKEDDSLTIFGVAERDQGSYTCVASTELDQDLAKAYLTVLADQATPTNRLAALPKGRPDRPRDLELTDLAERSVRLTWIPGDANNSPITDYVVQFEEDQFQPGVWHDHSKYPGSVNSAVLRLSPYVNYQFRVIAINEVGSSHPSLPSERYRTSGAPPESNPGDVKGEGTRKNNMEITWTPMNATSAFGPNLRYIVKWRRRETREAWNNVTVWGSRYVVGQTPVYVPYEIRVQAENDFGKGPEPESVIGYSGEDYPRAAPTEVKVRVMNSTAISLQWNRVYSDTVQGQLREYRAYYWRESSLLKNLWVSQKRQQASFPGDRLRGVVSRLFPYSNYKLEMVVVNGRGDGPRSETKEFTTPEGVPSAPRRFRVRQPNLETINLEWDHPEHPNGIMIGYTLKYVAFNGTKVGKQIVENFSPNQTKFTVQRTDPVSRYRFTLSARTQVGSGEAVTEESPAPPNEGSPVMSPDEQSIWNVTVLPNSKWANITWKHNFGPGTDFVVEYIDSNHTKKTVPVKAQAQPIQLTDLYPGMTYTLRVYSRDNEGISSTVITFMTSTAYTNNQADIATQGWFIGLMCAIALLVLILLIVCFIKRSRGGKYPVREKKDVPLGPEDPKEEDGSFDYSDEDNKPLQGSQTSLDGTIKQQESDDSLVDYGEGGEGQFNEDGSFIGQYTVKKDKEETEGNESSEATSPVNAIYSLA

SEQ ID NO: 297543 - DNA, 3675 bp, Artificial Sequence
  derived and/or modified sequence
atggccagacagcccccccccccctgggtgcacgccgccttcctgctgtgcctgctgagcctgggcggcgccatcgagatccccatggaccccaacccccagcacagactgacccagccccccaccatcaccaagcagagcgccaaggaccacatcgtggaccccagagacaacatcctgatcgagtgcgaggccaagggcaaccccgcccccagcttccactggaccagaaacagcagattcttcaacatcgccaaggaccccagagtgagcatgagaagaagaagcggcaccctggtgatcgacttcagaagcggcggcagacccgaggagtacgagggcgagtaccagtgcttcgccagaaacaagttcggcaccgccctgagcaacagaatcagactgcaggtgagcaagagccccctgtggcccaaggagaacctggaccccgtggtggtgcaggagggcgcccccctgaccctgcagtgcaaccccccccccggcctgcccagccccgtgatcttctggatgagcagcagcatggagcccatcacccaggacaagagagtgagccagggccacaacggcgacctgtacttcagcaacgtgatgctgcaggacatgcagaccgactacagctgcaacgccagattccacttcacccacaccatccagcagaagaaccccttcaccctgaaggtgctgaccaccagaggcgtggccgagagaacccccagcttcatgtacccccagggcaccgccagcagccagatggtgctgagaggcatggacctgctgctggagtgcatcgccagcggcgtgcccacccccgacatcgcctggtacaagaagggcggcgacctgcccagcgacaaggccaagttcgagaacttcaacaaggccctgagaatcaccaacgtgagcgaggaggacagcggcgagtacttctgcctggccagcaacaagatgggcagcatcagacacaccatcagcgtgagagtgaaggccgccccctactggctggacgagcccaagaacctgatcctggcccccggcgaggacggcagactggtgtgcagagccaacggcaaccccaagcccaccgtgcagtggatggtgaacggcgagcccctgcagagcgccccccccaaccccaacagagaggtggccggcgacaccatcatcttcagagacacccagatcagcagcagagccgtgtaccagtgcaacaccagcaacgagcacggctacctgctggccaacgccttcgtgagcgtgctggacgtgccccccagaatgctgagccccagaaaccagctgatcagagtgatcctgtacaacagaaccagactggactgccccttcttcggcagccccatccccaccctgagatggttcaagaacggccagggcagcaacctggacggcggcaactaccacgtgtacgagaacggcagcctggagatcaagatgatcagaaaggaggaccagggcatctacacctgcgtggccaccaacatcctgggcaaggccgagaaccaggtgagactggaggtgaaggaccccaccagaatctacagaatgcccgaggaccaggtggccagaagaggcaccaccgtgcagctggagtgcagagtgaagcacgaccccagcctgaagctgaccgtgagctggctgaaggacgacgagcccctgtacatcggcaacagaatgaagaaggaggacgacagcctgaccatcttcggcgtggccgagagagaccagggcagctacacctgcgtggccagcaccgagctggaccaggacctggccaaggcctacctgaccgtgctggccgaccaggccacccccaccaacagactggccgccctgcccaagggcagacccgacagacccagagacctggagctgaccgacctggccgagagaagcgtgagactgacctggatccccggcgacgccaacaacagccccatcaccgactacgtggtgcagttcgaggaggaccagttccagcccggcgtgtggcacgaccacagcaagtaccccggcagcgtgaacagcgccgtgctgagactgagcccctacgtgaactaccagttcagagtgatcgccatcaacgaggtgggcagcagccaccccagcctgcccagcgagagatacagaaccagcggcgccccccccgagagcaaccccggcgacgtgaagggcgagggcaccagaaagaacaacatggagatcacctggacccccatgaacgccaccagcgccttcggccccaacctgagatacatcgtgaagtggagaagaagagagaccagagaggcctggaacaacgtgaccgtgtggggcagcagatacgtggtgggccagacccccgtgtacgtgccctacgagatcagagtgcaggccgagaacgacttcggcaagggccccgagcccgagagcgtgatcggctacagcggcgaggactaccccagagccgcccccaccgaggtgaaggtgagagtgatgaacagcaccgccatcagcctgcagtggaacagagtgtacagcgacaccgtgcagggccagctgagagagtacagagcctactactggagagagagcagcctgctgaagaacctgtgggtgagccagaagagacagcaggccagcttccccggcgacagactgagaggcgtggtgagcagactgttcccctacagcaactacaagctggagatggtggtggtgaacggcagaggcgacggccccagaagcgagaccaaggagttcaccacccccgagggcgtgcccagcgcccccagaagattcagagtgagacagcccaacctggagaccatcaacctggagtgggaccaccccgagcaccccaacggcatcatgatcggctacaccctgaagtacgtggccttcaacggcaccaaggtgggcaagcagatcgtggagaacttcagccccaaccagaccaagttcaccgtgcagagaaccgaccccgtgagcagatacagattcaccctgagcgccagaacccaggtgggcagcggcgaggccgtgaccgaggagagccccgccccccccaacgagggcaaccacaccaagaagaccgtgcccgtgaaggcccaggcccagcccatccagctgaccgacctgtaccccggcatgacctacaccctgagagtgtacagcagagacaacgagggcatcagcagcaccgtgatcaccttcatgaccagcaccgcctacaccaacaaccaggccgacatcgccacccagggctggttcatcggcctgatgtgcgccatcgccctgctggtgctgatcctgctgatcgtgtgcttcatcaagagaagcagaggcggcaagtaccccgtgagagagaagaaggacgtgcccctgggccccgaggaccccaaggaggaggacggcagcttcgactacagcgacgaggacaacaagcccctgcagggcagccagaccagcctggacggcaccatcaagcagcaggagagcgacgacagcctggtggactacggcgagggcggcgagggccagttcaacgaggacggcagcttcatcggccagtacaccgtgaagaaggacaaggaggagaccgagggcaacgagagcagcgaggccaccagccccgtgaacgccatctacagcctggcctag

SEQ ID NO: 297544 - DNA, 3807 bp, Artificial Sequence
  derived and/or modified sequence
atggccagacagcccccccccccctgggtgcacgccgccttcctgctgtgcctgctgagcctgggcggcgccatcgagatccccatggaccccaacccccagcacagactgacccagccccccaccatcaccaagcagagcgccaaggaccacatcgtggaccccagagacaacatcctgatcgagtgcgaggccaagggcaaccccgcccccagcttccactggaccagaaacagcagattcttcaacatcgccaaggaccccagagtgagcatgagaagaagaagcggcaccctggtgatcgacttcagaagcggcggcagacccgaggagtacgagggcgagtaccagtgcttcgccagaaacaagttcggcaccgccctgagcaacagaatcagactgcaggtgagcaagagccccctgtggcccaaggagaacctggaccccgtggtggtgcaggagggcgcccccctgaccctgcagtgcaaccccccccccggcctgcccagccccgtgatcttctggatgagcagcagcatggagcccatcacccaggacaagagagtgagccagggccacaacggcgacctgtacttcagcaacgtgatgctgcaggacatgcagaccgactacagctgcaacgccagattccacttcacccacaccatccagcagaagaaccccttcaccctgaaggtgctgaccaccagaggcgtggccgagagaacccccagcttcatgtacccccagggcaccgccagcagccagatggtgctgagaggcatggacctgctgctggagtgcatcgccagcggcgtgcccacccccgacatcgcctggtacaagaagggcggcgacctgcccagcgacaaggccaagttcgagaacttcaacaaggccctgagaatcaccaacgtgagcgaggaggacagcggcgagtacttctgcctggccagcaacaagatgggcagcatcagacacaccatcagcgtgagagtgaaggccgccccctactggctggacgagcccaagaacctgatcctggcccccggcgaggacggcagactggtgtgcagagccaacggcaaccccaagcccaccgtgcagtggatggtgaacggcgagcccctgcagagcgccccccccaaccccaacagagaggtggccggcgacaccatcatcttcagagacacccagatcagcagcagagccgtgtaccagtgcaacaccagcaacgagcacggctacctgctggccaacgccttcgtgagcgtgctggacgtgccccccagaatgctgagccccagaaaccagctgatcagagtgatcctgtacaacagaaccagactggactgccccttcttcggcagccccatccccaccctgagatggttcaagaacggccagggcagcaacctggacggcggcaactaccacgtgtacgagaacggcagcctggagatcaagatgatcagaaaggaggaccagggcatctacacctgcgtggccaccaacatcctgggcaaggccgagaaccaggtgagactggaggtgaaggaccccaccagaatctacagaatgcccgaggaccaggtggccagaagaggcaccaccgtgcagctggagtgcagagtgaagcacgaccccagcctgaagctgaccgtgagctggctgaaggacgacgagcccctgtacatcggcaacagaatgaagaaggaggacgacagcctgaccatcttcggcgtggccgagagagaccagggcagctacacctgcgtggccagcaccgagctggaccaggacctggccaaggcctacctgaccgtgctggccgaccaggccacccccaccaacagactggccgccctgcccaagggcagacccgacagacccagagacctggagctgaccgacctggccgagagaagcgtgagactgacctggatccccggcgacgccaacaacagccccatcaccgactacgtggtgcagttcgaggaggaccagttccagcccggcgtgtggcacgaccacagcaagtaccccggcagcgtgaacagcgccgtgctgagactgagcccctacgtgaactaccagttcagagtgatcgccatcaacgaggtgggcagcagccaccccagcctgcccagcgagagatacagaaccagcggcgccccccccgagagcaaccccggcgacgtgaagggcgagggcaccagaaagaacaacatggagatcacctggacccccatgaacgccaccagcgccttcggccccaacctgagatacatcgtgaagtggagaagaagagagaccagagaggcctggaacaacgtgaccgtgtggggcagcagatacgtggtgggccagacccccgtgtacgtgccctacgagatcagagtgcaggccgagaacgacttcggcaagggccccgagcccgagagcgtgatcggctacagcggcgaggactaccccagagccgcccccaccgaggtgaaggtgagagtgatgaacagcaccgccatcagcctgcagtggaacagagtgtacagcgacaccgtgcagggccagctgagagagtacagagcctactactggagagagagcagcctgctgaagaacctgtgggtgagccagaagagacagcaggccagcttccccggcgacagactgagaggcgtggtgagcagactgttcccctacagcaactacaagctggagatggtggtggtgaacggcagaggcgacggccccagaagcgagaccaaggagttcaccacccccgagggcgtgcccagcgcccccagaagattcagagtgagacagcccaacctggagaccatcaacctggagtgggaccaccccgagcaccccaacggcatcatgatcggctacaccctgaagtacgtggccttcaacggcaccaaggtgggcaagcagatcgtggagaacttcagccccaaccagaccaagttcaccgtgcagagaaccgaccccgtgagcagatacagattcaccctgagcgccagaacccaggtgggcagcggcgaggccgtgaccgaggagagccccgccccccccaacgagggcagccccgtgatgagccccgacgagcagagcatctggaacgtgaccgtgctgcccaacagcaagtgggccaacatcacctggaagcacaacttcggccccggcaccgacttcgtggtggagtacatcgacagcaaccacaccaagaagaccgtgcccgtgaaggcccaggcccagcccatccagctgaccgacctgtaccccggcatgacctacaccctgagagtgtacagcagagacaacgagggcatcagcagcaccgtgatcaccttcatgaccagcaccgcctacaccaacaaccaggccgacatcgccacccagggctggttcatcggcctgatgtgcgccatcgccctgctggtgctgatcctgctgatcgtgtgcttcatcaagagaagcagaggcggcaagtaccccgtgagagagaagaaggacgtgcccctgggccccgaggaccccaaggaggaggacggcagcttcgactacagcgacgaggacaacaagcccctgcagggcagccagaccagcctggacggcaccatcaagcagcaggagagcgacgacagcctggtggactacggcgagggcggcgagggccagttcaacgaggacggcagcttcatcggccagtacaccgtgaagaaggacaaggaggagaccgagggcaacgagagcagcgaggccaccagccccgtgaacgccatctacagcctggcctag

SEQ ID NO: 297545 - DNA, 3675 bp, Artificial Sequence
  derived and/or modified sequence
atggcacgccagccccctcctccttgggtgcacgctgctttcttgctctgtctgctctctttgggtggagcaatcgaaatacccatggatccaaatccccagcatcgactgacccagccccctacaataaccaagcagagcgccaaggaccatattgtcgacccgcgagacaacattctcatcgaatgtgaggccaagggaaaccccgctccctcattccattggacaagaaattcacgattttttaatattgctaaagatccacgagttagtatgagacgtagatcgggcacactggtgatagattttagatccggtggcaggcctgaggagtacgagggcgaatatcagtgttttgcccggaacaaattcgggaccgctctgagcaacagaattcggttgcaggtgtccaaatccccattgtggccgaaggagaacttagatcccgtcgtcgtacaggaaggcgcaccccttaccctgcagtgtaacccaccgcctggtctcccaagccctgtcatcttctggatgagcagctccatggaaccaatcacccaggacaagcgggtgagccagggacacaacggagacctctacttcagcaacgtaatgctgcaggatatgcagactgactatagctgtaatgcccgtttccactttactcatactattcaacagaagaatccatttaccttgaaagtactgactacaaggggcgtggcggaaaggaccccctctttcatgtaccctcagggaactgcaagcagccagatggtgcttcgcggcatggatctgttgttggaatgcattgcgtccggtgtccccacacccgacattgcatggtacaagaaaggaggcgatctgccctcagacaaggccaaattcgagaattttaataaagctttgcgcatcactaacgtcagcgaagaggactctggcgagtatttctgcctagcctcgaataagatgggctcaattcgccacactatcagcgttcgtgtgaaagctgctccgtattggttggatgaacctaagaacctcatcctggcccctggggaagacgggaggctcgtctgcagagcaaatgggaatccgaaacccacagtgcaatggatggttaacggggaacccctacaatccgctcctccaaacccaaatagagaagtggctggggatactattattttccgtgatacacagatatcgtcaagagctgtttaccaatgcaatacttcaaatgagcatggttatcttctagccaatgctttcgtatccgtcctcgacgtgcccccgcggatgctcagtcccagaaaccagctcattcgggtgatactctacaacaggactagacttgactgtcctttttttgggtcgcccattcctacattgcgctggttcaaaaacggccagggtagtaatctggacggtggcaattatcacgtatatgaaaacgggagcctagaaataaagatgatcagaaaagaggaccaggggatctacacctgcgtggccactaatatcctggggaaagcggaaaatcaggtgcgactagaggtgaaagaccctactagaatttaccgaatgccagaggatcaggttgctagacgcgggaccactgtgcaactcgaatgcagggttaaacacgacccttctttaaaactgacggtgagctggttgaaggatgacgaacccctgtacatcggaaatcgtatgaaaaaagaggacgatagcctgactatctttggggtcgccgagcgcgatcagggctcctacacctgcgtggcttcaaccgaactagatcaggatttggccaaagcttacctgacagtactcgctgaccaggccacaccaactaataggctggcagctctccctaaaggccgtccagatcggcctagggatctggagctaactgatctcgccgaacggagtgtcagactcacatggatcccaggcgacgccaacaactcgccaataactgattatgtggtccaattcgaggaagaccagtttcaacccggcgtttggcatgaccacagtaagtatccgggctccgtgaattccgctgtgctcagactttctccctacgtgaattatcaattccgtgtcatagcgatcaacgaggtgggctcctcgcacccaagcctgccttccgaacgctatcgcacttccggggcccctcccgaatcgaatcctggcgacgtcaagggagaagggaccagaaagaacaatatggagatcacgtggacgcccatgaatgctacaagcgcctttgggcccaatctgagatatatcgtaaagtggcggcgacgggagaccagagaggcctggaacaatgtgactgtctgggggagccgctatgttgttgggcaaacccccgtgtacgtgccctatgaaatccgcgtgcaggcagagaatgactttgggaaaggtccagagcctgaatcagttataggctactcaggagaagattatcctcgggccgcccctaccgaggtgaaagtccgggtcatgaattctacagctataagcctgcagtggaacagagtgtacagcgataccgttcaagggcagctgagggagtatcgcgcctactattggcgcgaatcttcgctcctgaaaaatctctgggtgtctcaaaaaagacagcaggcgtctttcccgggggatcgcttgaggggagtggtatcccgcctgttcccctatagtaattataaactggagatggtggtagtgaacggtcggggcgacggccccaggtcggagactaaggagtttactacaccagaaggcgtaccttctgcgccaaggcgatttagggttaggcaacccaacttggaaacgattaatttagagtgggaccatccagaacatcccaatggtattatgatcggctacacattgaagtatgtggcctttaatggcacaaaagtgggtaaacagatcgtggagaactttagccctaaccaaaccaaatttactgtccagcgcacggaccctgtatctaggtacaggttcaccctctcagcccggacccaggtgggcagtggggaggcagtaacggaggaatcgcccgctccgccgaacgagggaaatcacaccaagaagactgttcccgtcaaagcccaggcccagcccatccagctgactgatctgtatccaggcatgacttacacactgcgtgtctattctagggacaacgaggggatcagtagtaccgtcattacttttatgacaagcaccgcctacacgaataatcaggccgacattgctactcagggctggttcatcggattaatgtgcgcaatcgccctcctggtgctcatactcttgattgtgtgctttattaagcgaagccggggaggcaagtaccccgtgcgtgaaaagaaggacgttcctctgggccctgaagaccccaaagaagaagatggttcttttgactatagcgacgaagacaacaaacctctgcagggctctcagacaagtcttgacgggacaatcaagcagcaggagagcgatgacagtctggtggattacggagagggcggtgaggggcagtttaatgaggacggaagcttcattggacagtacactgtgaaaaaagacaaggaagagaccgaaggtaacgagtcttctgaggccacctctccggttaacgctatctactctctggcttag

SEQ ID NO: 297546 - DNA, 3807 bp, Artificial Sequence
  derived and/or modified sequence
atggccaggcaacctccaccaccctgggtacatgcagccttcctcttatgtctgctgagccttggaggagctattgagataccaatggacccgaatccacagcacagactcactcagcctcctacgataacaaaacagagtgcaaaggaccacatcgtcgaccctagggacaatattcttattgagtgcgaggctaaggggaacccagcaccgtcattccactggacccggaacagtcggttcttcaacattgccaaggatccaagggtatctatgaggaggcggtccggtacgctggtaattgactttcgatccggcgggcgccccgaggagtacgagggcgaataccagtgcttcgcccgaaacaagtttggaaccgccctgtccaatcgaatacgtctgcaggtatccaaatcacctctgtggccaaaagaaaatctggacccagtcgtggtgcaggaaggggccccgttgacactgcagtgtaacccccccccaggtcttccatcaccagtaattttttggatgagcagctcgatggaacccataacccaggacaaacgggtgtcccagggtcataacggcgacctttatttctccaatgttatgttacaagacatgcagaccgattattcctgtaatgccagattccattttacccacacgatccagcaaaaaaacccattcactcttaaggtgcttaccactaggggcgtcgctgaacgtactcccagcttcatgtaccctcagggcacggcatcaagccagatggttttgcgtgggatggatctgcttctggaatgcattgcctcgggcgtgcccacacccgacatcgcatggtacaagaaaggtggtgatctgccatcagacaaggccaaatttgagaattttaataaggctttgaggatcacgaatgtgtccgaagaagatagcggcgagtatttttgtctcgcatccaataagatgggcagtatccgccacactatatctgtgcgcgtgaaggccgccccatactggctggatgaaccgaagaatcttattttagcaccgggtgaagacggccgcctcgtgtgcagggcgaatggcaatccaaagccaacagttcaatggatggtaaacggggagccactccagtccgctccccccaaccccaatcgcgaggtggccggcgatacaataatttttcgcgatacccaaataagctcccgagccgtgtaccagtgtaacacaagtaatgaacacgggtacctcctggcaaatgcctttgtctccgtgctcgacgttccaccgagaatgctgtcacccaggaaccagctgattcgggtgatactgtacaatcgcactcgcctggactgtccattctttggtagtcctattcctaccttaagatggttcaaaaatggacaggggtccaatcttgatgggggaaattaccacgtatacgaaaatggctctcttgagatcaagatgattcgcaaagaggaccagggaatatacacctgtgtggctacgaacatcctgggtaaagcagagaaccaagtaaggctggaggttaaagatccaacaagaatctatcgaatgcccgaggaccaagtggctaggcggggtacaaccgtccaactggagtgtcgcgtaaaacatgatccttccctgaagctgactgtgtcatggcttaaggacgacgagccactgtatatcggaaaccgaatgaagaaagaggatgacagtttaacaatatttggggtcgctgaacgggatcaaggcagctacacatgcgttgcctcaactgagttagatcaggatcttgcaaaagcttatctgaccgttttggccgaccaggccactccaaccaacaggctggcggccctgcccaaaggtcgtcccgatcggccaagagaccttgaactaactgatctggccgaacgctcagtacgactgacctggatccctggagacgccaataactccccgatcaccgactacgtcgtgcagtttgaggaggatcagtttcaaccgggagtttggcacgaccactcaaagtaccccgggtctgtcaattccgcagtgctgcgcctgagtccctacgttaattaccagtttagagtaatcgccattaatgaggtggggagttctcatccatctctcccatcagagagatataggacaagcggggcccctcctgagtcgaatcctggtgacgtgaaaggcgaaggaacaagaaagaacaatatggagattacttggactccgatgaatgccacgagtgctttcggccccaacctcaggtacatcgtaaagtggcgtcggcgagagacccgtgaagcatggaataacgtgactgtgtgggggtcgagatacgtggttggacagacacccgtttatgtcccatacgagataagagtgcaagctgagaacgacttcgggaagggtccagagcccgaaagtgttatcggctactcaggcgaggactatccaagagccgcaccaaccgaggtgaaggtgagagtcatgaatagcactgcaattagcttacaatggaacagggtatacagcgacaccgtccagggccagctgagggaataccgcgcttactactggagggaatcaagtcttctgaagaatctttgggtctcccaaaagcgacagcaggctagttttcccggagatcgattgcgcggcgtggtttccagactatttccttacagcaactacaagctcgaaatggtggtggtgaatggccggggggatggccccaggagcgaaacgaaagaattcaccacccctgagggcgtacccagcgcacccagacggttcagagttaggcagccgaatttggaaactatcaacctggagtgggaccaccctgagcacccaaacggcattatgatcggatacacgctcaaatacgtcgcctttaatgggaccaaggtaggcaagcaaatcgtggagaacttctcacctaatcagactaagtttactgtgcagaggactgatccagttagcaggtaccggtttacactgagtgcccgcacccaagtgggatcaggagaggccgtgactgaagagtcacctgccccacccaatgagggttctccggttatgtcacctgacgagcagagcatatggaatgtgacggtcctgcccaacagcaaatgggcgaatattacctggaaacataactttggacctggtacagacttcgtcgtcgagtacatagattctaaccacacaaagaagaccgttccggtgaaagctcaagcccagccaatccagctgactgacttgtatcctggcatgacatacaccctgcgcgtgtattcgagggataacgaagggatctcttccacagtgataactttcatgacaagcactgcgtataccaacaaccaggcagacatcgctacccaggggtggttcattggcctcatgtgcgctattgccctgcttgtattgatccttctaattgtctgttttataaaacgcagtaggggcgggaagtacccagttagggaaaaaaaagacgtgccattgggtcccgaagatccaaaagaagaggatggcagttttgactattcagacgaggataataagccccttcaggggtctcagacaagcctggatggcaccatcaaacaacaggaatccgacgattctttggtcgactacggcgaaggcggtgagggacagttcaatgaggacggaagcttcattgggcagtatactgtgaagaaagataaagaagagaccgagggcaatgaaagtagcgaagccactagcccagtgaatgcaatttactccctcgcttag

SEQ ID NO: 297547 - DNA, 3675 bp, Artificial Sequence
  derived and/or modified sequence
atggcccggcagcccccaccaccctgggtgcacgccgccttcctgctgtgcctgctgagcctgggcggggccatcgagatccccatggaccccaacccccagcaccggctgacccagccccccaccatcaccaagcagagcgccaaggaccacatcgtggacccccgggacaacatcctgattgaatgtgaggccaagggcaacccagcccccagcttccactggaccaggaacagccgcttcttcaacatcgccaaggacccccgggtgtccatgagaagaagaagtggcaccctggtgattgacttccgcagcggcggccggcctgaggagtatgaaggagagtaccagtgctttgccaggaacaagtttggaacagccctgagcaaccgcatccggctgcaggtgtccaagagccccctgtggcccaaggagaacctggaccctgtggtggtgcaggagggcgcccccctgaccctgcagtgcaaccccccacctggcctgcccagccctgtgatcttctggatgagcagctccatggagcccatcacccaggacaagagggtgtcccagggccacaacggggacctgtacttcagcaatgtgatgctgcaggacatgcagacagactacagctgcaatgcccgcttccacttcacccacaccatccagcagaagaaccccttcaccctgaaggtgctgaccacccggggcgtggccgagaggacccccagcttcatgtacccccagggcacagccagcagccagatggtgctgcggggcatggacctgctgctggagtgcatcgccagcggcgtgcccaccccagacatcgcctggtacaagaagggcggggacctgcccagcgacaaggccaagtttgagaacttcaacaaggccctgcgcatcaccaacgtgtctgaagaagattctggagagtacttctgcctggccagcaacaagatgggcagcatccgccacaccatctctgtgcgggtgaaggccgccccctactggctggatgagcccaagaacctgatcctggcccctggagaagatggccgcctggtgtgccgggccaatggaaaccccaagcccaccgtgcagtggatggtgaatggagagcccctgcagagcgccccacccaaccccaaccgggaggtggccggggacaccatcatcttccgggacacccagatcagcagcagagctgtgtaccagtgcaacaccagcaatgagcacggctacctgctggccaatgcctttgtgtctgtgctggatgtgccccccaggatgctgagccccaggaaccagctgatccgggtcatcctgtacaacagaacccggctggactgccccttcttcggcagccccatccccaccctgcgctggttcaagaatggccagggcagcaacctggatggcggcaactaccacgtgtatgaaaatggcagcctggagatcaagatgatcaggaaggaggaccagggcatctacacctgtgtggccaccaacatcctgggcaaggccgagaaccaggtgcggctggaggtgaaggaccccacccgcatctacaggatgcctgaggaccaggtggcccggcggggcaccaccgtgcagctggagtgccgggtgaagcatgaccccagcctgaagctgactgtgtcctggctgaaggatgatgagcccctgtacatcggcaacaggatgaagaaggaggatgacagcctgaccatcttcggcgtggccgagcgggaccagggcagctacacctgtgtggccagcacagagctggaccaggacctggccaaggcctacctgactgtgctggccgaccaggccacccccaccaaccggctggccgccctgcccaagggccgcccagaccggccccgggacctggagctgacagacctggccgagaggtctgtgcggctgacctggatccctggagatgccaacaacagccccatcacagattatgtggtgcagtttgaggaggaccagttccagcccggggtgtggcatgaccacagcaagtacccaggctctgtgaacagcgctgtgctgcggctgagcccctacgtgaactaccagttccgggtgattgccatcaatgaggtgggcagcagccaccccagcctgcccagcgagcgctaccgcaccagcggggcccctcctgagagcaaccctggagatgtgaagggggagggcaccaggaagaacaacatggagatcacctggacccccatgaatgccaccagcgccttcggccccaacctgcgctacatcgtgaagtggaggagaagagagacccgggaggcctggaacaacgtgacagtgtggggcagccgctacgtggtgggccagacccctgtgtatgtgccctatgagatccgggtgcaggccgagaatgactttggaaaaggacctgagcctgagagcgtgattggctacagcggggaggactaccccagggctgcccccacagaggtgaaggtgcgggtgatgaacagcacagccatcagcctgcagtggaacagagtgtacagcgacacagtgcagggccagctgcgggagtaccgggcctactactggagggagagcagcctgctgaagaacctgtgggtgtcccagaagaggcagcaggccagcttccctggggaccggctgcggggcgtggtgtcccggctcttcccctacagcaactacaagctggagatggtggtggtgaatggaagaggagatggccccaggtctgagaccaaggagttcaccaccccagagggcgtgcccagcgccccccggcgcttccgggtgcggcagcccaacctggagaccatcaacctggagtgggaccaccctgagcaccccaacggcatcatgattggctacaccctgaagtatgtggccttcaacggcaccaaggtgggcaagcagatcgtggagaacttcagccccaaccagaccaagttcaccgtgcagaggacagatcctgtgagccgctaccgcttcaccctgagcgcccggacccaggtgggcagcggggaggccgtgacagaggagagccctgcccccccaaatgaaggcaaccacaccaagaagacagtgcctgtgaaggcccaggcccagcccatccagctgacagacctgtacccaggcatgacctacaccctgcgggtgtacagccgggacaatgaaggcatcagcagcaccgtcatcaccttcatgaccagcacagcctacaccaacaaccaggccgacatcgccacccagggctggttcatcggcctgatgtgtgccatcgccctgctggtgctgatcctgctgattgtgtgcttcatcaagaggagccggggcggcaagtaccctgtgcgggagaagaaggatgtgcccctgggccctgaggaccccaaggaggaggatggcagctttgactacagtgatgaggacaacaagcccctgcagggcagccagaccagcctggatggcaccatcaagcagcaggagagtgatgacagcctggtggactatggagagggcggggagggccagttcaatgaagatggcagcttcatcggccagtacacagtgaagaaggacaaggaggagacagagggcaatgaatcttctgaggccaccagccctgtgaatgccatctacagcctggcctag

SEQ ID NO: 297548 - DNA, 3807 bp, Artificial Sequence
  derived and/or modified sequence
atggcccggcagcccccaccaccctgggtgcacgccgccttcctgctgtgcctgctgagcctgggcggggccatcgagatccccatggaccccaacccccagcaccggctgacccagccccccaccatcaccaagcagagcgccaaggaccacatcgtggacccccgggacaacatcctgattgaatgtgaggccaagggcaacccagcccccagcttccactggaccaggaacagccgcttcttcaacatcgccaaggacccccgggtgtccatgagaagaagaagtggcaccctggtgattgacttccgcagcggcggccggcctgaggagtatgaaggagagtaccagtgctttgccaggaacaagtttggaacagccctgagcaaccgcatccggctgcaggtgtccaagagccccctgtggcccaaggagaacctggaccctgtggtggtgcaggagggcgcccccctgaccctgcagtgcaaccccccacctggcctgcccagccctgtgatcttctggatgagcagctccatggagcccatcacccaggacaagagggtgtcccagggccacaacggggacctgtacttcagcaatgtgatgctgcaggacatgcagacagactacagctgcaatgcccgcttccacttcacccacaccatccagcagaagaaccccttcaccctgaaggtgctgaccacccggggcgtggccgagaggacccccagcttcatgtacccccagggcacagccagcagccagatggtgctgcggggcatggacctgctgctggagtgcatcgccagcggcgtgcccaccccagacatcgcctggtacaagaagggcggggacctgcccagcgacaaggccaagtttgagaacttcaacaaggccctgcgcatcaccaacgtgtctgaagaagattctggagagtacttctgcctggccagcaacaagatgggcagcatccgccacaccatctctgtgcgggtgaaggccgccccctactggctggatgagcccaagaacctgatcctggcccctggagaagatggccgcctggtgtgccgggccaatggaaaccccaagcccaccgtgcagtggatggtgaatggagagcccctgcagagcgccccacccaaccccaaccgggaggtggccggggacaccatcatcttccgggacacccagatcagcagcagagctgtgtaccagtgcaacaccagcaatgagcacggctacctgctggccaatgcctttgtgtctgtgctggatgtgccccccaggatgctgagccccaggaaccagctgatccgggtcatcctgtacaacagaacccggctggactgccccttcttcggcagccccatccccaccctgcgctggttcaagaatggccagggcagcaacctggatggcggcaactaccacgtgtatgaaaatggcagcctggagatcaagatgatcaggaaggaggaccagggcatctacacctgtgtggccaccaacatcctgggcaaggccgagaaccaggtgcggctggaggtgaaggaccccacccgcatctacaggatgcctgaggaccaggtggcccggcggggcaccaccgtgcagctggagtgccgggtgaagcatgaccccagcctgaagctgactgtgtcctggctgaaggatgatgagcccctgtacatcggcaacaggatgaagaaggaggatgacagcctgaccatcttcggcgtggccgagcgggaccagggcagctacacctgtgtggccagcacagagctggaccaggacctggccaaggcctacctgactgtgctggccgaccaggccacccccaccaaccggctggccgccctgcccaagggccgcccagaccggccccgggacctggagctgacagacctggccgagaggtctgtgcggctgacctggatccctggagatgccaacaacagccccatcacagattatgtggtgcagtttgaggaggaccagttccagcccggggtgtggcatgaccacagcaagtacccaggctctgtgaacagcgctgtgctgcggctgagcccctacgtgaactaccagttccgggtgattgccatcaatgaggtgggcagcagccaccccagcctgcccagcgagcgctaccgcaccagcggggcccctcctgagagcaaccctggagatgtgaagggggagggcaccaggaagaacaacatggagatcacctggacccccatgaatgccaccagcgccttcggccccaacctgcgctacatcgtgaagtggaggagaagagagacccgggaggcctggaacaacgtgacagtgtggggcagccgctacgtggtgggccagacccctgtgtatgtgccctatgagatccgggtgcaggccgagaatgactttggaaaaggacctgagcctgagagcgtgattggctacagcggggaggactaccccagggctgcccccacagaggtgaaggtgcgggtgatgaacagcacagccatcagcctgcagtggaacagagtgtacagcgacacagtgcagggccagctgcgggagtaccgggcctactactggagggagagcagcctgctgaagaacctgtgggtgtcccagaagaggcagcaggccagcttccctggggaccggctgcggggcgtggtgtcccggctcttcccctacagcaactacaagctggagatggtggtggtgaatggaagaggagatggccccaggtctgagaccaaggagttcaccaccccagagggcgtgcccagcgccccccggcgcttccgggtgcggcagcccaacctggagaccatcaacctggagtgggaccaccctgagcaccccaacggcatcatgattggctacaccctgaagtatgtggccttcaacggcaccaaggtgggcaagcagatcgtggagaacttcagccccaaccagaccaagttcaccgtgcagaggacagatcctgtgagccgctaccgcttcaccctgagcgcccggacccaggtgggcagcggggaggccgtgacagaggagagccctgcccccccaaatgaaggcagccctgtgatgagcccagatgagcagagcatctggaatgtgacagtgctgcccaacagcaagtgggccaacatcacctggaagcacaactttggacctggaacagactttgtggtggagtacatcgacagcaaccacaccaagaagacagtgcctgtgaaggcccaggcccagcccatccagctgacagacctgtacccaggcatgacctacaccctgcgggtgtacagccgggacaatgaaggcatcagcagcaccgtcatcaccttcatgaccagcacagcctacaccaacaaccaggccgacatcgccacccagggctggttcatcggcctgatgtgtgccatcgccctgctggtgctgatcctgctgattgtgtgcttcatcaagaggagccggggcggcaagtaccctgtgcgggagaagaaggatgtgcccctgggccctgaggaccccaaggaggaggatggcagctttgactacagtgatgaggacaacaagcccctgcagggcagccagaccagcctggatggcaccatcaagcagcaggagagtgatgacagcctggtggactatggagagggcggggagggccagttcaatgaagatggcagcttcatcggccagtacacagtgaagaaggacaaggaggagacagagggcaatgaatcttctgaggccaccagccctgtgaatgccatctacagcctggcctag

SEQ ID NO: 297549 - DNA, 3675 bp, Artificial Sequence
  derived and/or modified sequence
atggcccggcagcccccccccccctgggtgcacgccgccttcctgctgtgcctgctgagtttagggggggcgattgagatccctatggaccctaacccacagcacaggctgactcagccacctaccattactaaacagtctgccaaagaccatatcgttgaccctcgcgataatatacttattgagtgtgaggctaagggcaatccagcaccgtcctttcattggacccgaaactcccgcttctttaatattgccaaagatcctcgcgtctccatgcgccggaggagcggcacactggttatcgattttcggtctggtgggcggcccgaagagtacgaaggtgaataccaatgctttgccaggaataagtttggcaccgctctgagcaacagaattagactccaggtgtctaaaagccctctgtggccaaaagaaaatttagacccagtggtggtgcaggaaggcgcacccctcacactacaatgcaacccaccccctgggctgccgagcccagtcatcttctggatgtcttcatctatggaaccaatcacacaagataagagggtgtctcagggccataatggggatctctattttagcaacgtgatgctgcaagacatgcagaccgactattcttgcaacgccagattccattttacccatactatacagcagaagaatccattcacgctcaaggtgctgactacccgaggtgttgcagagagaacgcccagcttcatgtacccccagggcaccgcatcttctcagatggttctccggggtatggatcttttgttggagtgtattgcctccggcgttccaacccccgatatcgcctggtacaagaaaggaggcgatttaccatcggacaaggcaaaattcgagaacttcaataaggcgctccgcataaccaacgtgagtgaggaggactcgggagagtacttctgcctggctagcaataaaatgggctccatcaggcatacaataagtgtgcgggtcaaagccgccccttactggcttgatgagcccaaaaatttaatcctcgcgccgggggaggatgggagactggtctgccgagcaaacggaaacccaaagcccactgtgcagtggatggtcaatggggaaccactccagagtgctccacccaatccaaatagggaggtggctggagatacaattatcttccgcgatactcagatctcctcccgagctgtgtatcagtgtaataccagtaatgagcatgggtacctgctcgccaacgcctttgtgtccgtgctcgatgtcccaccaaggatgctgagtccacgcaaccagttgatccgcgttatactgtataatcggacccgcctggactgcccattctttggctctccgatacctacacttaggtggtttaagaatggacagggcagtaatcttgatggagggaattaccacgtctacgaaaacggtagccttgaaattaaaatgatacggaaagaggaccaagggatatacacatgcgtggccacgaatatccttggcaaagccgagaatcaagtgcgactggaggtcaaagacccaacccgcatttataggatgccggaggaccaggtcgctagacgggggacaactgtccagctcgagtgccgggttaaacacgatccttccctgaagctcaccgtcagttggttaaaagatgatgaaccactgtacataggcaataggatgaaaaaggaggacgattcgctcacaatcttcggggtcgcggagagagatcagggaagctacacatgtgtggcatctaccgagcttgaccaagacttagctaaagcctatctgacagtgttagccgatcaggcaacccccaccaatcgcttagcagctctgccaaaagggcgcccagacaggcctcgagacctggaactgacagatctggctgagaggagcgtccgtctgacttggatcccaggggacgcaaataattcacccatcaccgattatgttgtacagtttgaggaggaccagttccaaccaggtgtttggcatgatcactccaagtatcccggatcagtcaacagtgccgtcctgagactgagcccatacgttaattaccagtttcgtgtcattgcgattaatgaggtaggatcctcacacccctcgcttcctagtgagcgctatcggacgtcaggcgccccacccgaatcaaaccctggagacgtcaaaggcgaaggaacacgaaagaataacatggagattacttggacaccaatgaatgcgactagtgctttcggtcctaaccttcgctatattgtcaagtggcggcggcgagaaacgcgcgaggcctggaacaatgtgacagtgtggggcagccggtatgtagtgggacaaacacctgtgtatgtgccttatgagatccgggtccaagccgagaacgacttcgggaaaggacctgagccagaatctgtgatcggctattctggtgaagactatccacgggccgccccgactgaggttaaagttagggtgatgaactcaactgctatcagcttgcaatggaatagggtgtacagcgacacagtgcaaggccaactgagagagtatcgggcatattattggagggaatccagtctgttgaagaacttgtgggtgtctcaaaagaggcagcaggccagctttccaggcgataggctcagaggagtggttagccggctctttccctacagtaactacaaacttgaaatggtggtcgtgaatggtcgcggagatggaccccgatccgagacgaaggagtttaccaccccagagggcgttccctcagcaccccgaaggtttcgtgttcgtcagccaaacctagagacaatcaatctggaatgggaccaccctgaacacccaaacgggattatgattggatatacactaaagtatgtggcttttaacggcactaaagttggcaagcagattgtggaaaatttttctcccaatcagactaaatttacggtgcaaagaacagatcccgtatccaggtataggttcaccctgagcgctcgcacccaagtagggagtggcgaagccgttactgaagaatccccagcacctcctaatgagggtaatcacacgaagaagaccgtccccgtgaaagcacaggcccaaccaatccagttgactgacctgtatcctggtatgacgtatactttacgcgtctatagtcgagataatgaaggcatctcctctacagtcataacatttatgacctccaccgcgtataccaataatcaggccgatatcgccacacagggatggttcataggactgatgtgtgccattgccctgcttgtcctgattctgctcattgtctgcttcattaagagaagtcgtggcggaaagtacccagtccgggagaaaaaagacgttcccctgggcccggaggacccaaaggaggaggacgggagttttgattactccgacgaagacaataaaccgctccaggggtcacagacgagtcttgacggcacaattaaacaacaagagtctgacgacagtctcgtagactacggcgagggtggggaaggccagtttaatgaagacgggtcattcatcggtcaatacacagttaagaaagacaaggaagaaactgagggcaacgagtcctcggaggccacaagccccgtaaacgctatttattctctggcatag

SEQ ID NO: 297550 - DNA, 3807 bp, Artificial Sequence
  derived and/or modified sequence
atggcccggcagcccccccccccctgggtgcacgccgccttcctgctgtgcttactatctctgggtggcgccattgagatcccgatggaccccaacccacagcatagactgacacagcctcctaccatcaccaagcagagtgccaaggaccacatcgtagaccccagagacaacattctgattgagtgcgaagccaagggtaatccagctcctagcttccactggacaagaaatagtcgtttcttcaacatcgcgaaagatcccagggtgtccatgcggcggcggtccggcacgctcgtgattgactttaggtccggtggacgcccagaagagtatgagggggagtatcaatgctttgctaggaacaagtttgggaccgcactcagcaatagaataaggctccaggttagcaagagccccctctggcctaaagagaatctggaccccgtggtggtacaggagggggcccctctgacactccaatgtaatcctccacctgggcttccatcgccagtgatcttttggatgagctcctctatggaacctattacacaagacaaacgagtttcccagggccacaatggagatctctatttttcgaacgttatgctgcaggatatgcagactgactactcctgtaacgcaagatttcattttacacatacgatccaacagaagaatccctttactctgaaagtcttgacaacacgtggggttgccgagcgtacaccctcattcatgtatccacaagggacagcgtcaagccagatggtgcttcgtgggatggatttgttgctggagtgcattgcctctggcgtgccaacaccagatatagcgtggtacaagaaagggggagatcttcccagtgacaaggcaaaatttgagaattttaacaaggcacttagaattacaaacgtgagcgaagaggactctggagagtacttttgcctagcgtcaaataagatgggtagcattcgccatacaataagcgtgcgcgtcaaggcagccccctactggctggatgagcccaagaatctgatcctggcccctggagaggatggaagactcgtgtgcagggccaatggtaaccctaagccaaccgtgcaatggatggtgaatggagaacccctgcaatctgcgccaccaaacccaaatagagaggtagccggggacacaatcattttccgggacacccagattagcagtagagccgtgtatcagtgtaacacatctaacgagcacggctacctactggctaatgctttcgtgagcgttttagacgtgcctcctcgaatgttgtctcctcgaaaccagttgatccgggtgatcctgtataaccgcaccaggctcgattgcccattttttggaagcccaatcccaaccctccgatggttcaagaatggtcaagggagcaaccttgatgggggtaattaccacgtgtatgagaatggcagcctggagatcaagatgatcaggaaggaagatcaggggatctacacttgtgtggccacaaacatactcggaaaagcagaaaaccaggttaggctggaggtcaaggatcccacccggatctacaggatgccagaagaccaggtggcgcgcagaggtacaaccgtgcagctggagtgtagggtgaagcatgatccatcattaaagctcaccgtgtcttggctcaaagacgacgagccgctgtacatcggcaatcgcatgaaaaaagaggacgactcactcactatttttggcgtggcagaaagggatcaaggcagctatacctgtgtggcatctaccgaactggaccaggatctggctaaagcgtacctcaccgttctggctgaccaggccactcccaccaatagactcgccgctctgcctaaagggcggccggaccggccaagggacctggagcttacagatctggcggagcgatctgtgagactgacttggatccctggcgatgccaacaatagtcccataacggattatgtggttcagttcgaggaagaccagttccagcccggcgtttggcacgaccactccaagtaccctgggagcgtcaattcagccgtcttacgactgtcgccatacgtgaactatcaattccgggtcatagcaattaacgaagtgggaagctctcatcctagtctgcccagcgagcgttacagaactagcggtgcacccccagagtccaacccaggtgacgtgaaaggagaggggactcgtaaaaataacatggagattacatggactccaatgaatgcgacttcagcttttggacccaacttgcgttatatcgttaaatggaggaggcgggagacaagagaggcttggaacaacgtgacggtgtgggggtcaagatatgtcgttggtcagacccccgtgtacgtgccgtacgagattagagtgcaggcagaaaacgatttcggtaagggccctgagcctgaaagcgtaataggttactccggcgaggattatccacgagctgcccccacggaggttaaggtgagagtgatgaattccaccgccattagcctgcaatggaaccgggtttattccgatactgtccagggacagctgagagagtatcgggcctactactggagagaatctagcctactgaaaaacttatgggtatcacagaagcgtcagcaggcttccttcccgggtgaccgactaagaggtgtggtgagccgcctgtttccatactcgaattacaaactcgagatggtggttgttaatggtcgtggagatggcccacgatctgaaacaaaggaattcacgaccccagagggcgtgcctagtgctcctaggcggttcagagtgaggcagcccaacctagaaacgatcaatctcgaatgggatcatcctgaacatcccaatgggattatgatcgggtacacactcaagtatgtagcttttaacgggaccaaggtaggaaaacaaatcgtcgaaaacttttcccctaaccagactaagttcactgtgcagagaactgacccggtgagcaggtataggtttacacttagtgccagaacgcaggtgggcagtggtgaagctgtcacagaagaaagccccgcacctcctaatgaggggagtccagtgatgagcccggatgaacaatcaatttggaacgttaccgtattgcctaactctaagtgggcaaatattacttggaaacataacttcggccccgggacagattttgttgtcgaatacattgactccaaccatactaaaaagacagtcccagtgaaggcgcaagcccaacccatccagctgactgacctgtaccctggtatgacatacaccctaagagtatacagccgggataacgaagggatctcatctaccgtgataacatttatgacttctactgcttatactaataaccaggctgacatcgcaacacaaggatggttcattgggctaatgtgtgccatagcgttgctggtgctgatccttctcattgtttgctttattaagcgatctcgaggcgggaagtacccggttagggaaaaaaaagacgtacctctggggcccgaggatccaaaggaagaagacggttctttcgactattctgatgaagataataaaccacttcagggatcccagacgtcgctggacgggacaatcaagcaacaggaaagcgacgactctttggttgattatggagaaggaggggagggtcaatttaacgaggacggaagttttattggacagtataccgtgaaaaaagataaggaggagaccgaagggaacgaaagctctgaggccacatctccggtcaatgccatctacagcctagcatag

SEQ ID NO: 297551 - DNA, 10417 bp, Artificial Sequence
  derived and/or modified sequence
gcacgggctggtctctgccctaatgcggcggctggcggcgagaggcgctgcaggggacgcgggggaagtggcggcgccggcagcggacagctcggacagcgcccagggccggagcccgagcccttggaggttgattgacttatgtgcaatttgggacgctggagtttaccttccctccgcagcctggaacagagcctcctctggtgttgcaaggaagaggctgaatgaggcagagaagctgagtgctgtccaggaggcccagttaaagcggctcgaggtgacaagaccccgagtgctggggagcagggagcagggccaggtgccgaggatggccaggcagccaccgccgccctgggtccatgcagccttcctcctctgcctcctcagtcttggcggagccatcgaaattcctatggatcctaaccctcaacataggttgacgcagccgccaaccatcaccaagcagtcagcgaaggatcacatcgtggacccccgtgataacatcctgattgagtgtgaagcaaaagggaaccctgcccccagcttccactggacacgaaacagcagattcttcaacatcgccaaggacccccgggtgtccatgaggaggaggtctgggaccctggtgattgacttccgcagtggcgggcggccggaggaatatgagggggaatatcagtgcttcgcccgcaacaaatttggcacggccctgtccaataggatccgcctgcaggtgtctaaatctcctctgtggcccaaggaaaacctagaccctgtcgtggtccaagagggcgctcctttgacgctccagtgcaaccccccgcctggacttccatccccggtcatcttctggatgagcagctccatggagcccatcacccaagacaaacgtgtctctcagggccataacggagacctatacttctccaacgtgatgctgcaggacatgcagaccgactacagttgtaacgcccgcttccacttcacccacaccatccagcagaagaaccctttcaccctcaaggtcctcaccacccgaggagttgcagaaagaacaccaagcttcatgtatccccagggcaccgcgagcagccagatggtgcttcgtggcatggacctcctgctggaatgcatcgcctccggggtcccaacaccagacatcgcatggtacaagaaaggtggggacctcccatctgataaggccaagtttgagaactttaataaggccctgcgtatcacaaatgtctctgaggaagactccggggagtatttctgcctggcctccaacaagatgggcagcatccggcacacgatctcggtgagagtaaaggctgctccctactggctggacgaacccaagaaccttattctggctcctggcgaggatgggagactggtgtgtcgagccaatggaaaccccaaacccactgtccagtggatggtgaatggggaacctttgcaatcggcaccacctaacccaaaccgtgaggtggccggagacaccatcatcttccgggacacccagatcagcagcagggctgtgtaccagtgcaacacctccaacgagcatggctacctgctggccaacgcctttgtcagtgtgctggatgtgccgcctcggatgctgtcgccccggaaccagctcattcgagtgattctttacaaccggacgcggctggactgccctttctttgggtctcccatccccacactgcgatggtttaagaatgggcaaggaagcaacctggatggtggcaactaccatgtttatgagaacggcagtctggaaattaagatgatccgcaaagaggaccagggcatctacacctgtgtcgccaccaacatcctgggcaaagctgaaaaccaagtccgcctggaggtcaaagaccccaccaggatctaccggatgcccgaggaccaggtggccagaaggggcaccacggtgcagctggagtgtcgggtgaagcacgacccctccctgaaactcaccgtctcctggctgaaggatgacgagccgctctatattggaaacaggatgaagaaggaagacgactccctgaccatctttggggtggcagagcgggaccagggcagttacacgtgtgtcgccagcaccgagctagaccaagacctggccaaggcctacctcaccgtgctagctgatcaggccactccaactaaccgtttggctgccctgcccaaaggacggccagaccggccccgggacctggagctgaccgacctggccgagaggagcgtgcggctgacctggatccccggggatgctaacaacagccccatcacagactacgtcgtccagtttgaagaagaccagttccaacctggggtctggcatgaccattccaagtaccccggcagcgttaactcagccgtcctccggctgtccccgtatgtcaactaccagttccgtgtcattgccatcaacgaggttgggagcagccaccccagcctcccatccgagcgctaccgaaccagtggagcaccccccgagtccaatcctggtgacgtgaagggagaggggaccagaaagaacaacatggagatcacgtggacgcccatgaatgccacctcggcctttggccccaacctgcgctacattgtcaagtggaggcggagagagactcgagaggcctggaacaacgtcacagtgtggggctctcgctacgtggtggggcagaccccagtctacgtgccctatgagatccgagtccaggctgaaaatgacttcgggaagggccctgagccagagtccgtcatcggttactccggagaagattatcccagggctgcgcccactgaagttaaagtccgagtcatgaacagcacagccatcagccttcagtggaaccgcgtctactccgacacggtccagggccagctcagagagtaccgagcctactactggagggagagcagcttgctgaagaacctgtgggtgtctcagaagagacagcaagccagcttccctggtgaccgcctccgtggcgtggtgtcccgcctcttcccctacagtaactacaagctggagatggttgtggtcaatgggagaggtgatgggcctcgcagtgagaccaaggagttcaccaccccggaaggagtacccagtgcccctaggcgtttccgagtccggcagcccaacctggagacaatcaacctggaatgggatcatcctgagcatccaaatgggatcatgattggatacactctcaaatatgtggcctttaacgggaccaaagtaggaaagcagatagtggaaaacttctctcccaatcagaccaagttcacggtgcaaagaacggaccccgtgtcacgctaccgctttaccctcagcgccaggacgcaggtgggctctggggaagccgtcacagaggagtcaccagcacccccgaatgaaggtagcccagtcatgtcccctgatgagcagtccatatggaacgtcacggtgctccccaacagtaaatgggccaacatcacctggaagcacaatttcgggcccggaactgactttgtggttgagtacatcgacagcaaccatacgaaaaaaactgtcccagttaaggcccaggctcagcctatacagctgacagacctctatcccgggatgacatacacgttgcgggtttattcccgggacaacgagggcatcagcagtaccgtcatcacctttatgaccagtacagcttacaccaacaaccaagcggacatcgccacccagggctggttcattgggcttatgtgcgccatcgccctcctggtgctgatcctgctcatcgtctgtttcatcaagaggagtcgcggcggcaagtacccagtacgagaaaagaaggatgttccccttggccctgaagaccccaaggaagaggatggctcatttgactatagtgatgaggacaacaagcccctgcagggcagtcagacatctctggacggcaccatcaagcagcaggagagtgacgacagcctggtggactatggcgagggtggcgagggtcagttcaatgaagacggctccttcatcggccagtacacggtcaaaaaggacaaggaggaaacagagggcaacgaaagctcagaggccacgtcacctgtcaatgctatctactctctggcctaacggagcccacccaggcacagccaccactttgcaagtgggaggaggggagaaggggagacaaaaccactgcagacctaccacgaagccaccaccaccttcagtaacaagggtacgatatgggggtctgccaagctgtgaggaccagtagccaccaagccacccacaagccccctcccaatgaccccccttcagccccgggtgccaccagtgtgggagagctggagccgtggctgagctcagctggagggagcctggccccttgcccggtctcgcagccaccccgagcgttccaccacactgtccgcccttggcctcggcacacgctcaccttttctgttggttacgggacttctcattgtcttaatttcgctttgtgcatcttcccctccagacccaatgtctctgttttcttttccttttgaaaaagagtccctggaaaagaaagaataagtggattctcccccaggagaatcctttttgcaaagataggcaaaaaggattgaatccataccagaacacgtagacaggctgtaatattcaaaccacctctgggccaatgcatttccaaaggatgcctttctcgccatatgcctcccctggcccccagcccctctgcctcggccttgtcagttgctgagctgggcttggctcctttctggaaaatgacagtatttttggcagggagaaggtgcgcaggcctccttgctgctctctggtttggttgggaggtgtgtttacctcttgctcctcattcctcccctgcccttttctctggaatatctaagatgtgagctgcattgactctgaagacgtttgaggaacaggagtgggcactgatagaaaggacttcaacgccagtgactgtgtacctccagcagaagaaaatcaggtgtctggtcttgggggcactgtgctcacttctagagagaagaaaaaggctgggtttggacttcatgcctcctcactggtgaaacccaggatgtagatagagggccacacccaccctgtccagagtagagggcacctgtccacgtggccagggcccatgctgccaccctcgaggagatggaaccctgtgatgcaaaagctttgctggtgtgtttggggcataaggcactgctccccttccatctctagcagatatcatcttctcagccaattctgtaggacactgaggctcttgtttgacatggtgtgtggatggggacttgccccaagactgagcaggtctgccctttcattggggtgtatacatatcaggggaccctgaggtggcaccgtactcagtgttgtgatgcccccacctagggaggactcaatgctctttgtatgccttatgcagcgctgatctgtccctggagttcccaggttcccagctccccccctgcaagccttgaagcctccagcaacgtctatctccaggagagcagggcagcctatgcaagtgttccggcaggaccagaagtggccactcaacacacgtcctcaccagtcaccccaaatggagacactcgcagacctgcagttctcagaccgaaggtgctgccttcatcctccccacctaatgcatttttgaaaccaaaggtacctagcctcagagacagagaaggagagggggagatcttgagtctaagaggaaccctttagctgtttctgcagctgaggtcagtttcaggagggtgaagctgatccccaggaatggatcagctgccatgggcacagcctccgatttgagcctctccggctgccagccagggggcctgggccagaccagggctctgtccttccgtgactttattaaagcaacatttgccacatgtttaagccgcaaaggtattagcaatgcttgcatcattaataatcattcagttgaaggtcaagcccatagacacacactctctgctggtaagaaaccatagcccagaactgagccaataaggttgtttgaacctgagagtgtgtaatggtcatttgggccaagcctcagctagggctgctgcctggacgcctgaggggcagcttatcacagtgcaaggggacagggtaaacagcagggggtggggtgtgagcttggagggcccctcccctggatttcctccaacacctgcttggatactaggcccactgtccctgaagggaatgtcagggaagtgtgcctgtgagctgaattaaaggactggcctttccagaaaacgctttggatctgagcagagtagtcagtttctcagacactcattccatactgcaccgtacatgccagcgtacccattgcaccgaaagcaggcccttagggcaggaagggacgatgagcaagtctgccacaccacctggtgactgggaagggctgcttctctcgtaagggtcttggggagaagtaagcccgcagcctgcctctgcacctcgttccagtgtcctgccaggctctgtactgtcctttgtgtatgaagaaaatgctgttagccctctctcaggctgctgttctgtgggtgctgagagctgccccccatcaccacgccatcacacccctctgagcagaagcaaatctgaggctgaagaattaagttttccccaagcaaggaaggcaggtggtcagagagatcaaacgctgaggcgtggggattgcaggattcaggaggcagcccctttggggaagaggagggtgcattttccatggagcccatgtcagagtccactccagctcagcaggaaagtggaattgcccagtactgcctgccagctgggtctcccaagcaactaccccaagacataccaacagtgaagccaggacagcaccatgccatcggcgctccagtctgtctggctgggaggaaagtgctgggcatcttacagtaactctagaagttcctttgactaggctgcaatcccacctatatgctcagccctaagagctgtggtttcctgtgctctcatttgtccattcattcattcattcattcattcagcaaataatctgaaatccagtctgaactaaggcctgagctgtggataccatggcgcgtgagttagatgtggtccctgccctcatggggctgacagtcctaaaatcaagtgctaggacacagtggccattgagctgggagcattcttccctctaccgcttaagccactgatggctgcgagcttgaagagagggattctgagggagagcttggtccatctggtcaccaaggctgggcgggacagagcagtcaagaaccacggtgtggcttgagaaacagtcctgcttcctgagcctctttgctctgcctcttggggcaagctccttaacctgtctgtatttttatgcctctgtctcccattcagttcctccttgaatacctctttctacagagaggcacgggctcccctgaaggattgtcgaggccagggttcgggaagtacactgccatcggtcaggggacagctgcctcccaccttgcctgggtgatggtgaatgggactcatcttttcctgccttgcttttgaggagatggttgaatttaagctaacaggaaagccaaaccagcaccctcctttgtgctctgagaggttggagacatctggtccaccccattgcccctgcccctggcaagccctgaagtcgggagaggtgaccacaggtctgaaaatcagccagtgccaacattgcttgccctgcaaggtgcaactgagcccacatagcgcattcatagtttccctgaccacagccttgggaagacggtggaaacccgaggatgtgtgggtttcccagctaacggacaagctcccctgccacacccagtgcccacgcatgctcacatacatacagcagaccacaaccctgttgccaagcagtgcttccaagggatagcgatccagattccaacattgtcttggagagggttagtccacatccaagttgcgtgagataagatgcaaagggctctgtgtggatgaggaacgcaccttagaggagtgggaaaggccaccagggttgggccctgtttaggtaattcctgttggcagcacctagagagagcatctgagctgaaggagtgggaaactttgcccaagcaatggcacgggcagcgggctctttctggcgccctgtgctggagcagggccaagtcttagggcatcacaaacagcccatttgatggagggagcagggacatagcacatttttgtctgtctttgtgaggctgctttgctaactctctgaggagaggaagcctctcgggctttccgtcggctggggctagtgccagagaatcccttctcagtggccagcaggttcctgggaggccggcacaaggcaccgctccccactcatgacaccttggtgcagagtgacctcctgcccagtcaccactccggccagccccagccaaacacacaaaagcccatggttgcggttgcatctacaccgttagttggcaaaggatcctgcttgagctctgcgtggtggccaaggagtagcatggaggagggccctgattttaaaaaggaaaaatagagaggcctcaaaacaatgaaacaaagagcttgatatgtcaagaggagaccaaggccctgggaggcataggcaagccgggcagagtcagaccagtgccctcccttgaccatctcctagcattccttaacctagacaggggctaccccatgtgagtccaagccagactttgtggctgtccccagcctgcacagcccaagcccagggaagtgtcctttctttcccttccttactaataatgggccttcctgagacacattcagagaaggatcagagagaaaggagaaccatccaggagagccacaagcgtccaccaaacagtgtctcaggcctcacctgaagctgctgttcctcctatcagcacactagtattaaatgggtgttccataatgaggagaatggaaataggtacaaggcatctagcttaggacagaatcggatttcggcatgtgaaggaatcccagagctgatctcattgaaatgatctatcgtacagacaaggatatgcaaatccacagaagtgaagggatttttgctcaagatcacatagctggtaaactaaggtaaggttagggcttgaacttgggccttctgactccttgtccagtcagtgttctttcatctcaccacagctgcctcctttgaaacagaggtattaagatctgtccttctggttcaccctctcatacctctttactgcgtctcccacatcccccacatgcctcccaaaatgaaagacaaacaggattgtttctgagaccaagatcagtctgtctgtgatcagcctgtgtgtggttcacccagtcatgcaattaagggcagatctgggccagtggaataggatagctgattggtgtttgttactgtgaaccctagaccgtaccccgtagaatggtgtctcttgctttgtaacacatcgggccttcagtgtgctgtattcctcagaagtgagggcatctcggtccattctgcccatggccacagggtgcagagaggcagcagggcccatgcaagctgccaccctgggatttgctgggctggagttcaacagatgtaaagacttcagtgaagcaataaacacaaaactctgggagaagatatccagaattttgtacattactctgtttctttttcaaaaatgaggcagatcagatgcccctgagctgcccctttttttctgattcccaactgcaatgtcctcagtcagtgttgtccctctgcccggctccccagctctttgccaacctcttcacactccccttgagctgagcatcagtcgcctgtgacgtggccaccttctgtcctgctcccactcccgacccatgctggaccccggaggacctcctgccccgcccccaccacacacccatatcccccaccattccaatttgttctttcccgtggggaattttttttcccagcgtctccatcccttcctacatatccacacacacacaaattggtctgatcttttttccattggttaaacatttaactccatgccagaccttgttttaacccctctcacatcatgttctttccttttttgcgagttattttgcattaaccaactttgtcagtgacagatgcgtatctgagggtgtcacacacgaccttcagcagggaagacttctgggccatggagggccgtctaatacatggacttataaactgactgcatgagcaatgaaaaggccaaattattctgaattttttttgaatcactgtaaaaaaactgatttcttttgtatagagaacactaaacgtataataaaagttgttcaaaatgg

SEQ ID NO: 297552 - DNA, 3675 bp, Artificial Sequence
  derived and/or modified sequence
atggcaagacagcctcctcccccttgggtgcatgctgcgttcctgctctgtctgctgagtctgggcggagcaattgagattccaatggatccaaaccctcagcaccgcttgacccagccccctacaatcacaaagcagagcgccaaggaccatatcgtggatccaagggataatattttgattgagtgtgaggctaagggaaacccggctccaagctttcactggacacggaattcacggttcttcaatatcgctaaagatcccagggtgagcatgaggaggaggagcggaacgctagtcatagattttcgttccggagggcgtccagaagaatacgaaggtgaataccagtgcttcgcccgaaataagtttgggacggccttatctaacaggatacgactgcaggtgtcaaagtctcccctatggcctaaagaaaatctcgaccccgtggtcgtgcaggaaggtgcgccattaaccctccagtgcaaccctccccctggattgccgtccccagtgattttctggatgtccagcagtatggaacccattacacaggacaagcgtgtgtcgcaggggcacaacggtgacctgtatttttctaacgtcatgttgcaagacatgcagaccgattatagctgtaacgctaggttccatttcactcacaccatccagcagaagaatccttttacactgaaggtgttaacgaccagaggggtggcggagaggacgcccagctttatgtatccccagggaaccgcttcttcccagatggtcttgaggggtatggatctgctcctggaatgtatagcctcaggtgtaccaacaccagatatcgcctggtacaaaaaaggcggagatttgcccagtgacaaggctaagttcgaaaactttaataaggccctcagaatcactaacgtgtcagaggaggacagtggagaatacttctgcctcgcatccaacaaaatgggctcgataaggcacaccatctccgtacgggtgaaagcagctccttactggctcgacgagcctaagaatttgatcttggcaccgggtgaagacggccgtctcgtctgccgcgctaacggcaatcctaagcctactgtgcagtggatggtaaatggagagccccttcagagcgcccctcccaatcccaacagggaagtggctggtgacacaattattttcagagacacacagatttcctcacgggctgtttatcagtgtaatacctcaaacgaacacggatatctgttggccaacgctttcgtttcagtcctcgacgtgccacctagaatgctgagccccagaaaccagctgattagagtcatattgtacaaccggacccgcctggactgtcccttttttgggagtccgatcccaaccctgagatggttcaagaacggccaaggctccaatctcgacgggggaaattaccatgtttacgagaacggtagccttgaaatcaagatgatcagaaaggaagatcaaggcatttatacatgtgttgccactaatattttggggaaggcagaaaatcaggtgcggctcgaagtcaaagacccaactagaatttacaggatgccggaagaccaggtggctcgaagagggactaccgtgcagttggagtgcagagtgaagcacgatccgagcttaaagctgacagtgtcttggctcaaagatgacgagccactctacataggaaatagaatgaaaaaggaagatgattccctgaccatattcggtgttgcagagcgggatcaaggctcctatacatgcgttgcctcaacggaactggaccaggacctggcgaaagcatacctcacagttctggcggaccaggcaactcctactaatagactagcagcgctgcccaaaggtcgtccggaccgcccacgggacctcgagctgactgatctagccgaaagaagcgtaagactgacctggatccccggtgacgcaaataattccccgatcacagactacgtggtgcagtttgaggaagatcagttccagcccggtgtttggcatgatcactcaaagtaccctgggtccgtgaattccgctgtgttgcgcctgagcccctatgtgaactatcagttccgtgtcatcgctattaacgaggtgggaagcagccaccctagcttgccatctgaacgctacaggacctcaggcgcacctcccgaatcaaacccaggagacgtgaagggtgagggcacaaggaagaacaatatggaaatcacttggactcctatgaatgccacctctgcatttggacctaacttgagatacattgtcaagtggcgtcgacgagagactcgagaggcttggaataatgtcactgtctggggaagcagatacgttgtcggtcagacccccgtgtacgtaccctacgagatccgtgtgcaagccgagaatgacttcgggaaaggtcccgaaccggaatccgtgatcggttacagcggggaagactaccccagagctgctcctacggaggtaaaggtgcgggtcatgaacagcactgcaatctcactccagtggaacagggtgtattctgacaccgtccagggtcagctgcgtgaatatagggcatactactggcgtgagtccagtttgttgaagaacctttgggtgagccagaagcgacagcaagcgagtttccctggagaccggctaaggggtgttgtcagtaggctcttcccttattctaactacaagcttgagatggtcgtggtgaacgggagaggcgacggcccacgatccgagacaaaagagttcacgacgccagagggcgtgcctagcgcacctcgcagattcagagtacggcagcctaacctcgagacaattaaccttgaatgggatcatcccgaacatcctaacgggatcatgatcggctacacacttaagtacgtagccttcaacggaactaaggttggcaagcagattgtggaaaactttagtcctaaccagaccaagttcaccgtacagaggactgaccccgtctcaagatacaggtttactcttagcgccaggacacaggtcggctctggcgaggctgttaccgaggaatcacccgctcccccaaacgaaggcaaccacacgaaaaagaccgtccccgtgaaagctcaagctcagcctatacagctcaccgatctctacccaggcatgacttacacacttcgggtctactcccgagacaatgaagggatatccagcactgtaataacctttatgacatccaccgcctatacaaacaaccaggccgatatcgctacacaggggtggtttattggactcatgtgtgccatcgctctcctcgttctcattttgctgatagtgtgctttatcaaacggagcaggggaggcaaataccctgtccgcgaaaagaaggatgtgccgctaggccctgaggatccaaaggaagaagatggaagcttcgactacagcgatgaggacaacaagccgctacagggcagccagacttccctggatggcacgatcaagcaacaggagagtgacgacagcctagtggactacggcgaaggcggagaaggccagtttaatgaggatgggtcctttattggacagtacactgtgaaaaaagataaggaagagaccgagggaaacgaatcctctgaggcgacatcgcccgtcaacgcaatctactcactggcctag

SEQ ID NO: 297553 - DNA, 3807 bp, Artificial Sequence
  derived and/or modified sequence
atggccaggcagcctcctcctccctgggtgcacgccgcttttctgctgtgcctgcttagcctgggcggagcaattgagatcccgatggaccccaatccgcagcacaggttgacccaaccacctactataacgaagcagagcgcaaaggaccatattgtcgacccaagggacaatattctcatcgagtgcgaagccaaggggaatcctgcacccagtttccactggacacgcaatagcaggttctttaatatcgctaaagacccaagagtgagcatgcgcaggaggtccggtaccctcgtgattgattttcgcagcggcggacggcctgaggaatatgagggggaataccagtgctttgccagaaataagttcggtaccgctctgtcgaacagaataagattgcaggtgtctaagagtcctttatggccgaaggaaaatctagaccccgtggtcgtgcaagagggtgcccctctcaccctccaatgtaacccccctcctggcctgccctctccggtgatcttttggatgagctcttctatggaacccatcacgcaggacaagcgggtgagccagggccataacggcgacctgtactttagcaatgtgatgcttcaggacatgcaaaccgattacagttgtaacgcacggttccatttcacccatacgatccaacagaagaatccattcacgttgaaagtgctcaccacccgcggagtcgcggaacgcacaccatcctttatgtaccctcaaggcactgcatcctcccagatggtattacgaggaatggacttgcttcttgaatgtattgcaagtggcgtccccactcctgacattgcatggtacaagaaagggggagacctccccagtgataaagccaagttcgaaaacttcaacaaagcactgcgcattactaacgtttctgaagaagatagcggtgaatacttttgcctggcttccaacaagatggggagcataaggcacacaatctccgtgagagtgaaagcagccccatactggcttgatgaaccaaagaacctgatccttgcaccaggagaggacgggagactggtgtgccgtgctaacggcaatcccaaacctactgtccaatggatggtcaatggtgagcccctgcagtctgccccacctaaccctaaccgggaggtggccggtgatacgatcatctttagggacactcagatttcttctagagcggtttaccaatgcaatacttctaacgaacacggctacttattggccaatgctttcgtgtcagtgctcgacgttcccccacgcatgctgagccctcggaaccagctgatcagagtaattctctacaataggacaaggctagactgtccatttttcggcagccccataccaactctgcgctggttcaagaacggccaggggtcaaatctggatggagggaactatcatgtctatgagaacggctccttggagatcaaaatgattcgcaaggaagatcagggaatatatacatgcgtggcgactaatattctgggcaaagctgagaaccaggtccgcctggaggtgaaggatcccacacgaatctataggatgcctgaggatcaagtagcacgcagaggaactaccgttcaattggagtgccgcgttaagcatgatccaagcttaaaactcactgtgagttggctgaaggacgatgaacccctgtatatagggaacaggatgaagaaggaagatgacagtcttacgatttttggggtcgccgagagagaccaaggaagctacacttgcgtggcgagcacagaactcgatcaggacctagcaaaggcatatctgacagtgttggccgatcaagcaacccctaccaatcgcctggccgctcttcccaagggcagaccggacagaccacgggatcttgagctgactgatcttgcagagaggtcagtgcgcctgacctggattccaggtgatgcgaataattccccaatcactgattacgttgtgcaattcgaggaggaccaattccagccaggagtgtggcatgatcactcaaaatacccaggcagtgtgaactccgctgtattgcggttgagcccctatgtgaactaccagttcagagttattgcaatcaacgaggtgggttcttcgcacccctctctgcccagcgagaggtatcggacttccggtgcacctccagagtccaaccccggtgacgtgaaaggtgagggaacccggaagaacaacatggagattacgtggacaccaatgaacgccacatcggctttcgggccaaatctccggtacattgtgaaatggcggaggagagagacacgggaggcctggaacaacgtaactgtgtggggatcccggtatgtggtgggacagacaccggtctacgtcccgtacgagattcgggtgcaggccgagaacgattttgggaagggacccgagcccgagtctgtcataggatactctggggaggattaccctcgcgcagcaccgacagaagttaaagttagagttatgaatagcacagcaatctcgcttcagtggaatcgcgtttactctgatacagtacagggccagctgcgggaataccgcgcttactattggcgtgaaagctctctgctcaagaatctatgggtgtcccagaaacggcaacaggccagcttccctggggaccgcctgcgtggagttgtcagccggctgtttccatattctaattacaagctcgaaatggttgtcgtgaatggccgaggagatggcccacggtctgagacaaaagagttcacgaccccagagggagtacccagtgcccctcgccgatttcgggtaaggcagccaaacttagagaccattaaccttgaatgggaccatccagagcatcctaatgggatcatgataggctatacactcaagtacgtagctttcaacggcaccaaggtgggcaaacagattgtggaaaacttttctcccaaccaaactaaatttacagtccagagaactgacccagtgagtaggtaccggttcacactgagcgcgcgtacccaggtgggaagcggggaggcagtgacagaagagtcacccgcacctccgaacgaaggcagtcccgtgatgtcaccagacgagcaaagtatctggaatgtgactgtgctgcctaacagcaaatgggctaatatcacgtggaagcacaatttcggtcctggcaccgacttcgtcgtggagtacatcgactccaaccacaccaagaagaccgtgcctgttaaggcacaagcacaacccattcagttgaccgatctgtatcccggaatgacatacaccctgcgcgtttacagccgagacaatgaaggcatttccagtaccgtgataacctttatgaccagcactgcctatacaaataatcaggccgacatcgctacccagggctggttcattggcctgatgtgcgctatcgcactgctagtcctgatcctgctcatagtgtgctttattaaaagaagcagaggaggaaaataccctgttagagagaaaaaggatgtccctctcggtcccgaagacccgaaggaagaggatggttcttttgattactccgatgaggacaacaaaccattacaaggctcacaaacatctttggatggcacaattaaacagcaagagtctgacgactccctggttgactatggagaaggcggtgagggacagttcaacgaagatggttcattcatcggccagtatacagtgaagaaggacaaagaggaaacagagggtaatgagagctcagaagcaaccagtcccgtgaacgccatttacagtctggcatag

SEQ ID NO: 297554 - protein, 1257 aa, Artificial Sequence
  derived and/or modified sequence
MARQPPPPWVHAAFLLCLLSLGGAIEIPMDPNPQHRLTQPPTITKQSAKDHIVDPRDNILIECEAKGNPAPSFHWTRNSRFFNIAKDPRVSMRRRSGTLVIDFRSGGRPEEYEGEYQCFARNKFGTALSNRIRLQVSKSPLWPKENLDPVVVQEGAPLTLQCNPPPGLPSPVIFWMSSSMEPITQDKRVSQGHNGDLYFSNVMLQDMQTDYSCNARFHFTHTIQQKNPFTLKVLTTRGVAERTPSFMYPQGTASSQMVLRGMDLLLECIASGVPTPDIAWYKKGGDLPSDKAKFENFNKALRITNVSEEDSGEYFCLASNKMGSIRHTISVRVKAAPYWLDEPKNLILAPGEDGRLVCRANGNPKPTVQWMVNGEPLQSAPPNPNREVAGDTIIFRDTQISSRAVYQCNTSNEHGYLLANAFVSVLDVPPRMLSPRNQLIRVILYNRTRLDCPFFGSPIPTLRWFKNGQGSNLDGGNYHVYENGSLEIKMIRKEDQGIYTCVATNILGKAENQVRLEVKDPTRIYRMPEDQVARRGTTVQLECRVKHDPSLKLTVSWLKDDEPLYIGNRMKKEDDSLTIFGVAERDQGSYTCVASTELDQDLAKAYLTVLADQATPTNRLAALPKGRPDRPRDLELTDLAERSVRLTWIPGDANNSPITDYVVQFEEDQFQPGVWHDHSKYPGSVNSAVLRLSPYVNYQFRVIAINEVGSSHPSLPSERYRTSGAPPESNPGDVKGEGTRKNNMEITWTPMNATSAFGPNLRYIVKWRRRETREAWNNVTVWGSRYVVGQTPVYVPYEIRVQAENDFGKGPEPESVIGYSGEDYPRAAPTEVKVRVMNSTAISLQWNRVYSDTVQGQLREYRAYYWRESSLLKNLWVSQKRQQASFPGDRLRGVVSRLFPYSNYKLEMVVVNGRGDGPRSETKEFTTPEGVPSAPRRFRVRQPNLETINLEWDHPEHPNGIMIGYTLKYVAFNGTKVGKQIVENFSPNQTKFTVQRTDPVSRYRFTLSARTQVGSGEAVTEESPAPPNEGSPVMSPPTLPPTTVGATGAVSSTDATAIAATTEATTVPIIPTVAPTTIATTTTVATTTTTTAAATTTTESPPTTTSGTKIHESAYTNNQADIATQGWFIGLMCAIALLVLILLIVCFIKRSRGGKYPVREKKDVPLGPEDPKEEDGSFDYSDEDNKPLQGSQTSLDGTIKQQESDDSLVDYGEGGEGQFNEDGSFIGQYTVKKDKEETEGNESSEATSPVNAIYSLA

SEQ ID NO: 297555 - DNA, 3774 bp, Artificial Sequence
  derived and/or modified sequence
atggccagacagcccccccccccctgggtgcacgccgccttcctgctgtgcctgctgagcctgggcggcgccatcgagatccccatggaccccaacccccagcacagactgacccagccccccaccatcaccaagcagagcgccaaggaccacatcgtggaccccagagacaacatcctgatcgagtgcgaggccaagggcaaccccgcccccagcttccactggaccagaaacagcagattcttcaacatcgccaaggaccccagagtgagcatgagaagaagaagcggcaccctggtgatcgacttcagaagcggcggcagacccgaggagtacgagggcgagtaccagtgcttcgccagaaacaagttcggcaccgccctgagcaacagaatcagactgcaggtgagcaagagccccctgtggcccaaggagaacctggaccccgtggtggtgcaggagggcgcccccctgaccctgcagtgcaaccccccccccggcctgcccagccccgtgatcttctggatgagcagcagcatggagcccatcacccaggacaagagagtgagccagggccacaacggcgacctgtacttcagcaacgtgatgctgcaggacatgcagaccgactacagctgcaacgccagattccacttcacccacaccatccagcagaagaaccccttcaccctgaaggtgctgaccaccagaggcgtggccgagagaacccccagcttcatgtacccccagggcaccgccagcagccagatggtgctgagaggcatggacctgctgctggagtgcatcgccagcggcgtgcccacccccgacatcgcctggtacaagaagggcggcgacctgcccagcgacaaggccaagttcgagaacttcaacaaggccctgagaatcaccaacgtgagcgaggaggacagcggcgagtacttctgcctggccagcaacaagatgggcagcatcagacacaccatcagcgtgagagtgaaggccgccccctactggctggacgagcccaagaacctgatcctggcccccggcgaggacggcagactggtgtgcagagccaacggcaaccccaagcccaccgtgcagtggatggtgaacggcgagcccctgcagagcgccccccccaaccccaacagagaggtggccggcgacaccatcatcttcagagacacccagatcagcagcagagccgtgtaccagtgcaacaccagcaacgagcacggctacctgctggccaacgccttcgtgagcgtgctggacgtgccccccagaatgctgagccccagaaaccagctgatcagagtgatcctgtacaacagaaccagactggactgccccttcttcggcagccccatccccaccctgagatggttcaagaacggccagggcagcaacctggacggcggcaactaccacgtgtacgagaacggcagcctggagatcaagatgatcagaaaggaggaccagggcatctacacctgcgtggccaccaacatcctgggcaaggccgagaaccaggtgagactggaggtgaaggaccccaccagaatctacagaatgcccgaggaccaggtggccagaagaggcaccaccgtgcagctggagtgcagagtgaagcacgaccccagcctgaagctgaccgtgagctggctgaaggacgacgagcccctgtacatcggcaacagaatgaagaaggaggacgacagcctgaccatcttcggcgtggccgagagagaccagggcagctacacctgcgtggccagcaccgagctggaccaggacctggccaaggcctacctgaccgtgctggccgaccaggccacccccaccaacagactggccgccctgcccaagggcagacccgacagacccagagacctggagctgaccgacctggccgagagaagcgtgagactgacctggatccccggcgacgccaacaacagccccatcaccgactacgtggtgcagttcgaggaggaccagttccagcccggcgtgtggcacgaccacagcaagtaccccggcagcgtgaacagcgccgtgctgagactgagcccctacgtgaactaccagttcagagtgatcgccatcaacgaggtgggcagcagccaccccagcctgcccagcgagagatacagaaccagcggcgccccccccgagagcaaccccggcgacgtgaagggcgagggcaccagaaagaacaacatggagatcacctggacccccatgaacgccaccagcgccttcggccccaacctgagatacatcgtgaagtggagaagaagagagaccagagaggcctggaacaacgtgaccgtgtggggcagcagatacgtggtgggccagacccccgtgtacgtgccctacgagatcagagtgcaggccgagaacgacttcggcaagggccccgagcccgagagcgtgatcggctacagcggcgaggactaccccagagccgcccccaccgaggtgaaggtgagagtgatgaacagcaccgccatcagcctgcagtggaacagagtgtacagcgacaccgtgcagggccagctgagagagtacagagcctactactggagagagagcagcctgctgaagaacctgtgggtgagccagaagagacagcaggccagcttccccggcgacagactgagaggcgtggtgagcagactgttcccctacagcaactacaagctggagatggtggtggtgaacggcagaggcgacggccccagaagcgagaccaaggagttcaccacccccgagggcgtgcccagcgcccccagaagattcagagtgagacagcccaacctggagaccatcaacctggagtgggaccaccccgagcaccccaacggcatcatgatcggctacaccctgaagtacgtggccttcaacggcaccaaggtgggcaagcagatcgtggagaacttcagccccaaccagaccaagttcaccgtgcagagaaccgaccccgtgagcagatacagattcaccctgagcgccagaacccaggtgggcagcggcgaggccgtgaccgaggagagccccgccccccccaacgagggcagccccgtgatgagcccccccaccctgccccccaccaccgtgggcgccaccggcgccgtgagcagcaccgacgccaccgccatcgccgccaccaccgaggccaccaccgtgcccatcatccccaccgtggcccccaccaccatcgccaccaccaccaccgtggccaccaccaccaccaccaccgccgccgccaccaccaccaccgagagcccccccaccaccaccagcggcaccaagatccacgagagcgcctacaccaacaaccaggccgacatcgccacccagggctggttcatcggcctgatgtgcgccatcgccctgctggtgctgatcctgctgatcgtgtgcttcatcaagagaagcagaggcggcaagtaccccgtgagagagaagaaggacgtgcccctgggccccgaggaccccaaggaggaggacggcagcttcgactacagcgacgaggacaacaagcccctgcagggcagccagaccagcctggacggcaccatcaagcagcaggagagcgacgacagcctggtggactacggcgagggcggcgagggccagttcaacgaggacggcagcttcatcggccagtacaccgtgaagaaggacaaggaggagaccgagggcaacgagagcagcgaggccaccagccccgtgaacgccatctacagcctggcctag

SEQ ID NO: 297556 - DNA, 3774 bp, Artificial Sequence
  derived and/or modified sequence
atggcccgacagccgccaccaccatgggtgcacgcagccttcttgctgtgcttgctgtccctaggtggtgccatcgagattcctatggacccaaatcctcagcacagattgactcagcctcccactataaccaaacagtcggccaaggaccatattgtcgacccacgggacaacattctcatcgagtgtgaggctaagggaaatcccgccccaagctttcactggactcgaaactctcgctttttcaacatcgccaaggacccacgggtcagcatgcgccgtcggtccggaacccttgtgatagacttcaggtctggcggtaggcccgaggaatatgagggtgagtaccagtgctttgcccggaataaatttggaacagcattatcgaacaggataaggctgcaagtttccaagtctccgttgtggcctaaagaaaatttagaccccgttgtggtgcaggaaggcgctcccttaaccctgcagtgcaaccccccacccggcttaccctcacccgtgatcttctggatgagcagttccatggagccaatcactcaggacaagagggtgagtcaaggccacaacggcgacctctacttttcaaacgtgatgctgcaagacatgcagacagactactcttgtaatgctcggttccatttcacacacaccatccaacaaaaaaacccattcacactgaaagtcctcaccactaggggcgtcgctgaacgaacccctagcttcatgtatccacagggcactgcatcttcgcagatggtgctccgtgggatggacctgcttttggagtgcatcgcttccggcgtgcctacacccgatattgcatggtacaagaaaggaggggatctgccctctgataaagcgaagttcgagaatttcaacaaggctctgagaatcacaaacgtgtctgaagaggattctggagagtacttctgcctggctagcaacaaaatgggctccatccgccataccatatctgttagggtcaaggccgccccctattggctggatgaaccaaaaaacctgattctcgctcctggcgaggatgggcgattagtctgcagagctaatggcaacccaaagcctaccgtgcagtggatggtgaacggggaaccccttcagtccgcgccacctaatcctaatcgcgaggtggcgggcgacacaattatcttccgagacacacagatttccagcagagccgtctaccagtgtaatacttctaatgagcacggctacctgttggctaatgccttcgtttcagtgctcgatgtgcctcctagaatgctgagtccgagaaaccagttgattcgggttatcctatacaatcgtacccgcctagattgtccgtttttcggaagcccaatcccaacactgcggtggtttaagaacggacaggggagtaatttagatggcggaaactaccatgtctacgagaatgggagcctggagatcaagatgatccgaaaagaggaccagggcatctatacgtgcgttgcaacgaatatcctcggcaaggctgaaaatcaggtacgtctggaggtaaaggacccaacgagaatatatcggatgcccgaggaccaggtggcgagaagaggtactaccgtacagctggaatgcagggtcaagcacgatccaagccttaaactcacagttagctggctgaaagatgatgaacccctttatattggcaatagaatgaagaaagaggatgattctctgactatttttggcgtggccgagagagaccaggggagctatacatgcgtggcaagcacagaactcgatcaggatttagcaaaggcttacctgaccgttctggcagatcaagctactcctactaaccggctggcagccttacctaagggtaggcccgataggccaagggaccttgagcttaccgatctggccgagcgcagcgtcagactgacatggatccctggagatgccaacaacagtccaataactgactatgtggtccagtttgaggaagaccagttccaaccaggtgtctggcatgatcactctaaataccccggcagcgtaaactctgcagttcttcgcctctcaccctacgtgaattaccaattcagagttattgctatcaacgaggtcggttcctcacatcccagtctgccaagcgaaaggtacaggaccagcggcgcaccacccgagtccaatccaggcgacgtgaaaggcgaaggtaccaggaaaaataacatggagatcacgtggacccccatgaacgccacaagtgcattcgggcctaatctgcgatatatcgtcaagtggagaaggagagagacccgagaggcctggaacaacgtcactgtttggggctccaggtatgtcgtcggccagactccagtatacgtaccatatgagatccgggtccaggccgagaatgactttggcaagggacctgaaccagaaagtgtcataggctatagcggagaagattatcctcgtgccgcccccacagaagtgaaagtcagggtcatgaactctaccgccatatcgttacaatggaatcgggtatattctgacaccgtgcagggccagcttagagaatatagggcctactactggagagaaagcagtttactgaaaaatttgtgggtgtcacagaagagacagcaggcatcattccctggagatagattgaggggggtggtgtcaaggttgttcccttattcaaactacaagcttgagatggttgtcgtcaacggtcggggcgacggacctaggtctgagacaaaggaatttactacccccgagggagtaccctctgcacctcgccggttccgggtgcgtcagcccaacctggaaacaataaatctggagtgggatcacccggaacaccctaacggcatcatgattggctacacccttaaatacgttgcattcaacggaactaaggtcggaaagcagatagtagaaaactttagccccaatcagactaagttcacagtgcagcggacggatcccgtctcccggtatcggtttactttgtctgcgagaacacaggtcggatctggcgaggccgttactgaggagtcccctgcgccacctaacgagggaagtcccgttatgagtccacctaccctgcctcccacaaccgtgggggccacgggcgcggtgtcgagcaccgatgccaccgccatagccgctactactgaagctacaacggttccaatcatccccactgttgcaccaaccacaattgcaactacaactactgtggccactactacaacaaccaccgccgccgcaacaaccactaccgagtctccacccaccactacttcggggaccaaaatccatgagtcagcttacaccaacaaccaggccgatattgcaacccagggttggttcattggactgatgtgtgcgatcgcgctcctggtgttgatcttattgatcgtatgtttcataaaacgaagccgcggtggcaagtatcctgtgcgcgagaagaaagatgtgcccctgggccccgaagacccgaaagaagaggatggcagcttcgactactctgacgaggacaataaaccactgcagggctcacagacttcacttgacggcaccattaaacagcaggagtctgatgattctctggtggattatggggaaggaggggaagggcagttcaacgaggatggcagctttataggccagtacaccgtgaaaaaggacaaagaggaaaccgagggcaatgaatcgtctgaggccacgtcacccgtaaacgccatctattctctggcttag

SEQ ID NO: 297557 - DNA, 3774 bp, Artificial Sequence
  derived and/or modified sequence
atggcccggcagcccccaccaccctgggtgcacgccgccttcctgctgtgcctgctgagcctgggcggggccatcgagatccccatggaccccaacccccagcaccggctgacccagccccccaccatcaccaagcagagcgccaaggaccacatcgtggacccccgggacaacatcctgattgaatgtgaggccaagggcaacccagcccccagcttccactggaccaggaacagccgcttcttcaacatcgccaaggacccccgggtgtccatgagaagaagaagtggcaccctggtgattgacttccgcagcggcggccggcctgaggagtatgaaggagagtaccagtgctttgccaggaacaagtttggaacagccctgagcaaccgcatccggctgcaggtgtccaagagccccctgtggcccaaggagaacctggaccctgtggtggtgcaggagggcgcccccctgaccctgcagtgcaaccccccacctggcctgcccagccctgtgatcttctggatgagcagctccatggagcccatcacccaggacaagagggtgtcccagggccacaacggggacctgtacttcagcaatgtgatgctgcaggacatgcagacagactacagctgcaatgcccgcttccacttcacccacaccatccagcagaagaaccccttcaccctgaaggtgctgaccacccggggcgtggccgagaggacccccagcttcatgtacccccagggcacagccagcagccagatggtgctgcggggcatggacctgctgctggagtgcatcgccagcggcgtgcccaccccagacatcgcctggtacaagaagggcggggacctgcccagcgacaaggccaagtttgagaacttcaacaaggccctgcgcatcaccaacgtgtctgaagaagattctggagagtacttctgcctggccagcaacaagatgggcagcatccgccacaccatctctgtgcgggtgaaggccgccccctactggctggatgagcccaagaacctgatcctggcccctggagaagatggccgcctggtgtgccgggccaatggaaaccccaagcccaccgtgcagtggatggtgaatggagagcccctgcagagcgccccacccaaccccaaccgggaggtggccggggacaccatcatcttccgggacacccagatcagcagcagagctgtgtaccagtgcaacaccagcaatgagcacggctacctgctggccaatgcctttgtgtctgtgctggatgtgccccccaggatgctgagccccaggaaccagctgatccgggtcatcctgtacaacagaacccggctggactgccccttcttcggcagccccatccccaccctgcgctggttcaagaatggccagggcagcaacctggatggcggcaactaccacgtgtatgaaaatggcagcctggagatcaagatgatcaggaaggaggaccagggcatctacacctgtgtggccaccaacatcctgggcaaggccgagaaccaggtgcggctggaggtgaaggaccccacccgcatctacaggatgcctgaggaccaggtggcccggcggggcaccaccgtgcagctggagtgccgggtgaagcatgaccccagcctgaagctgactgtgtcctggctgaaggatgatgagcccctgtacatcggcaacaggatgaagaaggaggatgacagcctgaccatcttcggcgtggccgagcgggaccagggcagctacacctgtgtggccagcacagagctggaccaggacctggccaaggcctacctgactgtgctggccgaccaggccacccccaccaaccggctggccgccctgcccaagggccgcccagaccggccccgggacctggagctgacagacctggccgagaggtctgtgcggctgacctggatccctggagatgccaacaacagccccatcacagattatgtggtgcagtttgaggaggaccagttccagcccggggtgtggcatgaccacagcaagtacccaggctctgtgaacagcgctgtgctgcggctgagcccctacgtgaactaccagttccgggtgattgccatcaatgaggtgggcagcagccaccccagcctgcccagcgagcgctaccgcaccagcggggcccctcctgagagcaaccctggagatgtgaagggggagggcaccaggaagaacaacatggagatcacctggacccccatgaatgccaccagcgccttcggccccaacctgcgctacatcgtgaagtggaggagaagagagacccgggaggcctggaacaacgtgacagtgtggggcagccgctacgtggtgggccagacccctgtgtatgtgccctatgagatccgggtgcaggccgagaatgactttggaaaaggacctgagcctgagagcgtgattggctacagcggggaggactaccccagggctgcccccacagaggtgaaggtgcgggtgatgaacagcacagccatcagcctgcagtggaacagagtgtacagcgacacagtgcagggccagctgcgggagtaccgggcctactactggagggagagcagcctgctgaagaacctgtgggtgtcccagaagaggcagcaggccagcttccctggggaccggctgcggggcgtggtgtcccggctcttcccctacagcaactacaagctggagatggtggtggtgaatggaagaggagatggccccaggtctgagaccaaggagttcaccaccccagagggcgtgcccagcgccccccggcgcttccgggtgcggcagcccaacctggagaccatcaacctggagtgggaccaccctgagcaccccaacggcatcatgattggctacaccctgaagtatgtggccttcaacggcaccaaggtgggcaagcagatcgtggagaacttcagccccaaccagaccaagttcaccgtgcagaggacagatcctgtgagccgctaccgcttcaccctgagcgcccggacccaggtgggcagcggggaggccgtgacagaggagagccctgcccccccaaatgaaggcagccctgtgatgagcccccccaccctgccccccaccaccgtgggcgccactggagctgtgagcagcacagatgccacagccatcgccgccaccacagaggccaccaccgtgcccatcatccccaccgtggcccccaccaccatcgccaccaccaccaccgtggccaccaccaccaccaccacagctgctgccaccaccaccacagagagcccccccaccaccaccagcggcaccaagatccatgaaagtgcctacaccaacaaccaggccgacatcgccacccagggctggttcatcggcctgatgtgtgccatcgccctgctggtgctgatcctgctgattgtgtgcttcatcaagaggagcagaggaggcaagtaccctgtgcgggagaagaaggatgtgcccctgggccctgaggaccccaaggaggaggatggcagctttgactacagtgatgaggacaacaagcccctgcagggcagccagaccagcctggatggcaccatcaagcagcaggagagtgatgacagcctggtggactatggagagggcggggagggccagttcaatgaagatggcagcttcatcggccagtacacagtgaagaaggacaaggaggagacagagggcaatgaaagcagcgaggccaccagccctgtgaatgccatctacagcctggcctag

SEQ ID NO: 297558 - DNA, 3774 bp, Artificial Sequence
  derived and/or modified sequence
atggcccggcagcccccccccccctgggtgcacgccgccttcctgctctgccttctgagcctgggaggggcgatcgagatacctatggatccaaatccacagcaccggctgacgcagccaccgactattaccaaacagtcagccaaggaccatatcgtggatccccgtgataatatccttatcgagtgcgaggcaaaagggaatcccgcccccagcttccactggactaggaactccagatttttcaatatcgctaaagacccacgggtgagcatgaggcgacgctccggcactctggtgatagacttccgatcaggaggcagacctgaggaatacgagggagaatatcagtgcttcgctaggaacaagtttggcacagctctgagtaacagaattcgcctgcaggtgtccaaaagccccctttggcctaaagaaaaccttgatccggtcgttgtccaggaaggagcaccactcaccttacagtgcaatcccccaccaggactgccctccccagtgattttttggatgagcagcagcatggaacctatcacacaagacaagagagtatcgcaggggcataatggtgacttatatttctcaaacgtgatgctgcaggatatgcagacagactattcctgcaacgcacgcttccacttcacacacaccatccaacagaaaaaccccttcacacttaaggtgcttacgacgcgaggcgtggctgagcggacaccatccttcatgtaccctcaggggactgctagtagccagatggtattgagaggcatggatctgctgctggaatgcatcgcatcaggggtccccacgccagatatcgcctggtacaagaaaggcggcgaccttccctctgacaaagcaaaattcgaaaacttcaataaagctttacgcatcacaaatgtctctgaagaagactcaggcgagtatttttgcttggcctcaaataaaatgggaagcattaggcataccatcagtgtgcgtgtaaaagccgccccctactggctcgacgagccgaaaaacttaattctggctcctggcgaggacggacgcctggtgtgccgagccaatggcaaccctaagccaaccgtccagtggatggtcaacggcgagcctctccaaagcgcaccccccaatccaaaccgggaagtagctggagacaccataatcttccgggatacacaaatctcaagtcgggctgtttatcaatgtaatacgtctaacgaacacggctacctgctggccaatgccttcgtttctgtgctagatgtccccccacggatgctgagcccgcgcaatcagctaatccgcgtcatcttatataataggacacgactggattgccctttcttcggttcccccattcctacactgagatggttcaagaacggacagggaagcaacctcgatgggggcaattaccatgtgtacgaaaacgggtctttggagataaagatgatcaggaaggaagatcagggcatctatacctgtgtagccacgaacattctaggtaaagcagagaaccaggtgcgtttggaggttaaggatccaacaaggatatacaggatgccagaggatcaggtagccaggcgaggtacaacagtccagctggagtgtagggtcaagcacgatccttccctgaaacttacagtgtcttggctcaaggatgacgagccgctatacattggcaaccggatgaagaaggaagacgattcattgaccattttcggagtggctgaaagggatcagggaagctacacctgcgtggcttcaaccgaactcgaccaggacctggccaaagcttatttaacagtgctggcagaccaggccaccccaaccaatcgtttagcggccctcccaaagggaaggcccgacaggcctagagacttagagttgacggacctggcggagcggtcagtccgccttacctggatccccggagacgctaacaattcacctatcaccgactacgtggtgcaatttgaagaagaccagttccagccaggtgtgtggcatgaccatagcaagtaccccggaagtgtcaattcagcagtactcaggctttcaccttatgtgaattatcagtttagggtgatcgccattaatgaagtcggctccagccaccccagtctaccttccgagagatacaggacaagtggagccccccctgagtccaatcctggagatgtgaagggcgaaggaacccggaagaataatatggagatcacctggacccccatgaatgccacctcggccttcggtcccaaccttcgatacatcgtgaaatggcgaaggagagaaacccgggaggcgtggaacaacgtgactgtgtggggctccagatatgttgtggggcaaacccccgtctatgtcccatacgagatacgggttcaggctgagaacgattttggcaaaggcccggaaccagaaagtgtgatcggatactcaggcgaggactaccccagagccgcccctaccgaggtcaaggttcgcgtgatgaactccaccgctatcagccttcagtggaacagagtttattccgacacggtgcagggacagctcagggagtatagggcttattattggagagagagtagcctgcttaaaaacttatgggtctctcagaaacgccagcaggctagtttccccggtgatcgtcttaggggtgtcgtatctaggctcttcccatattctaattacaaacttgaaatggtcgtagtcaatggcaggggtgatgggccacggtctgagacgaaagaatttacaactcctgaaggtgtgccatctgcacctagacgtttcagggtcaggcagcccaacctggaaacgattaatctggaatgggatcaccctgagcaccccaatggtatcatgatcggctacacattgaaatatgtcgccttcaacgggactaaagtgggaaagcagattgtggaaaactttagtcccaatcaaacaaaatttacggtgcagcgcaccgatcctgtctcccgatatcgcttcacactgtccgcaagaactcaagttggcagcggcgaggcagtcactgaagagtctccagccccgcctaatgaggggagtccagtgatgagccctccaacgttgccgcccactacagttggtgcgacaggcgccgtgagcagcaccgacgccaccgctattgccgcgaccacggaagccactactgtaccaataattcctactgttgctccgactaccatcgccacaaccaccaccgtggctacaaccactaccaccaccgcagctgccaccactacaaccgagtcgccaccaacaacgacctcgggcactaaaattcacgaaagcgcttacacaaacaatcaagctgacatcgccacgcaggggtggttcatcggactcatgtgcgcgattgctttgcttgtcctgatcttgcttatagtttgcttcatcaagagatcaaggggcggcaagtacccggttcgggagaagaaggatgtgcccctgggtccggaagatcccaaggaggaagacggatcgtttgactacagcgatgaagataataagcctctgcagggttctcagaccagtctggacggaacaattaaacagcaagagtctgacgactccctggtggactatggtgaggggggcgagggacagttcaacgaggacggtagctttattggacagtacactgtgaagaaggacaaagaagaaacggaaggcaacgaatcttccgaggctacatcccccgtaaatgctatctacagcctggcttag

SEQ ID NO: 297559 - DNA, 10384 bp, Artificial Sequence
  derived and/or modified sequence
gcacgggctggtctctgccctaatgcggcggctggcggcgagaggcgctgcaggggacgcgggggaagtggcggcgccggcagcggacagctcggacagcgcccagggccggagcccgagcccttggaggttgattgacttatgtgcaatttgggacgctggagtttaccttccctccgcagcctggaacagagcctcctctggtgttgcaaggaagaggctgaatgaggcagagaagctgagtgctgtccaggaggcccagttaaagcggctcgaggtgacaagaccccgagtgctggggagcagggagcagggccaggtgccgaggatggccaggcagccaccgccgccctgggtccatgcagccttcctcctctgcctcctcagtcttggcggagccatcgaaattcctatggatcctaaccctcaacataggttgacgcagccgccaaccatcaccaagcagtcagcgaaggatcacatcgtggacccccgtgataacatcctgattgagtgtgaagcaaaagggaaccctgcccccagcttccactggacacgaaacagcagattcttcaacatcgccaaggacccccgggtgtccatgaggaggaggtctgggaccctggtgattgacttccgcagtggcgggcggccggaggaatatgagggggaatatcagtgcttcgcccgcaacaaatttggcacggccctgtccaataggatccgcctgcaggtgtctaaatctcctctgtggcccaaggaaaacctagaccctgtcgtggtccaagagggcgctcctttgacgctccagtgcaaccccccgcctggacttccatccccggtcatcttctggatgagcagctccatggagcccatcacccaagacaaacgtgtctctcagggccataacggagacctatacttctccaacgtgatgctgcaggacatgcagaccgactacagttgtaacgcccgcttccacttcacccacaccatccagcagaagaaccctttcaccctcaaggtcctcaccacccgaggagttgcagaaagaacaccaagcttcatgtatccccagggcaccgcgagcagccagatggtgcttcgtggcatggacctcctgctggaatgcatcgcctccggggtcccaacaccagacatcgcatggtacaagaaaggtggggacctcccatctgataaggccaagtttgagaactttaataaggccctgcgtatcacaaatgtctctgaggaagactccggggagtatttctgcctggcctccaacaagatgggcagcatccggcacacgatctcggtgagagtaaaggctgctccctactggctggacgaacccaagaaccttattctggctcctggcgaggatgggagactggtgtgtcgagccaatggaaaccccaaacccactgtccagtggatggtgaatggggaacctttgcaatcggcaccacctaacccaaaccgtgaggtggccggagacaccatcatcttccgggacacccagatcagcagcagggctgtgtaccagtgcaacacctccaacgagcatggctacctgctggccaacgcctttgtcagtgtgctggatgtgccgcctcggatgctgtcgccccggaaccagctcattcgagtgattctttacaaccggacgcggctggactgccctttctttgggtctcccatccccacactgcgatggtttaagaatgggcaaggaagcaacctggatggtggcaactaccatgtttatgagaacggcagtctggaaattaagatgatccgcaaagaggaccagggcatctacacctgtgtcgccaccaacatcctgggcaaagctgaaaaccaagtccgcctggaggtcaaagaccccaccaggatctaccggatgcccgaggaccaggtggccagaaggggcaccacggtgcagctggagtgtcgggtgaagcacgacccctccctgaaactcaccgtctcctggctgaaggatgacgagccgctctatattggaaacaggatgaagaaggaagacgactccctgaccatctttggggtggcagagcgggaccagggcagttacacgtgtgtcgccagcaccgagctagaccaagacctggccaaggcctacctcaccgtgctagctgatcaggccactccaactaaccgtttggctgccctgcccaaaggacggccagaccggccccgggacctggagctgaccgacctggccgagaggagcgtgcggctgacctggatccccggggatgctaacaacagccccatcacagactacgtcgtccagtttgaagaagaccagttccaacctggggtctggcatgaccattccaagtaccccggcagcgttaactcagccgtcctccggctgtccccgtatgtcaactaccagttccgtgtcattgccatcaacgaggttgggagcagccaccccagcctcccatccgagcgctaccgaaccagtggagcaccccccgagtccaatcctggtgacgtgaagggagaggggaccagaaagaacaacatggagatcacgtggacgcccatgaatgccacctcggcctttggccccaacctgcgctacattgtcaagtggaggcggagagagactcgagaggcctggaacaacgtcacagtgtggggctctcgctacgtggtggggcagaccccagtctacgtgccctatgagatccgagtccaggctgaaaatgacttcgggaagggccctgagccagagtccgtcatcggttactccggagaagattatcccagggctgcgcccactgaagttaaagtccgagtcatgaacagcacagccatcagccttcagtggaaccgcgtctactccgacacggtccagggccagctcagagagtaccgagcctactactggagggagagcagcttgctgaagaacctgtgggtgtctcagaagagacagcaagccagcttccctggtgaccgcctccgtggcgtggtgtcccgcctcttcccctacagtaactacaagctggagatggttgtggtcaatgggagaggtgatgggcctcgcagtgagaccaaggagttcaccaccccggaaggagtacccagtgcccctaggcgtttccgagtccggcagcccaacctggagacaatcaacctggaatgggatcatcctgagcatccaaatgggatcatgattggatacactctcaaatatgtggcctttaacgggaccaaagtaggaaagcagatagtggaaaacttctctcccaatcagaccaagttcacggtgcaaagaacggaccccgtgtcacgctaccgctttaccctcagcgccaggacgcaggtgggctctggggaagccgtcacagaggagtcaccagcacccccgaatgaaggtagcccagtcatgtctcctcccacattgcccccgactaccgtgggtgcgacgggcgctgtgagcagtaccgatgctactgccattgctgccaccaccgaagccacaacagtccccatcatcccaactgtcgcacctaccaccatcgccaccaccaccaccgtcgccacaactactacaaccactgctgccgccaccaccaccacggagagtcctcccaccaccacctccgggactaagatacacgaatccgcttacaccaacaaccaagcggacatcgccacccagggctggttcattgggcttatgtgcgccatcgccctcctggtgctgatcctgctcatcgtctgtttcatcaagaggagtcgcggcggcaagtacccagtacgagaaaagaaggatgttccccttggccctgaagaccccaaggaagaggatggctcatttgactatagtgatgaggacaacaagcccctgcagggcagtcagacatctctggacggcaccatcaagcagcaggagagtgacgacagcctggtggactatggcgagggtggcgagggtcagttcaatgaagacggctccttcatcggccagtacacggtcaaaaaggacaaggaggaaacagagggcaacgaaagctcagaggccacgtcacctgtcaatgctatctactctctggcctaacggagcccacccaggcacagccaccactttgcaagtgggaggaggggagaaggggagacaaaaccactgcagacctaccacgaagccaccaccaccttcagtaacaagggtacgatatgggggtctgccaagctgtgaggaccagtagccaccaagccacccacaagccccctcccaatgaccccccttcagccccgggtgccaccagtgtgggagagctggagccgtggctgagctcagctggagggagcctggccccttgcccggtctcgcagccaccccgagcgttccaccacactgtccgcccttggcctcggcacacgctcaccttttctgttggttacgggacttctcattgtcttaatttcgctttgtgcatcttcccctccagacccaatgtctctgttttcttttccttttgaaaaagagtccctggaaaagaaagaataagtggattctcccccaggagaatcctttttgcaaagataggcaaaaaggattgaatccataccagaacacgtagacaggctgtaatattcaaaccacctctgggccaatgcatttccaaaggatgcctttctcgccatatgcctcccctggcccccagcccctctgcctcggccttgtcagttgctgagctgggcttggctcctttctggaaaatgacagtatttttggcagggagaaggtgcgcaggcctccttgctgctctctggtttggttgggaggtgtgtttacctcttgctcctcattcctcccctgcccttttctctggaatatctaagatgtgagctgcattgactctgaagacgtttgaggaacaggagtgggcactgatagaaaggacttcaacgccagtgactgtgtacctccagcagaagaaaatcaggtgtctggtcttgggggcactgtgctcacttctagagagaagaaaaaggctgggtttggacttcatgcctcctcactggtgaaacccaggatgtagatagagggccacacccaccctgtccagagtagagggcacctgtccacgtggccagggcccatgctgccaccctcgaggagatggaaccctgtgatgcaaaagctttgctggtgtgtttggggcataaggcactgctccccttccatctctagcagatatcatcttctcagccaattctgtaggacactgaggctcttgtttgacatggtgtgtggatggggacttgccccaagactgagcaggtctgccctttcattggggtgtatacatatcaggggaccctgaggtggcaccgtactcagtgttgtgatgcccccacctagggaggactcaatgctctttgtatgccttatgcagcgctgatctgtccctggagttcccaggttcccagctccccccctgcaagccttgaagcctccagcaacgtctatctccaggagagcagggcagcctatgcaagtgttccggcaggaccagaagtggccactcaacacacgtcctcaccagtcaccccaaatggagacactcgcagacctgcagttctcagaccgaaggtgctgccttcatcctccccacctaatgcatttttgaaaccaaaggtacctagcctcagagacagagaaggagagggggagatcttgagtctaagaggaaccctttagctgtttctgcagctgaggtcagtttcaggagggtgaagctgatccccaggaatggatcagctgccatgggcacagcctccgatttgagcctctccggctgccagccagggggcctgggccagaccagggctctgtccttccgtgactttattaaagcaacatttgccacatgtttaagccgcaaaggtattagcaatgcttgcatcattaataatcattcagttgaaggtcaagcccatagacacacactctctgctggtaagaaaccatagcccagaactgagccaataaggttgtttgaacctgagagtgtgtaatggtcatttgggccaagcctcagctagggctgctgcctggacgcctgaggggcagcttatcacagtgcaaggggacagggtaaacagcagggggtggggtgtgagcttggagggcccctcccctggatttcctccaacacctgcttggatactaggcccactgtccctgaagggaatgtcagggaagtgtgcctgtgagctgaattaaaggactggcctttccagaaaacgctttggatctgagcagagtagtcagtttctcagacactcattccatactgcaccgtacatgccagcgtacccattgcaccgaaagcaggcccttagggcaggaagggacgatgagcaagtctgccacaccacctggtgactgggaagggctgcttctctcgtaagggtcttggggagaagtaagcccgcagcctgcctctgcacctcgttccagtgtcctgccaggctctgtactgtcctttgtgtatgaagaaaatgctgttagccctctctcaggctgctgttctgtgggtgctgagagctgccccccatcaccacgccatcacacccctctgagcagaagcaaatctgaggctgaagaattaagttttccccaagcaaggaaggcaggtggtcagagagatcaaacgctgaggcgtggggattgcaggattcaggaggcagcccctttggggaagaggagggtgcattttccatggagcccatgtcagagtccactccagctcagcaggaaagtggaattgcccagtactgcctgccagctgggtctcccaagcaactaccccaagacataccaacagtgaagccaggacagcaccatgccatcggcgctccagtctgtctggctgggaggaaagtgctgggcatcttacagtaactctagaagttcctttgactaggctgcaatcccacctatatgctcagccctaagagctgtggtttcctgtgctctcatttgtccattcattcattcattcattcattcagcaaataatctgaaatccagtctgaactaaggcctgagctgtggataccatggcgcgtgagttagatgtggtccctgccctcatggggctgacagtcctaaaatcaagtgctaggacacagtggccattgagctgggagcattcttccctctaccgcttaagccactgatggctgcgagcttgaagagagggattctgagggagagcttggtccatctggtcaccaaggctgggcgggacagagcagtcaagaaccacggtgtggcttgagaaacagtcctgcttcctgagcctctttgctctgcctcttggggcaagctccttaacctgtctgtatttttatgcctctgtctcccattcagttcctccttgaatacctctttctacagagaggcacgggctcccctgaaggattgtcgaggccagggttcgggaagtacactgccatcggtcaggggacagctgcctcccaccttgcctgggtgatggtgaatgggactcatcttttcctgccttgcttttgaggagatggttgaatttaagctaacaggaaagccaaaccagcaccctcctttgtgctctgagaggttggagacatctggtccaccccattgcccctgcccctggcaagccctgaagtcgggagaggtgaccacaggtctgaaaatcagccagtgccaacattgcttgccctgcaaggtgcaactgagcccacatagcgcattcatagtttccctgaccacagccttgggaagacggtggaaacccgaggatgtgtgggtttcccagctaacggacaagctcccctgccacacccagtgcccacgcatgctcacatacatacagcagaccacaaccctgttgccaagcagtgcttccaagggatagcgatccagattccaacattgtcttggagagggttagtccacatccaagttgcgtgagataagatgcaaagggctctgtgtggatgaggaacgcaccttagaggagtgggaaaggccaccagggttgggccctgtttaggtaattcctgttggcagcacctagagagagcatctgagctgaaggagtgggaaactttgcccaagcaatggcacgggcagcgggctctttctggcgccctgtgctggagcagggccaagtcttagggcatcacaaacagcccatttgatggagggagcagggacatagcacatttttgtctgtctttgtgaggctgctttgctaactctctgaggagaggaagcctctcgggctttccgtcggctggggctagtgccagagaatcccttctcagtggccagcaggttcctgggaggccggcacaaggcaccgctccccactcatgacaccttggtgcagagtgacctcctgcccagtcaccactccggccagccccagccaaacacacaaaagcccatggttgcggttgcatctacaccgttagttggcaaaggatcctgcttgagctctgcgtggtggccaaggagtagcatggaggagggccctgattttaaaaaggaaaaatagagaggcctcaaaacaatgaaacaaagagcttgatatgtcaagaggagaccaaggccctgggaggcataggcaagccgggcagagtcagaccagtgccctcccttgaccatctcctagcattccttaacctagacaggggctaccccatgtgagtccaagccagactttgtggctgtccccagcctgcacagcccaagcccagggaagtgtcctttctttcccttccttactaataatgggccttcctgagacacattcagagaaggatcagagagaaaggagaaccatccaggagagccacaagcgtccaccaaacagtgtctcaggcctcacctgaagctgctgttcctcctatcagcacactagtattaaatgggtgttccataatgaggagaatggaaataggtacaaggcatctagcttaggacagaatcggatttcggcatgtgaaggaatcccagagctgatctcattgaaatgatctatcgtacagacaaggatatgcaaatccacagaagtgaagggatttttgctcaagatcacatagctggtaaactaaggtaaggttagggcttgaacttgggccttctgactccttgtccagtcagtgttctttcatctcaccacagctgcctcctttgaaacagaggtattaagatctgtccttctggttcaccctctcatacctctttactgcgtctcccacatcccccacatgcctcccaaaatgaaagacaaacaggattgtttctgagaccaagatcagtctgtctgtgatcagcctgtgtgtggttcacccagtcatgcaattaagggcagatctgggccagtggaataggatagctgattggtgtttgttactgtgaaccctagaccgtaccccgtagaatggtgtctcttgctttgtaacacatcgggccttcagtgtgctgtattcctcagaagtgagggcatctcggtccattctgcccatggccacagggtgcagagaggcagcagggcccatgcaagctgccaccctgggatttgctgggctggagttcaacagatgtaaagacttcagtgaagcaataaacacaaaactctgggagaagatatccagaattttgtacattactctgtttctttttcaaaaatgaggcagatcagatgcccctgagctgcccctttttttctgattcccaactgcaatgtcctcagtcagtgttgtccctctgcccggctccccagctctttgccaacctcttcacactccccttgagctgagcatcagtcgcctgtgacgtggccaccttctgtcctgctcccactcccgacccatgctggaccccggaggacctcctgccccgcccccaccacacacccatatcccccaccattccaatttgttctttcccgtggggaattttttttcccagcgtctccatcccttcctacatatccacacacacacaaattggtctgatcttttttccattggttaaacatttaactccatgccagaccttgttttaacccctctcacatcatgttctttccttttttgcgagttattttgcattaaccaactttgtcagtgacagatgcgtatctgagggtgtcacacacgaccttcagcagggaagacttctgggccatggagggccgtctaatacatggacttataaactgactgcatgagcaatgaaaaggccaaattattctgaattttttttgaatcactgtaaaaaaactgatttcttttgtatagagaacactaaacgtataataaaagttgttcaaaatgg

SEQ ID NO: 297560 - DNA, 3774 bp, Artificial Sequence
  derived and/or modified sequence
atggccaggcaacccccacctccatgggtgcacgccgcattccttctttgtctgctaagtctaggtggcgctatcgagattccaatggaccccaatccccagcacaggctgacacaaccgcctaccatcaccaaacagtcagccaaagaccatatcgtggatccaagagataacatcctgatcgagtgtgaggccaaaggcaatcctgccccaagctttcactggactcggaattccaggttcttcaacattgctaaggatccacgagtttccatgcggcgacggtctggtacgctcgtgattgactttcgtagtggaggacgtccagaggaatacgaaggagagtaccagtgctttgcccgtaacaagtttggcactgctctgagcaaccgaatcagacttcaggtctctaaatccccactgtggcccaaagagaatctagaccccgtggtcgtgcaggagggagcccctctgacacttcagtgcaacccacctcctggactgccgtctccggtgatcttttggatgtcatcaagtatggagcctataacacaggataaaagggtgagccaagggcacaatggagacctctacttcagcaatgtaatgctccaggatatgcaaaccgactacagctgcaatgccaggttccacttcacacataccatccaacagaaaaacccctttacacttaaagtgttgaccactaggggcgtggccgaacggacgccttcatttatgtacccccagggcaccgcttccagccagatggtcttgagaggtatggacctgttattggagtgcattgctagtggcgtgcccaccccagatattgcctggtataagaaaggaggggatttgccttctgataaggcaaagtttgagaattttaacaaagcacttaggataactaacgtatcggaagaggacagcggggagtatttctgtcttgcatccaataaaatggggagtatacggcacacaatcagcgtgagggtcaaggctgccccatactggctggacgaacctaagaacctcatcctcgcacctggcgaggatggacgtctggtgtgccgagcaaatggtaatcctaaaccaaccgttcagtggatggtcaacggcgagcccttgcagagcgcacctccaaatccaaatcgagaagtggctggtgacaccatcatctttcgggacacccagatctctagtcgcgcagtctatcaatgcaacacttcaaatgaacacggctacttgcttgccaatgcttttgttagcgtgcttgacgtgcctccgcgaatgcttagtcccagaaaccagcttattagagttattctgtataatcggacgaggctcgattgcccattctttggatcaccaatcccaacccttcgttggttcaagaacgggcaggggtctaacctcgacggaggcaattatcatgtttacgagaacgggagtctggaaatcaaaatgatccgcaaggaagatcaggggatatatacctgtgtcgcgaccaacatcctggggaaggccgaaaatcaggtgcgcctggaggtgaaagatcctacgcgcatctatagaatgcctgaggatcaggtggctcggagaggcactactgtgcagctagaatgcagggttaagcacgatccgtcgctcaaactgaccgttagctggctgaaagacgacgaacccctttatattggcaacagaatgaagaaggaggatgacagcctcacgatcttcggagttgctgaaagggatcaggggtcctatacttgcgtcgcatcgacagagctggaccaggacctggccaaagcttacctaactgtcttagcagaccaagctacacccaccaacaggctagctgccctgcctaaaggccgtccagaccgccctagagatttggaacttactgacttggctgagcggagtgtccggctgacctggattccaggagatgcaaacaactctcctatcacagattatgtggttcaattcgaggaggaccagtttcaacccggtgtgtggcatgaccatagtaaatatcccggttccgtcaattctgctgttctgcggctgagcccctacgtaaattatcagttccgggtcatcgccatcaacgaagttggatcttctcacccatccctgccgagcgagcggtacagaactagcggggcaccgcctgaatctaatcccggagacgtcaagggggaaggaacaaggaagaacaatatggaaatcacgtggacgccaatgaatgcaacaagcgcgttcgggcctaatctgcggtacatcgttaagtggagacggagggagacccgagaggcctggaataacgtcactgtctggggaagccgatatgtggtggggcagactccagtatacgtgccctatgaaataagagttcaggcggagaatgacttcggcaaggggcctgagccagagagtgtcataggatattccggggaggactatcccagagcggcacctaccgaagttaaggtccgggtaatgaattccaccgcgatttcacttcagtggaatagagtatatagcgacactgtgcagggacaactgagggaataccgcgcatactattggcgcgagtcctccctgctgaaaaacctctgggtaagccaaaagagacagcaggccagctttccaggtgacagactgcgcggtgtggtgagtcgactgttcccatactccaactacaaactcgagatggtggttgtgaatggcagaggagacggacccagatccgagacaaaagaatttacaaccccagagggagttccttccgcacctaggcggtttcgtgtgaggcaaccaaacctcgagacgattaacctggaatgggatcatcccgagcatcctaatggaattatgatcggctacaccctgaagtatgtggcctttaacgggactaaagtgggtaagcagatcgtggaaaacttttccccaaatcagacaaaattcaccgtgcagagaaccgaccctgtttccagatatcggttcacccttagcgccaggacccaagttggatctggtgaagccgtcacagaagagtcacctgccccacccaatgaaggatcccccgttatgtctccaccaactctcccgcctactacggtgggggcaacaggggctgtgagctccaccgatgccaccgctattgccgcaactacagaggcgacaacggtccccatcattccgaccgtggcacctaccactatagccactactacaaccgtggccacgaccactaccactaccgctgccgctacaaccaccacagaaagtcctcccaccactacttcaggcacgaagattcatgagagtgcttatactaataaccaggccgacatcgcaacacagggatggtttatcggcttgatgtgcgcgattgccctgctggtcttgatacttctgatcgtgtgcttcattaaacggtcacgtgggggaaagtatccagtccgcgagaagaaagacgtgccactgggcccagaggaccccaaagaggaggatggtagcttcgattattcagacgaggataataaaccattacagggaagtcagacctctctcgacgggaccattaagcagcaggaatcagatgactccctggttgattacggggaaggaggtgaagggcagttcaacgaggacggttcatttataggccaatacacagtgaagaaggacaaggaagaaaccgagggtaacgaatctagcgaagctacatccccggttaacgctatctattcactggcctag

SEQ ID NO: 297561 - protein, 1071 aa, Artificial Sequence
  derived and/or modified sequence
MARQPPPPWVHAAFLLCLLSLGGAIEIPMDPNPQHRLTQPPTITKQSAKDHIVDPRDNILIECEAKGNPAPSFHWTRNSRFFNIAKDPRVSMRRRSGTLVIDFRSGGRPEEYEGEYQCFARNKFGTALSNRIRLQVSKSPLWPKENLDPVVVQEGAPLTLQCNPPPGLPSPVIFWMSSSMEPITQDKRVSQGHNGDLYFSNVMLQDMQTDYSCNARFHFTHTIQQKNPFTLKVLTTRGVAERTPSFMYPQGTASSQMVLRGMDLLLECIASGVPTPDIAWYKKGGDLPSDKAKFENFNKALRITNVSEEDSGEYFCLASNKMGSIRHTISVRVKAAPYWLDEPKNLILAPGEDGRLVCRANGNPKPTVQWMVNGEPLQSAPPNPNREVAGDTIIFRDTQISSRAVYQCNTSNEHGYLLANAFVSVLDVPPRMLSPRNQLIRVILYNRTRLDCPFFGSPIPTLRWFKNGQGSNLDGGNYHVYENGSLEIKMIRKEDQGIYTCVATNILGKAENQVRLEVKDPTRIYRMPEDQVARRGTTVQLECRVKHDPSLKLTVSWLKDDEPLYIGNRMKKEDDSLTIFGVAERDQGSYTCVASTELDQDLAKAYLTVLADQATPTNRLAALPKGRPDRPRDLELTDLAERSVRLTWIPGDANNSPITDYVVQFEEDQFQPGVWHDHSKYPGSVNSAVLRLSPYVNYQFRVIAINEVGSSHPSLPSERYRTSGAPPESNPGDVKGEGTRKNNMEITWTPMNATSAFGPNLRYIVKWRRRETREAWNNVTVWGSRYVVGQTPVYVPYEIRVQAENDFGKGPEPESVIGYSGEDLPSAPRRFRVRQPNLETINLEWDHPEHPNGIMIGYTLKYVAFNGTKVGKQIVENFSPNQTKFTVQRTDPVSRYRFTLSARTQVGSGEAVTEESPAPPNEGSPVMSYTNNQADIATQGWFIGLMCAIALLVLILLIVCFIKRSRGGKYPVREKKDVPLGPEDPKEEDGSFDYSDEDNKPLQGSQTSLDGTIKQQESDDSLVDYGEGGEGQFNEDGSFIGQYTVKKDKEETEGNESSEATSPVNAIYSLA

SEQ ID NO: 297562 - DNA, 3216 bp, Artificial Sequence
  derived and/or modified sequence
atggccagacagcccccccccccctgggtgcacgccgccttcctgctgtgcctgctgagcctgggcggcgccatcgagatccccatggaccccaacccccagcacagactgacccagccccccaccatcaccaagcagagcgccaaggaccacatcgtggaccccagagacaacatcctgatcgagtgcgaggccaagggcaaccccgcccccagcttccactggaccagaaacagcagattcttcaacatcgccaaggaccccagagtgagcatgagaagaagaagcggcaccctggtgatcgacttcagaagcggcggcagacccgaggagtacgagggcgagtaccagtgcttcgccagaaacaagttcggcaccgccctgagcaacagaatcagactgcaggtgagcaagagccccctgtggcccaaggagaacctggaccccgtggtggtgcaggagggcgcccccctgaccctgcagtgcaaccccccccccggcctgcccagccccgtgatcttctggatgagcagcagcatggagcccatcacccaggacaagagagtgagccagggccacaacggcgacctgtacttcagcaacgtgatgctgcaggacatgcagaccgactacagctgcaacgccagattccacttcacccacaccatccagcagaagaaccccttcaccctgaaggtgctgaccaccagaggcgtggccgagagaacccccagcttcatgtacccccagggcaccgccagcagccagatggtgctgagaggcatggacctgctgctggagtgcatcgccagcggcgtgcccacccccgacatcgcctggtacaagaagggcggcgacctgcccagcgacaaggccaagttcgagaacttcaacaaggccctgagaatcaccaacgtgagcgaggaggacagcggcgagtacttctgcctggccagcaacaagatgggcagcatcagacacaccatcagcgtgagagtgaaggccgccccctactggctggacgagcccaagaacctgatcctggcccccggcgaggacggcagactggtgtgcagagccaacggcaaccccaagcccaccgtgcagtggatggtgaacggcgagcccctgcagagcgccccccccaaccccaacagagaggtggccggcgacaccatcatcttcagagacacccagatcagcagcagagccgtgtaccagtgcaacaccagcaacgagcacggctacctgctggccaacgccttcgtgagcgtgctggacgtgccccccagaatgctgagccccagaaaccagctgatcagagtgatcctgtacaacagaaccagactggactgccccttcttcggcagccccatccccaccctgagatggttcaagaacggccagggcagcaacctggacggcggcaactaccacgtgtacgagaacggcagcctggagatcaagatgatcagaaaggaggaccagggcatctacacctgcgtggccaccaacatcctgggcaaggccgagaaccaggtgagactggaggtgaaggaccccaccagaatctacagaatgcccgaggaccaggtggccagaagaggcaccaccgtgcagctggagtgcagagtgaagcacgaccccagcctgaagctgaccgtgagctggctgaaggacgacgagcccctgtacatcggcaacagaatgaagaaggaggacgacagcctgaccatcttcggcgtggccgagagagaccagggcagctacacctgcgtggccagcaccgagctggaccaggacctggccaaggcctacctgaccgtgctggccgaccaggccacccccaccaacagactggccgccctgcccaagggcagacccgacagacccagagacctggagctgaccgacctggccgagagaagcgtgagactgacctggatccccggcgacgccaacaacagccccatcaccgactacgtggtgcagttcgaggaggaccagttccagcccggcgtgtggcacgaccacagcaagtaccccggcagcgtgaacagcgccgtgctgagactgagcccctacgtgaactaccagttcagagtgatcgccatcaacgaggtgggcagcagccaccccagcctgcccagcgagagatacagaaccagcggcgccccccccgagagcaaccccggcgacgtgaagggcgagggcaccagaaagaacaacatggagatcacctggacccccatgaacgccaccagcgccttcggccccaacctgagatacatcgtgaagtggagaagaagagagaccagagaggcctggaacaacgtgaccgtgtggggcagcagatacgtggtgggccagacccccgtgtacgtgccctacgagatcagagtgcaggccgagaacgacttcggcaagggccccgagcccgagagcgtgatcggctacagcggcgaggacctgcccagcgcccccagaagattcagagtgagacagcccaacctggagaccatcaacctggagtgggaccaccccgagcaccccaacggcatcatgatcggctacaccctgaagtacgtggccttcaacggcaccaaggtgggcaagcagatcgtggagaacttcagccccaaccagaccaagttcaccgtgcagagaaccgaccccgtgagcagatacagattcaccctgagcgccagaacccaggtgggcagcggcgaggccgtgaccgaggagagccccgccccccccaacgagggcagccccgtgatgagctacaccaacaaccaggccgacatcgccacccagggctggttcatcggcctgatgtgcgccatcgccctgctggtgctgatcctgctgatcgtgtgcttcatcaagagaagcagaggcggcaagtaccccgtgagagagaagaaggacgtgcccctgggccccgaggaccccaaggaggaggacggcagcttcgactacagcgacgaggacaacaagcccctgcagggcagccagaccagcctggacggcaccatcaagcagcaggagagcgacgacagcctggtggactacggcgagggcggcgagggccagttcaacgaggacggcagcttcatcggccagtacaccgtgaagaaggacaaggaggagaccgagggcaacgagagcagcgaggccaccagccccgtgaacgccatctacagcctggcctag

SEQ ID NO: 297563 - DNA, 3216 bp, Artificial Sequence
  derived and/or modified sequence
atggcccgacaaccacctcccccttgggtacacgctgcctttctactgtgcttgttatcgctcggaggagcaatcgagatccctatggatccaaaccctcagcatcgattgactcagccacccacgattacaaagcagtctgcaaaagatcatattgtcgatccccgggacaacattctgattgagtgtgaagctaagggcaatccagcccccagcttccattggactagaaacagtcggttctttaacatcgcaaaggacccaagggtgtctatgagacgaaggagcggaacattggtcatcgatttccgatcaggagggagacccgaggaatacgagggtgagtaccaatgcttcgctcgaaacaagtttggaaccgccctgagcaaccgaattcgactccaggtatccaagagcccattgtggcctaaggaaaatctggatccagtcgtggtgcaggaaggagccccccttaccttacagtgtaacccacccccaggtctcccttctccggttattttttggatgagcagttctatggaacctatcacgcaggacaagcgggtctcacaaggccataacggagatctctattttagtaatgtgatgttgcaggacatgcagaccgactactcttgtaatgcgcggtttcattttacacacacaatccagcagaagaatccattcaccttgaaggtgctgactacaaggggcgtggccgaacggaccccaagctttatgtacccccagggaacagcgagctcccaaatggttttacgcggaatggatctcctgttagagtgcatcgcctcaggcgttccaacccctgacatcgcttggtacaagaagggcggggacctcccatcagacaaggcaaagttcgagaactttaacaaagctctcagaatcacaaatgtgtccgaagaggattcaggtgaatacttctgtttggcatccaataaaatgggcagcattagacacacaataagcgtgcgagttaaagccgccccctattggttggacgagcctaagaatctcatactggcccccggcgaagacgggaggctcgtttgccgggccaacgggaaccccaaacctactgtgcaatggatggtcaacggtgagccactccaatcagctccccctaacccaaaccgggaggtggccggtgacacaattattttcagagacactcaaatttcctcacgggctgtgtatcagtgtaatacgtcgaacgaacatggatacctgcttgccaacgcatttgtgagtgtgctcgatgtgcccccacggatgctatccccgcgcaaccagctgattcgcgttatcctttacaataggaccagacttgactgcccgttttttggctccccaatacctacccttcgctggtttaagaatgggcagggcagcaatctggacggcggaaattaccatgtctatgaaaatggctcgctagagattaagatgatccgaaaagaggatcagggcatttatacctgcgtggccaccaacatacttggaaaagccgagaaccaggttagacttgaggttaaagatcctactaggatttatagaatgcccgaggatcaggttgctcggcgagggaccacagtgcagctggaatgtcgagtgaaacacgatccttccctgaagctgacggtgtcgtggcttaaagatgacgagccactctacatcggcaatcgcatgaagaaagaagatgacagtctcaccatctttggcgtagcagagagggatcagggatcctatacctgcgtcgcaagtaccgaactggaccaggatctcgctaaggcttacctgaccgtgctggctgaccaggccacccccaccaacaggctggctgccttaccaaaaggtcgccctgaccgcccacgcgatctggaactgacggatctggccgagaggtcagtgcggcttacttggatccccggtgacgcaaacaattctccaatcacagactacgtcgtacagttcgaagaggatcaatttcaacctggggtatggcatgaccattccaagtacccaggaagcgtgaattctgcagtcctccgcctgagcccctatgtgaactaccagttcagggtgatagcaatcaatgaggtgggttcttctcacccaagcctccccagtgaacggtataggactagtggggctccaccagaatcaaatccgggggatgtgaaaggtgaggggacaagaaagaataatatggaaattacctggaccccgatgaacgctacgtccgcttttgggcccaatttgcgctacatcgtgaaatggcgccgcagggagactagagaggcgtggaacaacgtgaccgtctggggctcaagatacgttgtcggccaaaccccggtctacgtgccctacgagatacgcgtccaggcagagaacgacttcggcaaagggcccgagcccgaatcggtaataggatacagcggggaggacctgccctctgctccacggagattccgggtgcggcaacccaatctggagacgattaacctggagtgggatcaccccgagcatcccaacggcataatgattggctatactcttaagtacgtcgcttttaatggaacaaaggttggcaagcagatagtagagaacttcagtcccaatcagacaaaatttacagtgcaacgcacagacccggttagccggtatagattcactctcagtgctcgcacccaggtcggatctggcgaggcagttacagaggagagtcctgcacctccaaatgaaggaagcccagtgatgtcctacacaaataaccaggccgacattgctacacagggttggttcattgggctcatgtgtgctattgcactactggtgttaatcctcctaatcgtctgtttcattaaaagaagccggggaggaaaatatccagtaagggagaagaaagacgttccgctggggcccgaagatccaaaggaagaggatggatcttttgattacagcgacgaggacaacaaaccactccagggctcacagacaagcctcgacggaaccatcaagcagcaggagtcagacgacagcttagtggactatggcgaaggtggcgaaggccagttcaatgaggacggctccttcattggacaatatacagtgaagaaagataaagaagagacggagggcaacgagagctcagaagcaacttctccagtcaatgctatatactcactcgcctag

SEQ ID NO: 297564 - DNA, 3216 bp, Artificial Sequence
  derived and/or modified sequence
atggcccggcagcccccaccaccctgggtgcacgccgccttcctgctgtgcctgctgagcctgggcggggccatcgagatccccatggaccccaacccccagcaccggctgacccagccccccaccatcaccaagcagagcgccaaggaccacatcgtggacccccgggacaacatcctgattgaatgtgaggccaagggcaacccagcccccagcttccactggaccaggaacagccgcttcttcaacatcgccaaggacccccgggtgtccatgagaagaagaagtggcaccctggtgattgacttccgcagcggcggccggcctgaggagtatgaaggagagtaccagtgctttgccaggaacaagtttggaacagccctgagcaaccgcatccggctgcaggtgtccaagagccccctgtggcccaaggagaacctggaccctgtggtggtgcaggagggcgcccccctgaccctgcagtgcaaccccccacctggcctgcccagccctgtgatcttctggatgagcagctccatggagcccatcacccaggacaagagggtgtcccagggccacaacggggacctgtacttcagcaatgtgatgctgcaggacatgcagacagactacagctgcaatgcccgcttccacttcacccacaccatccagcagaagaaccccttcaccctgaaggtgctgaccacccggggcgtggccgagaggacccccagcttcatgtacccccagggcacagccagcagccagatggtgctgcggggcatggacctgctgctggagtgcatcgccagcggcgtgcccaccccagacatcgcctggtacaagaagggcggggacctgcccagcgacaaggccaagtttgagaacttcaacaaggccctgcgcatcaccaacgtgtctgaagaagattctggagagtacttctgcctggccagcaacaagatgggcagcatccgccacaccatctctgtgcgggtgaaggccgccccctactggctggatgagcccaagaacctgatcctggcccctggagaagatggccgcctggtgtgccgggccaatggaaaccccaagcccaccgtgcagtggatggtgaatggagagcccctgcagagcgccccacccaaccccaaccgggaggtggccggggacaccatcatcttccgggacacccagatcagcagcagagctgtgtaccagtgcaacaccagcaatgagcacggctacctgctggccaatgcctttgtgtctgtgctggatgtgccccccaggatgctgagccccaggaaccagctgatccgggtcatcctgtacaacagaacccggctggactgccccttcttcggcagccccatccccaccctgcgctggttcaagaatggccagggcagcaacctggatggcggcaactaccacgtgtatgaaaatggcagcctggagatcaagatgatcaggaaggaggaccagggcatctacacctgtgtggccaccaacatcctgggcaaggccgagaaccaggtgcggctggaggtgaaggaccccacccgcatctacaggatgcctgaggaccaggtggcccggcggggcaccaccgtgcagctggagtgccgggtgaagcatgaccccagcctgaagctgactgtgtcctggctgaaggatgatgagcccctgtacatcggcaacaggatgaagaaggaggatgacagcctgaccatcttcggcgtggccgagcgggaccagggcagctacacctgtgtggccagcacagagctggaccaggacctggccaaggcctacctgactgtgctggccgaccaggccacccccaccaaccggctggccgccctgcccaagggccgcccagaccggccccgggacctggagctgacagacctggccgagaggtctgtgcggctgacctggatccctggagatgccaacaacagccccatcacagattatgtggtgcagtttgaggaggaccagttccagcccggggtgtggcatgaccacagcaagtacccaggctctgtgaacagcgctgtgctgcggctgagcccctacgtgaactaccagttccgggtgattgccatcaatgaggtgggcagcagccaccccagcctgcccagcgagcgctaccgcaccagcggggcccctcctgagagcaaccctggagatgtgaagggggagggcaccaggaagaacaacatggagatcacctggacccccatgaatgccaccagcgccttcggccccaacctgcgctacatcgtgaagtggaggagaagagagacccgggaggcctggaacaacgtgacagtgtggggcagccgctacgtggtgggccagacccctgtgtatgtgccctatgagatccgggtgcaggccgagaatgactttggaaaaggacctgagcctgagagcgtgattggctacagcggggaggacctgcccagcgccccccggcgcttccgggtgcggcagcccaacctggagaccatcaacctggagtgggaccaccctgagcaccccaacggcatcatgattggctacaccctgaagtatgtggccttcaacggcaccaaggtgggcaagcagatcgtggagaacttcagccccaaccagaccaagttcaccgtgcagaggacagatcctgtgagccgctaccgcttcaccctgagcgcccggacccaggtgggcagcggggaggccgtgacagaggagagccctgcccccccaaatgaaggcagccctgtgatgagctacaccaacaaccaggccgacatcgccacccagggctggttcatcggcctgatgtgtgccatcgccctgctggtgctgatcctgctgattgtgtgcttcatcaagaggagcagaggaggcaagtaccctgtgcgggagaagaaggatgtgcccctgggccctgaggaccccaaggaggaggatggcagctttgactacagtgatgaggacaacaagcccctgcagggcagccagaccagcctggatggcaccatcaagcagcaggagagtgatgacagcctggtggactatggagagggcggggagggccagttcaatgaagatggcagcttcatcggccagtacacagtgaagaaggacaaggaggagacagagggcaatgaaagcagcgaggccaccagccctgtgaatgccatctacagcctggcctag

SEQ ID NO: 297565 - DNA, 3216 bp, Artificial Sequence
  derived and/or modified sequence
atggcccggcagcccccccccccctgggtgcacgccgccttcctgttatgcctgttgtccttaggaggcgccatagagattccgatggatcccaatccgcagcatcgactcacacagcctccaacgatcaccaagcagagtgccaaggaccatatcgtggacccgcgcgacaatatattgatcgaatgtgaggcaaagggaaaccccgccccttcctttcattggacgcgcaattccaggtttttcaacattgctaaggacccgcgggtgagcatgcggcgaagaagcggaaccctggtaatagatttccgaagtggaggacggccggaagagtacgaaggtgagtatcagtgtttcgccaggaataaatttggtaccgccttatcaaatcgcatacggctgcaggtgagcaaatcccccctgtggccaaaggagaaccttgaccctgtggttgtccaggagggggccccgctgacactgcagtgtaaccctccccccggtctaccaagccccgtgattttctggatgagtagctcaatggaaccaatcacccaggataagagggtgtctcagggacataacggagacctgtacttttccaacgtgatgttacaggatatgcaaactgactactcttgtaacgcccgctttcacttcacgcataccatccagcaaaaaaaccctttcacgttgaaggtgcttacaacacggggtgtggctgagcgaacaccgtcattcatgtacccgcaggggactgcatcttctcagatggtcttgcgaggcatggacctgctgctcgaatgtattgcgtccggagtaccaacacctgacattgcctggtataagaaagggggagacctccccagcgataaagctaaattcgaaaatttcaataaggcactacggatcaccaatgtctctgaggaggatagtggagaatacttttgtctggcaagtaataaaatgggatctatcaggcatacgatctcagttagggtgaaggctgctccatattggctggacgagccgaaaaatttaattttggcccccggagaagatggacgactggtatgccgcgctaatggtaaccctaagccgactgtgcagtggatggtgaatggcgaacctcttcagagcgcccccccgaaccctaaccgggaggtggctggagataccattatattcagagatacccagatctcaagccgcgccgtgtaccaatgcaatactagcaacgagcacggatacctgctggctaatgccttcgtttccgtgctcgatgtgcccccccgcatgttgagccctagaaaccagctgatccgggtgattctgtacaaccggaccaggctcgactgtccgtttttcgggtcccctataccaaccttgaggtggttcaaaaatggacagggctccaacttagacgggggcaattatcacgtgtacgaaaacggtagtttggaaatcaagatgatccgcaaagaagaccagggaatctacacctgtgtcgcaactaatatccttggaaaagccgagaatcaggtgcggctggaagtgaaggatcccactcgcatctatagaatgccagaagatcaggtggcaaggcgagggacgaccgtgcagctggaatgtagggttaaacatgatccatccttgaagcttaccgtgagctggctgaaggatgatgaaccgctgtacatcggcaacaggatgaagaaagaagacgactcacttacaatattcggagtcgccgaacgcgaccagggctcatatacctgtgttgcctccaccgagcttgatcaagacctagccaaggcttacctaactgttctcgctgatcaggctactcctacaaatcgcttagctgcactcccaaaaggtcgccctgaccggccacgcgatcttgagcttacagatttggccgaacggtccgtgaggctaacatggatccccggcgacgctaataacagccctattacagactatgtcgtgcagtttgaagaagatcagttccagcctggggtttggcacgatcattccaaataccctggtagcgtcaacagtgccgtccttaggttatctccttacgtgaactatcaatttcgcgtcatcgctattaacgaagtgggctcttcccacccttccttaccatccgagcgatatagaacttccggagcacctccagagagcaatcccggagatgttaagggcgaaggaaccaggaaaaataacatggagatcacctggacccccatgaacgctacctctgccttcgggccgaacctgaggtacatagttaagtggcggcgcagggaaacacgcgaggcctggaataacgtgacagtgtggggatctagatacgtcgtgggccagacccccgtgtacgttccatacgagattagagttcaggcagagaacgatttcggcaaggggcctgagccagagtctgtgattgggtactctggcgaggacctcccctcagcacctagacgtttcagagtgcggcagcccaacctggagaccatcaatctggaatgggaccaccctgaacatccaaacggtatcatgattggctacaccctcaagtatgtggcattcaatggaaccaaggtgggcaagcagattgtggaaaatttcagtcctaaccagactaagtttacagtccaacgcaccgatccagtgagccgctaccgcttcacgttatctgcacggactcaggttggttcaggggaagctgtgacagaggagagccctgccccaccgaacgaggggtcccccgtgatgtcctacaccaacaatcaggccgacattgctacccaggggtggttcattggactgatgtgcgccatcgcattgctggtccttattctgcttattgtgtgctttattaaaagaagcagagggggcaagtacccagtgcgggaaaaaaaggatgtccctttaggccccgaggacccaaaagaggaggacgggagctttgattactccgatgaagacaataagccattacagggaagtcaaacatccctagatgggacgatcaaacaacaggagtcggacgactccctggtggattacggcgaagggggagaagggcagtttaacgaagatggctcgtttatcggccaatacacggttaaaaaagacaaagaggagactgaaggcaatgaaagttctgaggccacaagccctgtgaacgcgatctacagcctggcctag

SEQ ID NO: 297566 - DNA, 9826 bp, Artificial Sequence
  derived and/or modified sequence
gcacgggctggtctctgccctaatgcggcggctggcggcgagaggcgctgcaggggacgcgggggaagtggcggcgccggcagcggacagctcggacagcgcccagggccggagcccgagcccttggaggttgattgacttatgtgcaatttgggacgctggagtttaccttccctccgcagcctggaacagagcctcctctggtgttgcaaggaagaggctgaatgaggcagagaagctgagtgctgtccaggaggcccagttaaagcggctcgaggtgacaagaccccgagtgctggggagcagggagcagggccaggtgccgaggatggccaggcagccaccgccgccctgggtccatgcagccttcctcctctgcctcctcagtcttggcggagccatcgaaattcctatggatcctaaccctcaacataggttgacgcagccgccaaccatcaccaagcagtcagcgaaggatcacatcgtggacccccgtgataacatcctgattgagtgtgaagcaaaagggaaccctgcccccagcttccactggacacgaaacagcagattcttcaacatcgccaaggacccccgggtgtccatgaggaggaggtctgggaccctggtgattgacttccgcagtggcgggcggccggaggaatatgagggggaatatcagtgcttcgcccgcaacaaatttggcacggccctgtccaataggatccgcctgcaggtgtctaaatctcctctgtggcccaaggaaaacctagaccctgtcgtggtccaagagggcgctcctttgacgctccagtgcaaccccccgcctggacttccatccccggtcatcttctggatgagcagctccatggagcccatcacccaagacaaacgtgtctctcagggccataacggagacctatacttctccaacgtgatgctgcaggacatgcagaccgactacagttgtaacgcccgcttccacttcacccacaccatccagcagaagaaccctttcaccctcaaggtcctcaccacccgaggagttgcagaaagaacaccaagcttcatgtatccccagggcaccgcgagcagccagatggtgcttcgtggcatggacctcctgctggaatgcatcgcctccggggtcccaacaccagacatcgcatggtacaagaaaggtggggacctcccatctgataaggccaagtttgagaactttaataaggccctgcgtatcacaaatgtctctgaggaagactccggggagtatttctgcctggcctccaacaagatgggcagcatccggcacacgatctcggtgagagtaaaggctgctccctactggctggacgaacccaagaaccttattctggctcctggcgaggatgggagactggtgtgtcgagccaatggaaaccccaaacccactgtccagtggatggtgaatggggaacctttgcaatcggcaccacctaacccaaaccgtgaggtggccggagacaccatcatcttccgggacacccagatcagcagcagggctgtgtaccagtgcaacacctccaacgagcatggctacctgctggccaacgcctttgtcagtgtgctggatgtgccgcctcggatgctgtcgccccggaaccagctcattcgagtgattctttacaaccggacgcggctggactgccctttctttgggtctcccatccccacactgcgatggtttaagaatgggcaaggaagcaacctggatggtggcaactaccatgtttatgagaacggcagtctggaaattaagatgatccgcaaagaggaccagggcatctacacctgtgtcgccaccaacatcctgggcaaagctgaaaaccaagtccgcctggaggtcaaagaccccaccaggatctaccggatgcccgaggaccaggtggccagaaggggcaccacggtgcagctggagtgtcgggtgaagcacgacccctccctgaaactcaccgtctcctggctgaaggatgacgagccgctctatattggaaacaggatgaagaaggaagacgactccctgaccatctttggggtggcagagcgggaccagggcagttacacgtgtgtcgccagcaccgagctagaccaagacctggccaaggcctacctcaccgtgctagctgatcaggccactccaactaaccgtttggctgccctgcccaaaggacggccagaccggccccgggacctggagctgaccgacctggccgagaggagcgtgcggctgacctggatccccggggatgctaacaacagccccatcacagactacgtcgtccagtttgaagaagaccagttccaacctggggtctggcatgaccattccaagtaccccggcagcgttaactcagccgtcctccggctgtccccgtatgtcaactaccagttccgtgtcattgccatcaacgaggttgggagcagccaccccagcctcccatccgagcgctaccgaaccagtggagcaccccccgagtccaatcctggtgacgtgaagggagaggggaccagaaagaacaacatggagatcacgtggacgcccatgaatgccacctcggcctttggccccaacctgcgctacattgtcaagtggaggcggagagagactcgagaggcctggaacaacgtcacagtgtggggctctcgctacgtggtggggcagaccccagtctacgtgccctatgagatccgagtccaggctgaaaatgacttcgggaagggccctgagccagagtccgtcatcggttactccggagaagatttacccagtgcccctaggcgtttccgagtccggcagcccaacctggagacaatcaacctggaatgggatcatcctgagcatccaaatgggatcatgattggatacactctcaaatatgtggcctttaacgggaccaaagtaggaaagcagatagtggaaaacttctctcccaatcagaccaagttcacggtgcaaagaacggaccccgtgtcacgctaccgctttaccctcagcgccaggacgcaggtgggctctggggaagccgtcacagaggagtcaccagcacccccgaatgaaggtagcccagtcatgtcttacaccaacaaccaagcggacatcgccacccagggctggttcattgggcttatgtgcgccatcgccctcctggtgctgatcctgctcatcgtctgtttcatcaagaggagtcgcggcggcaagtacccagtacgagaaaagaaggatgttccccttggccctgaagaccccaaggaagaggatggctcatttgactatagtgatgaggacaacaagcccctgcagggcagtcagacatctctggacggcaccatcaagcagcaggagagtgacgacagcctggtggactatggcgagggtggcgagggtcagttcaatgaagacggctccttcatcggccagtacacggtcaaaaaggacaaggaggaaacagagggcaacgaaagctcagaggccacgtcacctgtcaatgctatctactctctggcctaacggagcccacccaggcacagccaccactttgcaagtgggaggaggggagaaggggagacaaaaccactgcagacctaccacgaagccaccaccaccttcagtaacaagggtacgatatgggggtctgccaagctgtgaggaccagtagccaccaagccacccacaagccccctcccaatgaccccccttcagccccgggtgccaccagtgtgggagagctggagccgtggctgagctcagctggagggagcctggccccttgcccggtctcgcagccaccccgagcgttccaccacactgtccgcccttggcctcggcacacgctcaccttttctgttggttacgggacttctcattgtcttaatttcgctttgtgcatcttcccctccagacccaatgtctctgttttcttttccttttgaaaaagagtccctggaaaagaaagaataagtggattctcccccaggagaatcctttttgcaaagataggcaaaaaggattgaatccataccagaacacgtagacaggctgtaatattcaaaccacctctgggccaatgcatttccaaaggatgcctttctcgccatatgcctcccctggcccccagcccctctgcctcggccttgtcagttgctgagctgggcttggctcctttctggaaaatgacagtatttttggcagggagaaggtgcgcaggcctccttgctgctctctggtttggttgggaggtgtgtttacctcttgctcctcattcctcccctgcccttttctctggaatatctaagatgtgagctgcattgactctgaagacgtttgaggaacaggagtgggcactgatagaaaggacttcaacgccagtgactgtgtacctccagcagaagaaaatcaggtgtctggtcttgggggcactgtgctcacttctagagagaagaaaaaggctgggtttggacttcatgcctcctcactggtgaaacccaggatgtagatagagggccacacccaccctgtccagagtagagggcacctgtccacgtggccagggcccatgctgccaccctcgaggagatggaaccctgtgatgcaaaagctttgctggtgtgtttggggcataaggcactgctccccttccatctctagcagatatcatcttctcagccaattctgtaggacactgaggctcttgtttgacatggtgtgtggatggggacttgccccaagactgagcaggtctgccctttcattggggtgtatacatatcaggggaccctgaggtggcaccgtactcagtgttgtgatgcccccacctagggaggactcaatgctctttgtatgccttatgcagcgctgatctgtccctggagttcccaggttcccagctccccccctgcaagccttgaagcctccagcaacgtctatctccaggagagcagggcagcctatgcaagtgttccggcaggaccagaagtggccactcaacacacgtcctcaccagtcaccccaaatggagacactcgcagacctgcagttctcagaccgaaggtgctgccttcatcctccccacctaatgcatttttgaaaccaaaggtacctagcctcagagacagagaaggagagggggagatcttgagtctaagaggaaccctttagctgtttctgcagctgaggtcagtttcaggagggtgaagctgatccccaggaatggatcagctgccatgggcacagcctccgatttgagcctctccggctgccagccagggggcctgggccagaccagggctctgtccttccgtgactttattaaagcaacatttgccacatgtttaagccgcaaaggtattagcaatgcttgcatcattaataatcattcagttgaaggtcaagcccatagacacacactctctgctggtaagaaaccatagcccagaactgagccaataaggttgtttgaacctgagagtgtgtaatggtcatttgggccaagcctcagctagggctgctgcctggacgcctgaggggcagcttatcacagtgcaaggggacagggtaaacagcagggggtggggtgtgagcttggagggcccctcccctggatttcctccaacacctgcttggatactaggcccactgtccctgaagggaatgtcagggaagtgtgcctgtgagctgaattaaaggactggcctttccagaaaacgctttggatctgagcagagtagtcagtttctcagacactcattccatactgcaccgtacatgccagcgtacccattgcaccgaaagcaggcccttagggcaggaagggacgatgagcaagtctgccacaccacctggtgactgggaagggctgcttctctcgtaagggtcttggggagaagtaagcccgcagcctgcctctgcacctcgttccagtgtcctgccaggctctgtactgtcctttgtgtatgaagaaaatgctgttagccctctctcaggctgctgttctgtgggtgctgagagctgccccccatcaccacgccatcacacccctctgagcagaagcaaatctgaggctgaagaattaagttttccccaagcaaggaaggcaggtggtcagagagatcaaacgctgaggcgtggggattgcaggattcaggaggcagcccctttggggaagaggagggtgcattttccatggagcccatgtcagagtccactccagctcagcaggaaagtggaattgcccagtactgcctgccagctgggtctcccaagcaactaccccaagacataccaacagtgaagccaggacagcaccatgccatcggcgctccagtctgtctggctgggaggaaagtgctgggcatcttacagtaactctagaagttcctttgactaggctgcaatcccacctatatgctcagccctaagagctgtggtttcctgtgctctcatttgtccattcattcattcattcattcattcagcaaataatctgaaatccagtctgaactaaggcctgagctgtggataccatggcgcgtgagttagatgtggtccctgccctcatggggctgacagtcctaaaatcaagtgctaggacacagtggccattgagctgggagcattcttccctctaccgcttaagccactgatggctgcgagcttgaagagagggattctgagggagagcttggtccatctggtcaccaaggctgggcgggacagagcagtcaagaaccacggtgtggcttgagaaacagtcctgcttcctgagcctctttgctctgcctcttggggcaagctccttaacctgtctgtatttttatgcctctgtctcccattcagttcctccttgaatacctctttctacagagaggcacgggctcccctgaaggattgtcgaggccagggttcgggaagtacactgccatcggtcaggggacagctgcctcccaccttgcctgggtgatggtgaatgggactcatcttttcctgccttgcttttgaggagatggttgaatttaagctaacaggaaagccaaaccagcaccctcctttgtgctctgagaggttggagacatctggtccaccccattgcccctgcccctggcaagccctgaagtcgggagaggtgaccacaggtctgaaaatcagccagtgccaacattgcttgccctgcaaggtgcaactgagcccacatagcgcattcatagtttccctgaccacagccttgggaagacggtggaaacccgaggatgtgtgggtttcccagctaacggacaagctcccctgccacacccagtgcccacgcatgctcacatacatacagcagaccacaaccctgttgccaagcagtgcttccaagggatagcgatccagattccaacattgtcttggagagggttagtccacatccaagttgcgtgagataagatgcaaagggctctgtgtggatgaggaacgcaccttagaggagtgggaaaggccaccagggttgggccctgtttaggtaattcctgttggcagcacctagagagagcatctgagctgaaggagtgggaaactttgcccaagcaatggcacgggcagcgggctctttctggcgccctgtgctggagcagggccaagtcttagggcatcacaaacagcccatttgatggagggagcagggacatagcacatttttgtctgtctttgtgaggctgctttgctaactctctgaggagaggaagcctctcgggctttccgtcggctggggctagtgccagagaatcccttctcagtggccagcaggttcctgggaggccggcacaaggcaccgctccccactcatgacaccttggtgcagagtgacctcctgcccagtcaccactccggccagccccagccaaacacacaaaagcccatggttgcggttgcatctacaccgttagttggcaaaggatcctgcttgagctctgcgtggtggccaaggagtagcatggaggagggccctgattttaaaaaggaaaaatagagaggcctcaaaacaatgaaacaaagagcttgatatgtcaagaggagaccaaggccctgggaggcataggcaagccgggcagagtcagaccagtgccctcccttgaccatctcctagcattccttaacctagacaggggctaccccatgtgagtccaagccagactttgtggctgtccccagcctgcacagcccaagcccagggaagtgtcctttctttcccttccttactaataatgggccttcctgagacacattcagagaaggatcagagagaaaggagaaccatccaggagagccacaagcgtccaccaaacagtgtctcaggcctcacctgaagctgctgttcctcctatcagcacactagtattaaatgggtgttccataatgaggagaatggaaataggtacaaggcatctagcttaggacagaatcggatttcggcatgtgaaggaatcccagagctgatctcattgaaatgatctatcgtacagacaaggatatgcaaatccacagaagtgaagggatttttgctcaagatcacatagctggtaaactaaggtaaggttagggcttgaacttgggccttctgactccttgtccagtcagtgttctttcatctcaccacagctgcctcctttgaaacagaggtattaagatctgtccttctggttcaccctctcatacctctttactgcgtctcccacatcccccacatgcctcccaaaatgaaagacaaacaggattgtttctgagaccaagatcagtctgtctgtgatcagcctgtgtgtggttcacccagtcatgcaattaagggcagatctgggccagtggaataggatagctgattggtgtttgttactgtgaaccctagaccgtaccccgtagaatggtgtctcttgctttgtaacacatcgggccttcagtgtgctgtattcctcagaagtgagggcatctcggtccattctgcccatggccacagggtgcagagaggcagcagggcccatgcaagctgccaccctgggatttgctgggctggagttcaacagatgtaaagacttcagtgaagcaataaacacaaaactctgggagaagatatccagaattttgtacattactctgtttctttttcaaaaatgaggcagatcagatgcccctgagctgcccctttttttctgattcccaactgcaatgtcctcagtcagtgttgtccctctgcccggctccccagctctttgccaacctcttcacactccccttgagctgagcatcagtcgcctgtgacgtggccaccttctgtcctgctcccactcccgacccatgctggaccccggaggacctcctgccccgcccccaccacacacccatatcccccaccattccaatttgttctttcccgtggggaattttttttcccagcgtctccatcccttcctacatatccacacacacacaaattggtctgatcttttttccattggttaaacatttaactccatgccagaccttgttttaacccctctcacatcatgttctttccttttttgcgagttattttgcattaaccaactttgtcagtgacagatgcgtatctgagggtgtcacacacgaccttcagcagggaagacttctgggccatggagggccgtctaatacatggacttataaactgactgcatgagcaatgaaaaggccaaattattctgaattttttttgaatcactgtaaaaaaactgatttcttttgtatagagaacactaaacgtataataaaagttgttcaaaatgg

SEQ ID NO: 297567 - DNA, 3216 bp, Artificial Sequence
  derived and/or modified sequence
atggccaggcagccgccacccccatgggtccacgctgcttttctgttatgtttgctgtctttgggcggagcaatcgagattccaatggatcccaatcctcagcatcggctcacgcaacctccaacgatcactaagcagtccgccaaggaccatattgtggatccaagggacaatatcctcatcgagtgcgaagcaaaagggaatcccgctccatcatttcattggacacggaatagtaggttctttaacattgctaaagatccacgggtgagcatgagacggaggagtggaacgctcgtgattgacttcagatcagggggtcggccagaggagtatgagggcgagtaccagtgttttgctagaaataaattcggcacggcactgtccaaccgcatacgattacaagtgtcaaaatctccactgtggcctaaggaaaacctggatcccgtggtggtacaggagggtgctccactaacattacagtgcaaccccccacccggtctcccctctcctgttatcttctggatgtcaagtagtatggagcccatcacgcaagataaaagagtaagtcagggccacaatggcgatctgtactttagcaacgtgatgttgcaggatatgcagacagattactcctgtaacgcacggttccatttcacacacaccatccagcagaaaaatcccttcaccttgaaagttttgacaaccaggggagtggcggagcgaaccccaagctttatgtatccacagggaacagcctcctcgcagatggtcttacggggtatggaccttctgctggagtgcatcgcatcaggcgtccccacgcccgatatcgcatggtataagaaaggaggggacctgccgagtgacaaggccaaattcgaaaacttcaacaaggccctgcgaatcacaaatgtctctgaggaggactccggcgaatacttctgtctggcaagcaataaaatgggaagcatccggcacaccataagcgtgcgcgtaaaggccgctccatattggctggatgagcccaaaaatctgattctagcaccaggcgaggacggccgactggtttgtagagccaacggaaaccccaagccaacggtgcagtggatggtgaacggggaacctctccagagcgccccaccaaaccccaaccgcgaagtggctggggacacgataatatttcgtgacactcagatctcctccagggctgtctatcaatgtaacacttctaacgaacatgggtatttgttggccaacgctttcgtgtcggtgttagacgtgccacctaggatgttgagccctagaaaccagttaattagagttattctctataatagaacgaggttggactgtcctttttttggttctcccatacctactcttagatggtttaaaaacggtcagggttctaatctggatgggggaaactaccacgtttacgagaatggatctcttgaaatcaagatgatcaggaaggaggatcagggaatctacacctgcgtcgccactaacatcttaggaaaagcagagaaccaggttcgcttggaggtaaaggatcctactcgaatataccgaatgccagaggaccaggtggccagaaggggaacgacagtgcaactagaatgcagagtcaagcacgacccaagcctgaagcttactgtgtcatggctgaaggacgatgaacctctttacattggaaataggatgaagaaagaggatgattcactgaccatttttggagtggccgagcgagaccaggggagttatacatgcgtcgccagcacagagctagaccaagatctcgcgaaggcttacctgacggtgctggctgaccaggcgacacctaccaataggctggccgctttacccaaaggaagacctgatagacccagagatctcgagctgaccgaccttgcagaacgcagtgttcggctgacttggattcccggtgacgcgaataattctcctattaccgattacgtggtacagtttgaggaagaccagtttcaacccggtgtgtggcatgatcactctaaatatccgggtagtgtgaattccgctgtacttaggctgtcaccctatgtgaactatcagtttcgtgtgattgccatcaatgaagttggaagtagtcacccctccttgccgagtgagcgctacagaacctccggagctcctccggaaagtaaccccggtgatgtaaaaggcgagggtacccgcaaaaataacatggagataacctggaccccaatgaatgcgacgagcgctttcggacccaatcttcggtacattgttaaatggaggcggagggagaccagggaagcatggaacaatgttacagtgtggggcagtcgatatgtggtaggacagacccccgtctacgtcccatacgagatccgggttcaagccgagaatgactttggtaaagggcctgagcccgaaagcgtgattggctactctggcgaggacctgccaagtgctcccaggagatttcgggttaggcagccaaatttggagaccattaacctcgaatgggaccaccccgaacaccctaacggtatcatgatcggctatacactgaaatacgtggcattcaatgggaccaaagttgggaagcagatagtggaaaacttcagccctaaccaaaccaaattcaccgtgcaaagaacagatccagtatctaggtaccgtttcaccttgtctgctaggactcaggtaggatcgggagaggctgtgacagaggagagtcctgccccacccaatgaaggaagcccagtgatgtcgtatacgaacaatcaggccgacattgccacccagggctggttcatcggcctgatgtgcgccatcgcccttctggtgttgattcttctcattgtttgttttattaaaaggtcgagaggtgggaaatacccggtcagagaaaagaaagatgtcccccttgggcctgaagaccccaaggaggaggacgggagctttgactacagcgatgaagacaataagccactgcagggcagccagacatccttggacgggaccattaagcagcaagagagtgatgacagcctcgttgattatggcgaggggggagagggacagttcaatgaggatgggagttttattggccaatataccgtaaagaaagataaggaagaaaccgagggaaacgaaagttccgaggcaacttcacccgtgaatgctatatatagccttgcttag

SEQ ID NO: 297568 - protein, 322 aa, Artificial Sequence
  derived and/or modified sequence
LYQVSTHEQSESAHGRTGPSTGGRQRSRHEQARDSSRHSASQEGQDTIRGHPGSSRGGRQGSHYEQSVDSSGHSGSHHSHTTSQERSDVSRGQSGSRSVSRQTRNEKQSGDGSRHSGSRHHEASSRADSSRHSQVGQGQSSGPRTSRNQGSSVSQDSDSQGHSEDSERRSGSASRNHHGSAQEQSRDGSRHPRSHHEDRAGHGHSAESSRQSGTHHAENSSGGQAASSHEQARSSAGERHGSHHQQSADSSRHSGIGHGQASSAVRDSGHRGSSGSQASDSEGHSEDSDTQSVSAHGQAGPHQQSHQESTRGRSAGRSGRSG

SEQ ID NO: 297569 - protein, 322 aa, Artificial Sequence
  derived and/or modified sequence
LYQVSTHEQPDSAHGRTGTSTGGRQGSHHEQARDSSRHSASQEGQDTIRGHPGSSRGGRQGSHHEQSVNRSGHSGSHHSHTTSQGRSDASHGQSGSRSASRQTRNEEQSGDGTRHSGSRHHEASSQADSSRHSQAGQGQSEGSRTSRRQGSSVSQDSDSEGHSEDSERWSGSASRNHRGSAQEQSRHGSRHPRSHHEDRAGHGHSADSSRQSGTPHAETSSGGQAASSHEQARSSPGERHGSRHQQSADSSRHSGIPRRQASSAVRDSGHWGSSGSQASDSEGHSEESDTQSVSGHGQDGPHQQSHQESARDWSGGRSGRSG

SEQ ID NO: 297570 - DNA, 1058 bp, Artificial Sequence
  derived and/or modified sequence
gatccaccctcaatctaccagaatcatgggctgctgtggctgctccggaggctgtggctccggctgtgggggttgtggctccggctgtgggggctgtggctccggctgtgggggctatggctctggctgtgggggctgtggctccagctgctgtgtgcccgtctgctgctgcaagcccgtgtgctgctgtgtgccagcctgttcctgctccagctgtggctcctgtgggggctccaagggggactgtggctcttgtgggggctccaaagggggctgtggttcctgtgggggctccaaggggggctgtggctcctgtgggggctccaaggggggctgtggttcttgtgggggctccaaggggggctgtggctcctgtgggggctccaaaggtggctgtggttcctgtgggggctccaaggggggctgtggttcttgtggctgctcccagtgcaattgctgtaagccctgctgctgctcctcaggctgtggatcctgctgccagtccagctgctgcaatccctgctgctgccagtccagctgctgtgtccccgtgtgctgccagtctagctgctgcaagccctgctgctgtcagtccagctgctgtgtccccgtgtgctgccagtgtaagatctgaggctctgaacccagaccttcaggtttcacctgtttggtgaaagcatttgttatgatttccctgaattaattcatcccacgcatcctccctgaggcacctgccccttctccagctcatcatccatgcacgcacctccttccatggctcagctctccactgggccctgccttcagcctcctcactccggaaatgcatgtttccttgatgcaggaggtggccttgcctggacgcgggcacccagccaactgccatggtgttccctgcacttgggtgtggaccatcttcttcttctccctcggctgactgagatgcaaggtctgaccccacaaggccaggccaatgttgctcagtgatcactaagaaccagcttctcaaccaccattgggaccctggatcctccagggccgctcgctgcctgttctcc

SEQ ID NO: 297571 - DNA, 360 bp, Artificial Sequence
  derived and/or modified sequence
atgccagctgtcttcatgctggcttcaagttcggctttgcagtgcggacgaggggtccctaggttcccacggactgaggtcggtgcagggcattccgttaatgaggagacaaaggctgagaaagtgggaaatcagacatccgtgattccagctacatcccgtcaggccgctcttggcacttcttggacacagagaaggactcaaccgctccaagagaggtcccactggcatcccaggggtaacaacgcatcaggaatgggaggccacaggatgttccctggcccactgcgtggcccagccgctcaggttttggagaatgagtgtggttccctgggtcgagccgctgagggcagatcgtag

SEQ ID NO: 297572 - DNA, 360 bp, Artificial Sequence
  derived and/or modified sequence
atgcctgccgtgtttatgctcgctagttcttctgctcttcagtgcggccgcggggtcccccgatttcccaggactgaggtcggagcggggcattccgtgaatgaagaaaccaaggccgaaaaagttggaaatcaaacctctgttattccagcaacaagtcgccaagctgcacttggtacatcgtggacccaaagaaggactcagccgctccaagaacggtcccattggcaccccaggggaaataacgcctcgggtatgggtggccataggatgtttcccggccccctcagaggccctgccgcccaggtgcttgaaaatgaatgcggtagcttgggaagagcagctgagggacgatcttag

SEQ ID NO: 297573 - DNA, 360 bp, Artificial Sequence
  derived and/or modified sequence
atgcccgctgtatttatgcttgctagctcttctgcactgcagtgtggaagaggcgtcccccgctttcctagaaccgaggtaggcgccggacatagcgtgaacgaagaaacaaaagccgaaaaagtgggaaaccagacgagcgtgatccctgcaacgtctcgccaggctgccctgggtacatcttggacacagcgtcgcacccaaccccttcaggagcgttctcactggcacccccggggcaacaacgctagtggcatgggaggacaccgaatgtttccaggtccattgagaggcccagccgcccaagtgctcgaaaacgaatgtgggagcttaggaagagccgcagagggaaggtcgtag

SEQ ID NO: 297574 - DNA, 360 bp, Artificial Sequence
  derived and/or modified sequence
atgcccgccgtgttcatgctggccagcagcagcgccctgcagtgcggcagaggcgtgcccagattccccagaaccgaggtgggcgccggccacagcgtgaacgaggagaccaaggccgagaaggtgggcaaccagaccagcgtgatccccgccaccagcagacaggccgccctgggcaccagctggacccagagaagaacccagcccctgcaggagagaagccactggcaccccagaggcaacaacgccagcggcatgggcggccacagaatgttccccggccccctgagaggccccgccgcccaggtgctggagaacgagtgcggcagcctgggcagagccgccgagggcagaagctag

SEQ ID NO: 297575 - DNA, 360 bp, Artificial Sequence
  derived and/or modified sequence
atgcctgccgttttcatgcttgctagctccagcgccctgcaatgcgggcggggtgtaccacgcttccctagaaccgaggttggcgccggtcattcagtgaacgaagaaactaaagccgagaaagtcggaaaccaaacttccgtcattccagccacaagccgccaggccgccctgggtacatcctggacccagcgaaggacccaacccctgcaggagcgcagccactggcacccccgtggtaataacgctagtggtatgggaggtcaccgcatgtttcctggccccctacgagggcccgcagctcaggttctcgagaacgaatgcgggtccctgggacgggctgcagaaggcagatcttag

SEQ ID NO: 297576 - DNA, 360 bp, Artificial Sequence
  derived and/or modified sequence
atgcctgctgtgttcatgctggccagcagcagcgccctgcagtgtggccggggcgtgccccgcttccccaggacagaggtgggcgccggccacagcgtgaatgaggagaccaaggccgagaaggtgggcaaccagaccagcgtcatcccagccaccagccggcaggccgccctgggcacctcctggacccagaggaggacccagcccctgcaggagaggagccactggcacccccggggcaacaatgccagcggcatgggcggccacaggatgtttcctggccccctgcggggccctgctgcccaggtgctggagaatgaatgtggcagcctgggccgggctgctgagggccgctcctag

SEQ ID NO: 297577 - DNA, 360 bp, Artificial Sequence
  derived and/or modified sequence
atgcccgccgtgttcatgctggccagcagcagcgccctgcagtgcgggcgcggggtgccccggtttcccagaactgaagtgggagctggtcattcagtcaacgaagagaccaaggctgaaaaggtggggaaccagacttctgtgatccctgccacatcccggcaggctgccctcggcacatcatggacccagcgccgcacccagccgctacaggagcgcagtcactggcatccccgcggcaataacgcctcaggtatggggggtcatagaatgtttcctggcccattgaggggcccagccgcgcaggtgctggagaacgagtgcggcagtctaggacgggctgctgaggggaggtcatag

SEQ ID NO: 297578 - RNA, 360 nt, Artificial Sequence
  derived and/or modified sequence
augccugccguguuuaugcucgcuaguucuucugcucuucagugcggccgcggggucccccgauuucccaggacugaggucggagcggggcauuccgugaaugaagaaaccaaggccgaaaaaguuggaaaucaaaccucuguuauuccagcaacaagucgccaagcugcacuugguacaucguggacccaaagaaggacucagccgcuccaagaacggucccauuggcaccccaggggaaauaacgccucggguauggguggccauaggauguuucccggcccccucagaggcccugccgcccaggugcuugaaaaugaaugcgguagcuugggaagagcagcugagggacgaucuuag

SEQ ID NO: 297579 - RNA, 360 nt, Artificial Sequence
  derived and/or modified sequence
augcccgcuguauuuaugcuugcuagcucuucugcacugcaguguggaagaggcgucccccgcuuuccuagaaccgagguaggcgccggacauagcgugaacgaagaaacaaaagccgaaaaagugggaaaccagacgagcgugaucccugcaacgucucgccaggcugcccuggguacaucuuggacacagcgucgcacccaaccccuucaggagcguucucacuggcacccccggggcaacaacgcuaguggcaugggaggacaccgaauguuuccagguccauugagaggcccagccgcccaagugcucgaaaacgaaugugggagcuuaggaagagccgcagagggaaggucguag

SEQ ID NO: 297580 - protein, 234 aa, Artificial Sequence
  derived and/or modified sequence
MLPGYRDPYSSRPLTRGEIGCFLSHYSVWKEVIDRELEKTLVIEDDVRFEHQFKKKLMKLMDNIDQAQLDWELIYIGRKRMQVKEPEKAVPNVANLVEADYSYWTLGYVISLEGAQKLVGANPFGKMLPVDEFLPVMYNKHPVAEYKEYYESRDLKAFSAEPLLIYPTHYTGQPGYLSDTETSTIWDNETVATDWDRTHAWKSRKQSRIYSNAKNTEALPPPTSLDTVPSRDEL

SEQ ID NO: 297581 - DNA, 705 bp, Artificial Sequence
  derived and/or modified sequence
atgctgcccggctacagagacccctacagcagcagacccctgaccagaggcgagatcggctgcttcctgagccactacagcgtgtggaaggaggtgatcgacagagagctggagaagaccctggtgatcgaggacgacgtgagattcgagcaccagttcaagaagaagctgatgaagctgatggacaacatcgaccaggcccagctggactgggagctgatctacatcggcagaaagagaatgcaggtgaaggagcccgagaaggccgtgcccaacgtggccaacctggtggaggccgactacagctactggaccctgggctacgtgatcagcctggagggcgcccagaagctggtgggcgccaaccccttcggcaagatgctgcccgtggacgagttcctgcccgtgatgtacaacaagcaccccgtggccgagtacaaggagtactacgagagcagagacctgaaggccttcagcgccgagcccctgctgatctaccccacccactacaccggccagcccggctacctgagcgacaccgagaccagcaccatctgggacaacgagaccgtggccaccgactgggacagaacccacgcctggaagagcagaaagcagagcagaatctacagcaacgccaagaacaccgaggccctgcccccccccaccagcctggacaccgtgcccagcagagacgagctgtag

SEQ ID NO: 297582 - DNA, 705 bp, Artificial Sequence
  derived and/or modified sequence
atgctgccaggctacagggatccatatagctcaaggcctctcacccggggcgagatcggctgctttctgtcccactactctgtgtggaaagaggtgattgatagggagctggaaaagacactcgtaatcgaagatgatgtcaggttcgagcaccagtttaaaaaaaaattaatgaagttgatggacaacatcgaccaggcccagcttgattgggagctgatatatatcggccgtaagcggatgcaggtgaaggagccagagaaggcggtgcccaatgtggctaatttggtggaagcagattattcatattggaccctggggtacgtgatttccctcgagggggcacagaagctagtcggggcaaacccctttggtaagatgctgcccgttgacgagtttctccctgtcatgtacaacaagcacccagtggcagagtataaggaatactacgagagccgtgaccttaaggccttctctgcagagccgttgctgatttatccgacgcactacaccgggcagcccgggtatctaagtgacactgaaacaagcacaatctgggataacgagaccgttgctaccgattgggatcggactcacgcctggaaatctaggaaacaatctcgaatttactccaatgcaaagaataccgaagcactcccaccgcctacctctctcgatacagtcccctctagagacgaactgtag

SEQ ID NO: 297583 - DNA, 4723 bp, Artificial Sequence
  derived and/or modified sequence
ttttctattcttttactttcaacctatttttgtcttttaatctaaaggctgcctcttatagataccacatggttgtattaatttttaaaacttactatgccaaattcttccttcattgcagtgttttattcatttgccttcactacatttttttccagatccttaaggtcagccagaggtgagagactagggacttctcaagtttttcctgggcgtgtggacagccctgaatatgcctggggccttctagattctcagggatattttggagcaaatcaaactccctatggacctcttattccttggtttttccttttaagttttttggtgggcttcttgttagcatcagctgataatgcttctcaaacagctgtaatgttaaacagttgttgctcatgggttttgacaaatgacctgcagatagtgctgttcacagaaaatgaactctgagtcaggtcaaatcaagacaagctctgagaatgtagcttttcaaggagctactagacaggttgaatagagattattttctgggggcaggtctttaagggagtctcagtccattttgtccctgccagtggcttctgggttggtggggtttgccgctctcttagttgtgaggctactggttttcaaggcttttgtagggctggggtgaacaggttaggattagggcagctgtgaacttcacaaagctcactgtgttaacagagattcagcagtaggtcttgatcaaacactccttggattattgcagtactttaactaatttccataggagtgtacttattaaatcttgtcaaaaaactgatgatgcttagaactatgttgggcactatgagggatacacaaaaatatgataccctcttgtcttcccagacctcataatactagtgtgacacattagcctggaggaacttctaaggaataaagggaagcctctctgtctttgtctgtgtgggggaggggtgtttgcagaactaactctctctttctctggcctttgtggtggggacctttgacttgttaatctccagacgtgttttatgtgatgcagggcactcaacacaagccagctgaaggcactgaatattgaaatgctgcctggctatcgagatccctattcctccaggcctctaacaaggggtgaaatcggctgctttctcagccactactcagtctggaaagaggtaattgatcgagagctagagaagactcttgtaattgaagacgatgtgcgttttgagcatcagtttaagaagaagctgatgaagctgatggataacattgaccaggctcagctggactgggaactgatttatattggtaggaagaggatgcaagtaaaggagccagagaaagcagtgcccaatgtggcaaacctggtcgaagccgactattcctactggaccctgggctacgtcatctctctggaaggagcacagaagctggttggagccaatccttttgggaagatgctgccagtggatgagtttctgccagtcatgtacaacaagcatcccgtagccgagtacaaggagtattatgaatccagggacctgaaagccttctctgcagaacccttgctcatctaccctacgcactacacaggccagccggggtacctgagtgacacggagacctccaccatctgggacaatgagacagtggccaccgactgggataggacacatgcctggaagtcccggaagcaaagccgcatctacagcaatgccaagaacacagaggccctgccaccgccaacctccctggacactgtgccttcaagggatgagctatgaaggctccctgggagtgtggcccacatcagttcaacatcctctggtttttctaaagggctattcatctgtttgctccagttttctgttttgttttgttcttagtggtcacagtcatctaaccaaagtgatctagtgtgatagatcgaaattaacatatttttgaccatggaaggaaataaggaaattcaacccaaatttcccaagacggctgaaagacaggttttttggaaactgttaagataaactgtaatccagacacctaattcttcagttcactactcatgtgatactgattcccacattaaggttgaacaacatggctcagagtcttgttcaagagaaagtgatcaccgagctgtcacatcagcaaatatgtagtcaaggcagccaggccaactagaccacacttattggtctagtttgtccgttttatatgacattgaaaacttgtgtgtgcaacttttgggggacaggaatcacttaaaatcatatttatttggctttttatttaaaggattctgtcacaagtcttattgaaaagtagattttttaaaaaaaaaaaatcttagtccctgttatccagtaggggtgggtatttgggtccgactgagacttggcctgtgaccatcatggcagttggagttctcatatagaggtgaccagtttgccatgtggatataatttagtagatatttgacagtttgtgtaggtatttgagggaaaaaactcaatgtttggcttttttattatggccactcgagtcaggatgctctatttataaagataaatgtaatatataaagggtgaggactggctgtgcatcctgccctgtcccgggtttgcgcgctgctacagagcttcacgctctccgctccaccccttagcctgggaacccaccgcaggtgtgagttctgtgagtcactgctaagagacagagcacattttcaggccagcaactatccttgccagagttttttcattatattttgaattatttattttacaaaatgggcgaagatattgtctttaggataaggcagagaaacagatgttgcagacttccacggcacccgggggagtggtgggtgtggacacattggttcggcaatctgattctcctgaatttcccagccaggctcttgtggggaggcctgtggatggggggatttgaactatttggaaacaaatgattctctatctcaggtgagaaacctggtcagaaacaaagggctggtcacctgatttaggccagcaaccagggaagctcttagaatcccaggcggacaccctttctcaaaagatatcccctaagagtcctttctgctttcttcacagattgattttatgtaaaatgcagagttggactacacgatttcttcccactccacaatctgtcatcctagtatagatcatggtggtttccctcaagtttatgttctcatgccctcaatctgtaaatttttgtctccagaaaaaccctcccaggcatcccataccagcaccgttcctcatcactgtccatgcaccatgcagccatatggggggccgtgcacaccccaaaccctgagcttcacacttaaactcatggggagggcccttcagagcagagtccacaggcgggtggtgctacatacacaagcttagtgtacgagtgtaagatacactttaagccagacacctaattcttcagttcactgcccatgtgatactgattgccacattaaggttgaacagcatggctcagagtctagagaaagtgatcaccaagctgtctcatcaccaaataggtagtcaaggcagcctcatctccccaggtgaggggcgggtccccactttaggacaagaggcagcttgccttccaccagacgccagcctcggccttccttcccgactcactgtgggtacccttctacactgaccagcaagctaggccgctggaggaaagggaactcacccaactctaaattgtgccgcttagacttagctgtcagtgtgacttcctttcccacccacccccagaaaaacagaaagagcatctggggagcgagtgaaaattccttaggtgattcctaagatttccttgggtatctggtttttgttttcatatttgagtgtgtgcatgtgtgcatgactttaatgacttttttaatggggtgggaggtggctggggtgctggggttgaaggaagtttgggttgatttttgtggtgttttgtttaatagagaattttttttttcctgttcccctgtcagctggtctgacagatttaagaactctcattcttaaaagactttggacttaaattctagcattttagactaggactgttctactgtgaagaaagttctgtctcctttagcccggtttgtttctccctgctcaggtctagaatcccaagcagtgttcttttctggtgaacactgtgagccgcagatgtgactttttttttaaagtcatctcttcagcaatccagaggttccttgacctcattatttgtcctatctctcccttatagtcctaagccaagacatttgacctttgacatttgacctttgcagtgtcatgtgagggcgtcagtatagaggcctttgcatctgggcctggcacccgctctctgcctctggaggctaaaccctgtctggatttctcttgggatctaacgtgggatcttctggacagacaaccgtgacatcagcagtgctggtgctgctgtgtgtggactgaacacctgcactttgcagaggacacgctgcatgggccccgcttgcggttcattcaggcctgctgcaggagctctgagaacaagaaagagtggacacccgttcccctgcatcatctgtcttgcgtgctatttcagagtggggaagtgataaactatttgccttctggagctctttgtgaaaaattaaaaaaaaacttagctc

SEQ ID NO: 297584 - DNA, 705 bp, Artificial Sequence
  derived and/or modified sequence
atgctgcccggctacagagacccctacagcagccggcccctgaccagaggagaaattggctgcttcctgagccactacagcgtgtggaaggaggtgattgaccgggagctggagaagaccctggtgattgaagatgatgtgcgctttgagcaccagttcaagaagaagctgatgaagctgatggacaacatcgaccaggcccagctggactgggagctgatctacatcggcaggaagaggatgcaggtgaaggagcctgagaaggctgtgcccaacgtggccaacctggtggaggccgactacagctactggaccctgggctacgtgatcagcctggagggcgcccagaagctggtgggcgccaacccctttgggaagatgctgcctgtggatgagttcctgcctgtgatgtacaacaagcaccctgtggccgagtacaaggagtactatgagagccgggacctgaaggccttctctgctgagcccctgctgatctaccccacccactacacaggccagcccggctacctgagtgacacagagaccagcaccatctgggacaatgagaccgtggccacagactgggacaggacccacgcctggaagagcaggaagcagagccgcatctacagcaatgccaagaacacagaggccctgcccccacccaccagcctggacacagtgcccagcagagatgagctgtag

SEQ ID NO: 297585 - DNA, 705 bp, Artificial Sequence
  derived and/or modified sequence
atgctgcccggctaccgggacccctacagcagccggcccctgacccgcggggaaatcgggtgctttctgagtcattattctgtttggaaggaagtgattgaccgggagttagagaagaccctggtcattgaagacgacgtgcggtttgagcaccagtttaagaaaaaacttatgaaattgatggataacatcgaccaggcgcagctcgactgggaactgatatatattggacggaaaagaatgcaggtaaaggagccagaaaaagcagtgcctaatgtggccaatctggtggaagctgactacagctactggacactgggctatgtaatcagtctcgagggagcccagaagctggtgggcgcaaatccctttggcaagatgctgccagtggacgagttcctccccgtgatgtataataagcacccagttgctgagtataaggagtattatgagtctcgggatctgaaggcatttagcgccgaaccgctattaatctaccccacacattacacagggcaacctggctacctgtctgataccgaaactagcaccatctgggataacgaaacggttgcaaccgattgggatcggacacatgcctggaaaagtagaaaacagagccggatctattctaacgctaagaacacggaggcactgcccccgcccacatcactggatacagttccttccagagacgagctgtag

SEQ ID NO: 297586 - DNA, 705 bp, Artificial Sequence
  derived and/or modified sequence
atgctgccagggtatagagacccctatagctcgcgccctctgacccggggtgaaattggatgtttcctctcccattactctgtgtggaaggaagtgatagaccgggaactggagaagacactggttattgaggacgatgttcggtttgagcaccaatttaagaaaaagctgatgaagctgatggacaacatcgatcaggctcagctggactgggaacttatctacattggtcgaaagagaatgcaagttaaagagcccgagaaggccgtgcctaatgtcgccaacttagtggaggctgattactcctactggacactcggctacgtgatatcccttgagggggcacagaagcttgtaggtgcaaaccccttcgggaaaatgctacccgtggacgagtttctgcccgtgatgtacaataaacatccagtcgctgaatacaaggaatattacgagagcagggacttgaaagctttttccgccgagccgttgcttatctaccccacccactacactggccaacccggatacctatcagatactgaaacgtccacaatttgggataacgaaacagtggccaccgattgggatcgcacccatgcctggaagagccgaaagcagagcaggatttatagtaatgccaagaatactgaggctcttcccccacctaccagtctcgacacagtccctagcagggacgagttgtag

SEQ ID NO: 297587 - protein, 390 aa, Artificial Sequence
  derived and/or modified sequence
MGSFKDRGDGLPNTISFSLEEEEELEGGESAEFTCFSEDLVAEQLTYMDAQLFKKVVPHHCLGCIWSRRDKKENKHLAPTIRATISQFNTLTKCVVSTILGGKELKTQQRAKIIEKWINIAHECRLLKNFSSLRAIVSALQSNSIYRLKKTWAAVPRDRMLMFEELSDIFSDHNNHLTSRELLMKEGTSKFANLDSSVKENQKRTQRRLQLQKDMGVMQGTVPYLGTFLTDLTMLDTALQDYIEGGLINFEKRRREFEVIAQIKLLQSACNSYCMTPDQKFIQWFQRQQLLTEEESYALSCEIEAAADASTTSPKPRKSMVKRLSLLFLGSDMITSPTPTKEQPKSTASGSSGESMDSVSVSSCESNHSEAEEGSITPMDTPDEPQKKAL

SEQ ID NO: 297588 - DNA, 1173 bp, Artificial Sequence
  derived and/or modified sequence
atgggtagcttcaaagatcggggcgatggactacccaacaccatctcctttagcttggaggaagaagaagaactggaaggcggagaaagcgccgagttcacctgcttctccgaggatttagtcgccgaacaacttacctatatggacgcgcagctctttaagaaggtggtgccacaccactgtttaggatgcatctggagcaggcgggacaagaaagagaataaacacctggcacccactatccgggctactatttctcagtttaatactttaactaagtgcgttgtgtctaccatcctgggaggaaaagagttgaagactcagcagagagcaaaaatcatcgaaaaatggattaacatcgcacatgagtgccgcctgctgaagaacttctcgagtctcagggccattgtgagtgctctgcagtcgaatagcatatataggcttaaaaagacatgggccgccgtgcccagggatcgcatgctgatgtttgaggagctcagtgacatatttagcgaccacaacaaccacctcacatcaagggaacttctgatgaaggagggaaccagcaaatttgccaatctggactcttccgtgaaggagaatcagaagcgcacacaacggcggctccagttacagaaagatatgggtgtaatgcaaggaactgtgccatacctgggcaccttcctgactgacctaaccatgttagacaccgctttacaggattacattgagggcggcctgataaactttgaaaagaggagaagggagttcgaggtaatcgcccaaatcaaattgctgcagtcagcctgtaactcctactgcatgacacctgatcagaaattcattcaatggtttcagcgacaacagttgttgaccgaggaagagtcctacgctctcagctgcgaaattgaggcagctgctgacgccagcacaacaagccctaagcctagaaaatccatggtcaagaggctgtctctgctattccttggatccgacatgatcacttctcctacacctacgaaggaacaaccaaaatccactgcatcaggcagctctggcgaatccatggactcagtgtctgtgagcagctgcgaatctaatcactctgaagcagaggaaggctcgatcacccctatggacacaccggacgagcctcagaagaaggccctctag

SEQ ID NO: 297589 - DNA, 1173 bp, Artificial Sequence
  derived and/or modified sequence
atgggcagcttcaaggacagaggagatggcctgcccaacaccatctccttcagcctggaggaggaggaggagctggagggcggggagagcgctgagttcacctgcttcagcgaggacctggtggccgagcagctgacctacatggatgcccagctgttcaagaaggtggtgccccaccactgcctgggctgcatctggagccggcgggacaagaaggagaacaagcacctggcccccaccatccgggccaccatcagccagttcaacaccctgaccaagtgtgtggtgtccaccatcctgggcggcaaggagctgaagacccagcagagggccaagatcatcgagaagtggatcaacatcgcccatgaatgtcggctgctgaagaacttcagcagcctgcgggccatcgtgtctgccctgcagagcaacagcatctaccgcctgaagaagacctgggccgctgtgccccgggacaggatgctgatgtttgaggagctgagtgacatcttcagtgaccacaacaaccacctgaccagccgggagctgctgatgaaggagggcaccagcaagtttgccaacctggacagctctgtgaaggagaaccagaagaggacccagaggcggctgcagctgcagaaggacatgggcgtgatgcagggcaccgtgccctacctgggcaccttcctgacagacctgaccatgctggacacagccctgcaggactacattgaaggaggcctcatcaactttgagaagagaagaagagaatttgaagtcatcgcccagatcaagctgctgcagagcgcctgcaacagctactgcatgaccccagaccagaagttcatccagtggttccagaggcagcagctgctgacagaggaggagagctatgccctgagctgtgaaattgaagctgctgctgatgccagcaccaccagccccaagcccaggaagtccatggtgaagaggctgagcctgctcttcctgggcagtgacatgatcaccagccccacccccaccaaggagcagcccaagagcacagccagcggcagcagcggggagagcatggacagcgtgtctgtgagcagctgtgagagcaaccacagcgaggccgaggagggcagcatcacccccatggacaccccagatgagccccagaagaaggccctgtag

SEQ ID NO: 297590 - DNA, 1173 bp, Artificial Sequence
  derived and/or modified sequence
atgggcagcttcaaggaccggggcgacggcctgcccaacaccatcagtttttccctggaggaggaggaagaactggagggaggagagtctgctgagttcacatgtttttctgaagacttggtcgcagagcaactcacatatatggacgcccagctattcaagaaggtggtgccccaccactgcttgggatgtatttggtcacgaagagacaagaaagagaataaacatctggcacccactatccgtgccacgatcagccaattcaacacgctgactaaatgcgtagtgtctactattttgggtggaaaggagctgaaaactcagcagcgtgctaagattatcgagaaatggattaatatcgcccacgagtgccgcttgttgaagaacttcagctccctgagggccatcgtttctgcactgcagagtaacagcatctacagactgaaaaagacgtgggcagcggtgccccgtgatcgcatgctgatgttcgaagagctgtcagacattttctcggatcataacaatcatctgacctcccgcgaactcctgatgaaagaaggcacttcaaagtttgctaatctcgacagctcagtcaaggagaatcagaagcgcacacaacgcagactgcagctccagaaggacatgggtgtaatgcaggggacagtgccctatctcggcaccttcctgacagacctaactatgttggatacagcactccaggactacatcgaaggcggtctgatcaattttgagaaaagaagacgagaattcgaagttattgcccagataaagttgttacagagcgcatgtaactcctactgcatgacacccgaccagaagttcatccagtggtttcagaggcagcagctcctgaccgaggaggaatcttacgccctctcctgcgaaattgaggctgccgctgacgcgagcactacgtcccccaagccacgcaagtccatggtcaagcgcctgtccctactgttcctgggatcggatatgatcacaagccccacccctacaaaagagcagcccaaaagcactgccagcggctcctctggcgaatccatggattccgtcagcgtgtcatcttgtgagagcaaccacagtgaggctgaagaggggtcaataacacccatggacacccctgatgagcctcaaaagaaggcgttgtag

SEQ ID NO: 297591 - DNA, 1173 bp, Artificial Sequence
  derived and/or modified sequence
atgggttccttcaaggacagaggagacggcctgccaaacaccatctcctttagcttggaagaagaggaagagctcgaagggggagaatcagcggagttcacatgtttctccgaggatctggttgccgagcaactgacgtatatggacgcccagctcttcaagaaagtggtgcctcaccattgtctcggttgtatatggagtagacgggataaaaaggaaaacaagcacttggctcccacgatcagggccacaatctctcaattcaataccctgacaaagtgcgtcgtatccaccatcttgggcggaaaggaactgaagactcagcaaagggccaaaattattgagaagtggatcaatatcgcccatgagtgccgcctcttgaagaacttcagttcattgagggctatagtgagcgctctccagtccaactccatttacaggctaaaaaagacatgggcagccgtccctagagacaggatgctcatgtttgaggagttgtcagatattttttctgatcacaataaccacctcaccagtcgggaactgcttatgaaggagggaactagtaaatttgcgaacctggacagcagtgtgaaggaaaaccagaagcggactcagcgcaggcttcaactccagaaagatatgggcgtgatgcaggggacggtaccttacctggggaccttccttactgatctcaccatgctggataccgcactgcaggactacattgagggcggactgataaacttcgagaagcggcgacgagagttcgaggtaatcgcccaaatcaagctgctccagagcgcgtgcaattcttattgtatgaccccagaccaaaaatttatccagtggttccagcgccagcagctgctgaccgaagaggaatcgtacgcactatcctgcgagatcgaggcggcagcagacgcttccactacttctcctaagccaagaaagtctatggtcaagagattgtccttgctgttcttgggcagcgatatgataacttcaccaacccctaccaaagagcagcctaagagcaccgcttcaggcagctcgggtgaatccatggatagcgtcagtgtttccagctgcgaaagcaaccactcagaggctgaggaaggatccatcacgccaatggacacccccgacgagccacagaagaaggcactgtag

SEQ ID NO: 297592 - DNA, 1721 bp, Artificial Sequence
  derived and/or modified sequence
taggagtatgaggcagagtgatgcacacccgggcgcccagcatcgttctaattgccggagacattgcctcagactgtgcgctgctagaggctgcgttcctgagcaggaagcccgtttcctgggattggaactacccttcttggccagcgggaagtccccaaggacggagtcgaaaggtcaaatcttatctgtcagtgctgtgtgacagcatcgcaacgggatctgcagaacctgaactcgatccgtaatgcctcctgcctgcctctttcaagatggaggtgaaacctgtgggagaacctactcaagaggtgtctaaattcaaactttccaccaaggtagaaagcacgggacactggctggtggaagatcatgttcgaatatgggaagttttaaagacagaggagatgggcttcccaacacgatctccttcagcctggaagaggaagaggaactggagggtggagagtcagcagaattcacgtgcttctcagaagatctcgtggcagagcagctgacctacatggatgcacaactcttcaagaaagtagtgcctcaccactgcctgggctgcatttggtctcgaagggataagaaggaaaacaaacatttggctcctacgatccgtgccaccatctctcagtttaataccctcaccaaatgtgttgtcagcaccatcctggggggcaaagaactcaaaactcagcagagagccaaaatcattgagaagtggatcaacatcgctcatgaatgtagactcctgaagaatttttcctccttgagggccatcgtttcggcactgcagtctaattccatctatcggttaaaaaagacttgggctgccgtcccaagggaccgaatgctgatgtttgaagaactttcagatatcttctcagaccataataaccatttgaccagccgagaactactgatgaaggaaggaacctcaaaatttgcaaacctggacagcagtgtgaaagaaaaccagaagcgtacccagaggcggctgcagctccagaaggacatgggtgtgatgcagggaactgtgccctacctgggcaccttcctgactgacctgaccatgcttgacactgcccttcaggactacatcgagggtggactgataaactttgagaaaaggagaagggaatttgaagtgattgcccagataaagctcttacagtctgcctgcaacagctattgcatgaccccagaccaaaagttcatccagtggttccagaggcagcagctcctgacagaggaggagagctatgccctgtcatgtgagattgaagcagctgctgacgccagcaccacctcgcccaagcctcggaagagcatggtgaagagactcagcctactgtttctagggtctgacatgatcaccagtcccactcccaccaaagagcagcccaagtccactgccagcgggagctctggtgaaagcatggactctgtcagcgtgtcatcctgcgagtcgaaccactcagaggctgaggagggctccattactcccatggacacccctgatgagcctcaaaaaaaagctctctgagtcctcctcatcctgttcttctatccattccatggacacaaattcctcagggatgtcttccttaatcaaccccctctcctcccctccgtcctgcaacaacaaccccaaaatccacaagcgctctgtctcggtgacgtccattacctcgactgtgctgcctcctgtttac

SEQ ID NO: 297593 - DNA, 1173 bp, Artificial Sequence
  derived and/or modified sequence
atgggcagcttcaaggacagaggcgacggcctgcccaacaccatcagcttcagcctggaggaggaggaggagctggagggcggcgagagcgccgagttcacctgcttcagcgaggacctggtggccgagcagctgacctacatggacgcccagctgttcaagaaggtggtgccccaccactgcctgggctgcatctggagcagaagagacaagaaggagaacaagcacctggcccccaccatcagagccaccatcagccagttcaacaccctgaccaagtgcgtggtgagcaccatcctgggcggcaaggagctgaagacccagcagagagccaagatcatcgagaagtggatcaacatcgcccacgagtgcagactgctgaagaacttcagcagcctgagagccatcgtgagcgccctgcagagcaacagcatctacagactgaagaagacctgggccgccgtgcccagagacagaatgctgatgttcgaggagctgagcgacatcttcagcgaccacaacaaccacctgaccagcagagagctgctgatgaaggagggcaccagcaagttcgccaacctggacagcagcgtgaaggagaaccagaagagaacccagagaagactgcagctgcagaaggacatgggcgtgatgcagggcaccgtgccctacctgggcaccttcctgaccgacctgaccatgctggacaccgccctgcaggactacatcgagggcggcctgatcaacttcgagaagagaagaagagagttcgaggtgatcgcccagatcaagctgctgcagagcgcctgcaacagctactgcatgacccccgaccagaagttcatccagtggttccagagacagcagctgctgaccgaggaggagagctacgccctgagctgcgagatcgaggccgccgccgacgccagcaccaccagccccaagcccagaaagagcatggtgaagagactgagcctgctgttcctgggcagcgacatgatcaccagccccacccccaccaaggagcagcccaagagcaccgccagcggcagcagcggcgagagcatggacagcgtgagcgtgagcagctgcgagagcaaccacagcgaggccgaggagggcagcatcacccccatggacacccccgacgagccccagaagaaggccctgtag

SEQ ID NO: 297594 - protein, 512 aa, Artificial Sequence
  derived and/or modified sequence
MPASTRSQKRQGMDSLLEPLKMNMDHAEEGRASIYKSVFSNSSKEMMCFPDFPFPDDFPNFMHNSKIQEYIIAFAKEKNLLKYIQFKTFVSSVNKHPDFATTGQWDVTTERDGKKESAVFDAVMVCSGHHVYPNLPKESFPGLNHFKGKCFHSRDYKEPGVFNGKRVLVVGLGNSGCDIATELSRTAEQVMISSRSGSWVMSRVWDNGYPWDMLLVTRFGTFLKNNLPTAISDWLYVKQMNARFKHENYGLMPLNGVLRKEPVFNDELPASILCGIVSVKPNVKEFTETSAIFEDGTIFEGIDCVIFATGYSFAYPFLDESIIKSRNNEIILFKGVFPPLLEKSTIAVIGFVQSLGAAIPTVDLQSRWAAQVIKGTCTLPSMEDMMNDINEKMEKKRKWFGKSETIQTDYIVYMDELSSFIGAKPNIPWLFLTDPKLAMEVYFGPCSPYQFRLVGPGQWPGARNAILTQWDRSLKPMQTRVVGRLQKPCFFFHWLKLFAIPILLIAVFLVLT

SEQ ID NO: 297595 - DNA, 1822 bp, Artificial Sequence
  derived and/or modified sequence
ctttcaaactgcccagacggttggacaggacgtagacacacagaagaaaagaagacaaagaacgggttaccatggggaagaaagtggccatcattggagctggtgtgagtggcttggcctccatcaggagctgtctggaagaggggctggagcccacctgctttgagaagagcaatgacattgggggcctgtggaaattttcaaggagccatgagtgaaggcgtacaagaggggtcttgccactgaaaaaaataagaaatgccagcatccaccagaagccagaagcggcaaggaatggattctctcctggagcctctgaaaatgaacatggaccatgcagaggagggcagggctagcatttacaaatcagtcttttccaactcttccaaagagatgatgtgtttcccagacttcccatttcccgatgacttccccaactttatgcacaacagcaagatccaggaatatatcattgcatttgccaaagaaaagaacctcctgaagtacatacaatttaagacatttgtatccagtgtaaataaacatcctgattttgcaactactggccagtgggatgttaccactgaaagggatggtaaaaaagaatcggctgtctttgatgctgtaatggtttgttccggacatcatgtgtatcccaacctaccaaaagagtcctttccaggactaaaccactttaaaggcaaatgcttccacagcagggactataaagaaccaggtgtattcaatggaaagcgtgtcctggtggttggcctggggaattcgggctgtgatattgccacagaactcagccgcacagcagaacaggtcatgatcagttccagaagtggctcctgggtgatgagccgggtctgggacaatggttatccttgggacatgctgctcgtcactcgatttggaaccttcctcaagaacaatttaccgacagccatctctgactggttgtacgtgaagcagatgaatgcaagattcaagcatgaaaactatggcttgatgcctttaaatggagtcctgaggaaagagcctgtatttaacgatgagctcccagcaagcattctgtgtggcattgtgtccgtaaagcctaacgtgaaggaattcacagagacctcggccatttttgaggatgggaccatatttgagggcattgactgtgtaatctttgcaacagggtatagttttgcctaccccttccttgatgagtctatcatcaaaagcagaaacaatgagatcattttatttaaaggagtatttcctcctctacttgagaagtcaaccatagcagtgattggctttgtccagtcccttggggctgccattcccacagttgacctccagtcccgctgggcagcacaagtaataaagggaacttgtactttgccttctatggaagacatgatgaatgatattaatgagaaaatggagaaaaagcgcaaatggtttggcaaaagcgagaccatacagacagattacattgtttatatggatgaactctcctccttcattggggcaaagcccaacatcccatggctgtttctcacagatcccaaattggccatggaagtttattttggcccttgtagtccctaccagtttaggctggtgggcccagggcagtggccaggagccagaaatgccatactgacccagtgggaccggtcgttgaaacccatgcagacacgagtggtcgggagacttcagaagccttgcttctttttccattggctgaagctctttgcaattcctattctgttaatcgctgttttccttgtgttgacctaatcatcattttctctaggatttctga

SEQ ID NO: 297596 - DNA, 1539 bp, Artificial Sequence
  derived and/or modified sequence
atgccagcctccactaggtcccagaagaggcagggcatggactctctgctcgagcctctgaaaatgaacatggatcacgccgaggagggacgagcaagcatctataagagcgtatttagtaacagcagtaaagagatgatgtgtttcccagactttccctttcccgacgattttcctaactttatgcataacagtaaaattcaggagtatatcatagcctttgcgaaagaaaagaatctgctgaagtatattcagtttaaaacctttgtgtcatcggtgaataagcaccctgattttgccactaccggccaatgggatgtgacgaccgagcgggatggaaagaaagagagtgccgtcttcgatgccgttatggtgtgctctggacaccatgtgtatccgaatctccctaaggaatctttccctggactgaaccattttaagggcaagtgctttcacagccgagattacaaggagcccggggttttcaatggtaaaagagtcttagtggttgggttgggaaattccgggtgtgatatagccacagagctctcgcggacagcagaacaggttatgatcagctcacggtccggatcttgggtaatgtccagggtttgggacaacggatacccctgggatatgctgctggtgacacgctttggtacctttcttaagaacaacctacccaccgcaatcagtgactggctctacgtcaagcagatgaacgcaagattcaaacacgaaaactatgggctgatgccactgaacggcgttttgaggaaggagcctgtcttcaatgatgagctgcctgcctccatattatgcggtatcgttagtgtgaagcccaacgttaaagaattcacagaaacctctgccatttttgaggatggaacgatcttcgagggaattgactgcgtgatctttgccacggggtacagcttcgcctacccttttcttgatgaatcaattattaagtcccggaataatgagatcatcttgttcaaaggtgtgttcccccccctattagaaaagtcgactattgccgtgatagggttcgtgcagtccctgggcgcagcaatccccaccgtggacctgcagtcaagatgggccgcccaggtgatcaagggtacatgtacactcccctcaatggaagatatgatgaatgatattaacgaaaagatggaaaaaaaaaggaagtggtttgggaagtctgaaactatccagaccgattacatcgtgtacatggacgaattgtcatcgttcattggcgctaagcctaatatcccctggttgttcctgactgatcccaagctggccatggaggtttactttggcccttgcagcccctaccagttccgactggttggaccaggccagtggccgggagcccgaaacgctattctaacccagtgggaccggtctcttaagccaatgcagacgagagtggtgggaaggctacagaaaccttgttttttttttcattggctcaagctttttgcaatacctatcctattaatcgccgtcttccttgttctgacttag

SEQ ID NO: 297597 - DNA, 1539 bp, Artificial Sequence
  derived and/or modified sequence
atgcctgccagcaccaggagccagaagaggcagggcatggacagcctgctggagcccctgaagatgaacatggaccatgctgaggagggccgggccagcatctacaagtctgtgttcagcaacagcagcaaggagatgatgtgcttcccagacttccccttcccagatgacttccccaacttcatgcacaacagcaagatccaggagtacatcatcgcctttgccaaggagaagaacctgctgaagtacatccagttcaagacctttgtgtcctctgtgaacaagcacccagactttgccaccaccggccagtgggatgtgaccacagaaagagatggcaagaaggagagcgctgtgtttgatgctgtgatggtgtgcagcggccaccacgtgtaccccaacctgcccaaggagagcttccctggcctgaaccacttcaagggcaagtgcttccacagccgggactacaaggagcccggggtcttcaacgggaagagggtgctggtggtgggcctgggcaacagcggctgtgacatcgccacagagctgagcaggacagctgagcaggtgatgatcagcagccgcagcggctcctgggtgatgagccgggtgtgggacaatggctacccctgggacatgctgctggtgaccaggtttggcaccttcctgaagaacaacctgcccacagccatcagtgactggctgtatgtgaagcagatgaatgcccgcttcaagcatgaaaattatggcctgatgcccctgaatggagtgctgaggaaggagcccgtcttcaatgatgagctgcctgccagcatcctgtgtggcatcgtgtctgtgaagcccaacgtgaaggagttcacagagaccagcgccatctttgaagatggcaccatctttgagggcatcgactgtgtgatctttgccaccggctacagctttgcctaccccttcctggatgagagcatcatcaagagcaggaacaatgagatcatcctcttcaagggcgtcttcccccccctgctggagaagagcaccatcgctgtgattggatttgtgcagagcctgggcgccgccatccccaccgtggacctgcagagccgctgggccgcccaggtgatcaagggcacctgcaccctgcccagcatggaggacatgatgaatgacatcaatgagaagatggagaagaagaggaagtggtttgggaagtctgagaccatccagacagactacatcgtgtacatggatgagctgagcagcttcatcggggccaagcccaacatcccctggctgttcctgacagaccccaagctggccatggaggtgtacttcggcccctgcagcccctaccagttccggctggtgggccctggccagtggccaggggccagaaatgccatcctgacccagtgggacaggagcctgaagcccatgcagaccagggtggtgggccgcctgcagaagccctgcttcttcttccactggctgaagctgtttgccatccccatcctgctgattgctgtgttcctggtgctgacctag

SEQ ID NO: 297598 - DNA, 1539 bp, Artificial Sequence
  derived and/or modified sequence
atgcccgccagcacccggagccagaagcggcagggcatggacagcctgttagagcctctgaagatgaatatggaccacgccgaagaaggaagagccagcatctataagtccgtcttctccaactctagtaaagagatgatgtgtttccccgatttccctttcccagatgattttcccaatttcatgcataattcaaagattcaggagtatattattgcgttcgctaaagaaaagaaccttctgaagtatattcagttcaaaacctttgtctcctccgtgaataaacatcctgacttcgctaccaccgggcagtgggacgttacaacagaaagggacggtaaaaaagaaagcgccgtatttgatgccgttatggtctgttcagggcaccacgtttaccccaacctgcccaaggagagcttcccaggcctgaatcacttcaaagggaagtgcttccactcccgagactacaaagaacccggagtttttaatgggaagagagtcctggtggttgggcttggtaactctggctgtgacattgcaacagagctctcccgcaccgccgagcaagttatgattagttcacggagtggcagctgggtgatgtcccgcgtgtgggacaacggttacccatgggacatgctgttggttacgaggttcggaacctttctcaagaacaatctgcctactgctatctctgattggctttacgttaagcagatgaatgcacgctttaagcatgaaaactacggactcatgccactgaatggcgtcctcagaaaagagccagtattcaatgatgaactgcctgcctccatcctctgcggcatcgtctctgtcaaaccaaacgtaaaggagtttactgagactagcgcaatctttgaggacggcactatttttgagggtatcgactgtgtgatatttgccaccggttattccttcgcatacccgttcctggatgagtcaattattaagagtaggaacaatgagataatcctctttaagggtgtattccccccgctgctggagaagagtaccatagctgtgatcggctttgtccagagtcttggtgccgctatcccaacagtcgacctccagagccgctgggccgcacaggtaatcaaggggacttgcacactaccatccatggaggacatgatgaacgacattaacgaaaagatggaaaagaaaaggaagtggttcggtaagtccgaaacaatccaaacagattatatcgtttatatggacgagctgtcaagctttatcggcgcaaaacctaacattccatggctgtttctcacagacccgaagctggcaatggaggtgtacttcgggccgtgctccccctaccagttccgattggtcggccctggacagtggcctggggctaggaatgccatacttactcagtgggatcgatcactgaaaccaatgcagaccagggtggtgggcagacttcagaagccttgcttctttttccactggcttaagctctttgccatccccatccttttgatcgccgtgttcttggtactcacttag

SEQ ID NO: 297599 - DNA, 1539 bp, Artificial Sequence
  derived and/or modified sequence
atgccggcttccacccgctcacagaaacgacaggggatggactccctgctggagcctctaaagatgaacatggatcacgcagaggaaggccgagcctccatatataagagtgtgttttcaaatagtagtaaggagatgatgtgttttccggactttccatttcctgacgacttcccaaattttatgcataacagcaagatccaggaatatatcattgcttttgccaaagagaagaatctgttgaagtatatccagtttaagactttcgtttcctcagtgaacaaacatccagacttcgccactactggtcagtgggacgtcacaaccgagcgcgacggaaagaaggagtcagctgtgttcgacgcagtcatggtgtgctcaggccatcacgtgtacccaaatctcccgaaagagagctttccaggtctaaaccacttcaaggggaaatgcttccattccagagactataaggagcctggcgtcttcaacgggaagagagtgttagtggtagggctgggaaattccgggtgcgatattgcgacggagctctcgcgaacagctgagcaggttatgatcagtagtcggtcgggatcttgggtcatgagtcgcgtgtgggataacggctatccatgggatatgttgctggtcacccggttcggtacttttctgaaaaataatctgcctactgctatctctgactggctgtacgtgaagcagatgaacgccaggtttaagcacgagaactacggcttgatgcccctgaacggcgtgctgaggaaggagccggttttcaacgatgaactccctgcctccattctgtgcggtatcgtgtctgtgaaaccgaacgtcaaggaattcaccgaaacatccgcaatcttcgaggacgggaccatttttgaaggcatcgactgcgtcatttttgctacaggctactcatttgcctatcccttcttggacgaatccattatcaaatctcgtaataacgagattatcctctttaagggcgttttccccccattacttgagaaatccactattgcagtgattggatttgtacagagtctgggtgccgcaataccaaccgtcgacttacagtctcgttgggcagcacaggtgataaaggggacttgcacccttccaagcatggaagacatgatgaatgacattaacgaaaaaatggagaagaagagaaaatggttcggcaagtcagaaaccatccagacggattacatcgtgtatatggatgagttaagctcctttatcggggctaagccgaacatcccttggctattcctcaccgaccccaagctcgccatggaagtgtacttcgggccttgtagcccgtaccagtttaggttggtgggacccggacagtggcccggtgccagaaatgccatcttgacgcagtgggatcggtcattgaaacctatgcagacccgcgtggtcggcagactccagaaaccctgcttttttttccactggctgaagctttttgccatccccattctgctgatagctgtgttcctggtgcttacctag

SEQ ID NO: 297600 - DNA, 1539 bp, Artificial Sequence
  derived and/or modified sequence
atgcccgccagcaccagaagccagaagagacagggcatggacagcctgctggagcccctgaagatgaacatggaccacgccgaggagggcagagccagcatctacaagagcgtgttcagcaacagcagcaaggagatgatgtgcttccccgacttccccttccccgacgacttccccaacttcatgcacaacagcaagatccaggagtacatcatcgccttcgccaaggagaagaacctgctgaagtacatccagttcaagaccttcgtgagcagcgtgaacaagcaccccgacttcgccaccaccggccagtgggacgtgaccaccgagagagacggcaagaaggagagcgccgtgttcgacgccgtgatggtgtgcagcggccaccacgtgtaccccaacctgcccaaggagagcttccccggcctgaaccacttcaagggcaagtgcttccacagcagagactacaaggagcccggcgtgttcaacggcaagagagtgctggtggtgggcctgggcaacagcggctgcgacatcgccaccgagctgagcagaaccgccgagcaggtgatgatcagcagcagaagcggcagctgggtgatgagcagagtgtgggacaacggctacccctgggacatgctgctggtgaccagattcggcaccttcctgaagaacaacctgcccaccgccatcagcgactggctgtacgtgaagcagatgaacgccagattcaagcacgagaactacggcctgatgcccctgaacggcgtgctgagaaaggagcccgtgttcaacgacgagctgcccgccagcatcctgtgcggcatcgtgagcgtgaagcccaacgtgaaggagttcaccgagaccagcgccatcttcgaggacggcaccatcttcgagggcatcgactgcgtgatcttcgccaccggctacagcttcgcctaccccttcctggacgagagcatcatcaagagcagaaacaacgagatcatcctgttcaagggcgtgttcccccccctgctggagaagagcaccatcgccgtgatcggcttcgtgcagagcctgggcgccgccatccccaccgtggacctgcagagcagatgggccgcccaggtgatcaagggcacctgcaccctgcccagcatggaggacatgatgaacgacatcaacgagaagatggagaagaagagaaagtggttcggcaagagcgagaccatccagaccgactacatcgtgtacatggacgagctgagcagcttcatcggcgccaagcccaacatcccctggctgttcctgaccgaccccaagctggccatggaggtgtacttcggcccctgcagcccctaccagttcagactggtgggccccggccagtggcccggcgccagaaacgccatcctgacccagtgggacagaagcctgaagcccatgcagaccagagtggtgggcagactgcagaagccctgcttcttcttccactggctgaagctgttcgccatccccatcctgctgatcgccgtgttcctggtgctgacctag

SEQ ID NO: 297601 - protein, 252 aa, Artificial Sequence
  derived and/or modified sequence
MEDYCDSPHGETTSVEDSTQDVTAEHHTSDDECEPIEAIAKFDYVGRTARELSFKKGASLLLYQRASDDWWEGRHNGIDGLIPHQYIVVQDTEDGVVERSSPKSEIEVISEPPEEKVTARAGASCPSGGHVADIYLANINNNLHLDNTKPVTTKQRKRPESGSIRKTFRSDSHGLSSSLTDSSSPGVGASCRPSSQPIMSQSLPKEGPDKCSISGHGSLNSISRHSSLKNRLDSPQIRKTATAGRSKSFNNH

SEQ ID NO: 297602 - protein, 230 aa, Artificial Sequence
  derived and/or modified sequence
  misc_feature (1)..(1): Xaa can be any naturally occurring amino acid
XAEHHTSDDECEPIEAIAKFDYVGRTARELSFKKGASLLLYQRASDDWWEGRHNGIDGLIPHQYIVVQDTEDGVVERSSPKSEIEVISEPPEEKVTARAGASCPSGGHVADIYLANINNNLHLDNTKPVTTKQRKRPESGSIRKTFRSDSHGLSSSLTDSSSPGVGASCRPSSQPIMSQSLPKEGPDKCSISGHGSLNSISRHSSLKNRLDSPQIRKTATAGRSKSFNNH

SEQ ID NO: 297603 - DNA, 2419 bp, Artificial Sequence
  derived and/or modified sequence
gagtaaagaagtcggccagcagctccaagatgatttgatgaaggtcctgaacgagctctactcggtgatgaagacatatcacatgtacaatgccgacagcatcagtgctcagagcaaactaaaggaggcggagaagcaggaggagaagcaaattggtaaatcggtaaagcaggaggaccggcagaccccacgctcccctgactccacggccaacgttcgcattgaggagaaacatgtccggaggagctcagtgaagaagattgagaagatgaaggagaagcgtcaagccaagtacacggagaataagctgaaggccatcaaagcccggaatgagtacttgctggctttggaggcaaccaatgcatctgtcttcaagtactacatccatgacctatctgaccttattgatcagtgttgtgacttaggctaccatgcaagtctgaaccgggctctacgcaccttcctctctgctgagttaaacctggaacagtcgaagcatgagggtctggatgccatcgagaatgcagtagaaaacctggatgccaccagtgacaagcagcgcctcatggagatgtacaacaacgtcttctgcccccctatgaagtttgagtttcagccccacatgggggatatggcttcccagctctgtgcccagcagcctgtccagagtgagctggtacagagatgccaacaactgcagtctcgcttatccactctaaagattgaaaacgaagaggtaaagaagacaatggaggccaccctgcaaaccatccaggacattgtgactgtcgaggactttgatgtgtctgactgcttccagtacagcaactccatggagtccgtcaagtccacggtctctgaaaccttcatgagcaagcccagcattgctaagaggagagccaaccagcaagagacagagcagttttatttcacaaaaatgaaagagtacctggagggcaggaacctcatcaccaagttacaagccaagcatgaccttctgcagaaaaccctgggagaaagtcagcggacagattgcagtctagccaggcgcagctcaactgtgaggaaacaggactccagccaggcaattcctctggtggtggaaagctgtatccggtttatcagcagacacggactacagcatgaaggaattttccgggtgtcaggatcccaggtggaagtgaatgacatcaaaaatgcctttgagagaggagaggaccccctggctggggaccagaacgaccatgacatggattccatagctggtgtcctgaagctttacttccgggggctggaacaccctctcttccccaaggacatctttcatgacctgatggcctgcgtcacaatggacaacctgcaggagagagctctgcacatccggaaagtcctcctagtcctgcccaaaaccactctgattatcatgagatacctctttgccttcctcaatcatttatcacagttcagtgaagagaacatgatggacccctacaacctcgccatctgcttcgggccctcgctaatgtcagtgccagagggccacgaccaggtgtcctgccaagcccacgtgaatgagctgatcaaaaccatcatcatccagcatgagaacatcttcccaagccccagggagctggagggccctgtctacagcagaggaggaagcatggaggattactgtgatagccctcatggagagactacctcggttgaagactcaacccaggatgtgaccgcagagcaccacacgagcgatgacgaatgtgagcccatcgaggccattgccaagtttgactacgtgggccggacagcccgagagctgtcctttaagaagggagcatccctgctgctttaccagcgggcttccgacgactggtgggaaggccggcacaatggcatcgacggactcatcccccatcagtacatcgtggtccaagacaccgaggacggtgtcgtggagaggtccagccccaagtctgagattgaggtcatttctgagccacctgaagaaaaggtgacagccagagcgggggccagctgtcccagtgggggtcatgtagccgatatttatcttgcaaacatcaacaacaacttacatcttgacaacacaaagcccgtgaccaccaagcaaaggaagcgtccagaatctgggagcatccggaaaacttttcggagtgacagccatgggctgagcagttccctgactgactcctcctccccaggggtgggggctagctgccgcccatcctcccagcccatcatgagccagagcctccccaaagaagggccagataagtgttccatcagtgggcacgggagcctcaactccatcagccgccactcatccctgaagaatcggctggatagtccacagatccggaagactgccacagcgggaaggtcaaaaagcttcaataaccat

SEQ ID NO: 297604 - DNA, 759 bp, Artificial Sequence
  derived and/or modified sequence
atggaagactattgcgattcgcctcacggtgaaactacttctgtcgaggattcaactcaagatgtaaccgctgaacaccatacaagcgacgacgagtgtgaaccaattgaggcaatcgcaaaatttgactatgttggtaggaccgccagagaactctcctttaagaagggcgcctctcttctgctgtaccagagggcctcggacgactggtgggaaggacgccataatggcatcgacggcttgattcctcaccaatatattgtagtccaggacaccgaggatggcgtcgtagagaggtcctccccaaagtctgaaattgaggtgatcagtgagccacccgaagagaaagttactgcccgggccggagcttcttgtccatcaggcgggcatgttgcggatatctacttggccaacattaacaacaatcttcacttagataatacaaaacccgtgactacaaaacaacggaagagacctgaaagtggtagcatcagaaaaaccttccggtctgattctcacggtctcagctcttccctcaccgatagctcctcccctggggtaggcgcgagctgtcgtcctagttcacagcccattatgtctcagagcttgcctaaagaaggtccagataagtgctccatcagtggacacgggagtctgaacagcattagtcggcacagcagtctgaagaatcgtctggactcgcctcagattcgtaagactgctacagccggcaggtctaagtcattcaacaatcactag

SEQ ID NO: 297605 - DNA, 693 bp, Artificial Sequence
  derived and/or modified sequence
tgagcagaacatcacacatccgatgacgagtgtgaacccatcgaggctatagccaagtttgactatgtcggacggacggcccgggaactgtcattcaaaaaaggcgcctcattgctactttatcagcgtgccagcgacgactggtgggagggtcgtcataacgggatcgatggtttgattccccatcagtacattgtggttcaggatactgaggacggagtggtggagagaagctcaccaaaatcagagattgaggtcatctctgaaccaccagaagagaaagtgactgcaagagcaggcgcaagttgtccatccggaggtcatgtggctgatatctacttggcaaatatcaacaacaacctgcacctggataacacgaagcccgtaacgacaaagcagcggaaaaggcccgagagcggatcaattagaaaaacatttaggagcgattcacatggcctgtctagttctctaacagactcctcctcccccggcgtcggggcttcttgtcgaccatcctcgcagcctattatgtcacaatctttacctaaagaggggcctgataagtgttccatctctgggcacggcagcctgaactcgatcagcaggcattcctcacttaaaaatagactggattctcctcaaataaggaaaacggcgaccgcaggacgatccaaatctttcaataaccactag

SEQ ID NO: 297606 - DNA, 759 bp, Artificial Sequence
  derived and/or modified sequence
atggaggactactgtgacagcccccatggagagaccacctctgtggaggacagcacccaggatgtgacagctgagcaccacaccagtgatgatgaatgtgagcccatcgaggccatcgccaagtttgattatgtgggccgcacagcccgggagctgtccttcaagaagggggccagcctgctgctgtaccagagggccagtgatgactggtgggagggccgccacaacggcattgatggcctcatcccccaccagtacatcgtggtgcaggacacagaagatggagtggtggagaggagcagccccaagtcagaaattgaggtgatcagcgagcccccagaggagaaggtgacagcccgggccggggccagctgccccagcggcggccacgtggccgacatctacctggccaacatcaacaacaacctgcacctggacaacaccaagcctgtgaccaccaagcagaggaagaggcctgagagcggcagcatcaggaagaccttcagaagtgacagccacggcctgagcagcagcctgacagacagcagcagccctggggtgggcgccagctgccggcccagcagccagcccatcatgagccagagcctgcccaaggagggccctgacaagtgcagcatcagcggccacggcagcctgaacagcatcagccgccacagcagcctgaagaaccggctggacagcccccagatcaggaagacagccacagctggccgcagcaagagcttcaacaaccactag

SEQ ID NO: 297607 - DNA, 693 bp, Artificial Sequence
  derived and/or modified sequence
tgagctgagcaccacaccagtgatgatgaatgtgagcccatcgaggccatcgccaagtttgattatgtgggccgcacagcccgggagctgtccttcaagaagggggccagcctgctgctgtaccagagggccagtgatgactggtgggagggccgccacaacggcattgatggcctcatcccccaccagtacatcgtggtgcaggacacagaagatggagtggtggagaggagcagccccaagtcagaaattgaggtgatcagcgagcccccagaggagaaggtgacagcccgggccggggccagctgccccagcggcggccacgtggccgacatctacctggccaacatcaacaacaacctgcacctggacaacaccaagcctgtgaccaccaagcagaggaagaggcctgagagcggcagcatcaggaagaccttcagaagtgacagccacggcctgagcagcagcctgacagacagcagcagccctggggtgggcgccagctgccggcccagcagccagcccatcatgagccagagcctgcccaaggagggccctgacaagtgcagcatcagcggccacggcagcctgaacagcatcagccgccacagcagcctgaagaaccggctggacagcccccagatcaggaagacagccacagctggccgcagcaagagcttcaacaaccactag

SEQ ID NO: 297608 - DNA, 759 bp, Artificial Sequence
  derived and/or modified sequence
atggaggactactgcgacagcccccacggcgagaccaccagcgtggaggactctacccaggatgtgaccgccgagcatcacacctctgatgacgagtgtgaacctattgaggccattgcaaagtttgactacgttgggagaacagccagggaattgagcttcaagaaaggggcgagtttgctcctctatcagagagcctccgatgattggtgggaaggcagacataatggtatcgacggtctcatcccacaccagtacatcgttgtgcaggataccgaggacggagtggtggagaggagctccccgaaatccgaaatcgaggttatctcggagccacccgaggagaaagtcacagcaagggccggagcttcatgcccgagtggtggacatgtcgccgacatttatctggcgaacatcaacaataatttgcacctggataataccaagcctgtaacaacaaagcagaggaagagacccgaatcaggctccattagaaagacctttcgctcggactctcatggtctgtcttcctctctgactgatagttcaagccccggagtaggcgcctcgtgccgacctagcagccagcctatcatgtcacagtctctccccaaagagggtcccgataagtgctctatttccggccacgggagcctgaatagtatcagcagacattcctcattaaagaatcgactggatagcccacagattcgcaagactgccactgctggccgttccaagagctttaacaaccactag

SEQ ID NO: 297609 - DNA, 693 bp, Artificial Sequence
  derived and/or modified sequence
tgagccgagcaccacaccagcgacgacgagtgcgagcccatcgaggctattgccaagtttgattacgtgggccgaaccgcacgggaattatccttcaaaaagggagcaagcctactgctataccagcgagccagtgatgactggtgggagggcagacacaacggcatcgacggattgatacctcaccagtacatcgtagtccaggacaccgaggacggggtcgtagagcgcagctctcctaaaagtgagattgaagtgatctctgagccaccggaagagaaagttacagctagagctggcgcatcatgtcctagcggcggccacgtggcggacatctatttagcaaacattaataataatctgcatttagacaacaccaaacctgtcaccacaaagcagcggaagcgccccgagtctggaagtatccgcaaaaccttcaggtcggattctcacggactctctagctcactcaccgattccagcagccccggggtcggggccagctgccgcccgagttcccaaccaatcatgtcccagtcccttcctaaggagggtcccgataaatgtagtatatctggtcatgggagccttaactctatcagcagacactccagcttgaaaaaccgcctcgatagtccccagattcgaaaaacagctacagccgggcgcagcaagagtttcaacaaccattag

SEQ ID NO: 297610 - DNA, 759 bp, Artificial Sequence
  derived and/or modified sequence
atggaggattattgcgacagtcctcatggcgagactacatccgtggaggatagcacgcaggacgtgacagctgagcatcacacgagtgacgatgaatgcgaaccaattgaggcaatcgcaaaatttgactacgtaggaagaacagctagagaactgtccttcaaaaaaggggcttctctgttgctgtaccagagggcttccgatgactggtgggagggtagacacaacggcattgacggcctgattcctcatcagtacatcgtcgtgcaggacacggaggacggtgtggtggagcgaagttccccgaagagcgagatcgaagtgattagtgaaccacccgaggaaaaggtcacagcgcgagccggtgcgagctgtccttcaggcggacatgtcgcagatatctatctggctaacatcaataacaacttgcacttggacaacacgaagccagtgactaccaagcagcgtaagcgtcctgagagtggctccattagaaagacattccgctccgattcccatgggctgtcgagctcccttaccgactcttccagccctggagttggagcgtcttgtcgacccagcagtcagcccattatgtcacagagtcttcctaaggaaggcccagacaagtgttcgatcagcggacacgggtccctgaactcgatttcacgtcattcaagtctgaagaatcggctggactcaccgcagatccgaaagacagcgacggctggtcgtagcaaatcttttaacaatcattag

SEQ ID NO: 297611 - DNA, 693 bp, Artificial Sequence
  derived and/or modified sequence
taggcggagcaccacacgtctgacgacgaatgcgagcctattgaagcaatagccaaatttgactacgtgggaagaacggccagggaattatcctttaaaaagggagctagcctgttgctctatcaaagggcctcagatgactggtgggagggtcggcacaacggaatcgacggacttattccccatcagtatatcgtggtgcaagacacggaagatggggtggtggagagatcatcgcccaagagtgaaattgaggtgatctcagagccacctgaggaaaaagtaaccgcacgcgcaggcgcaagctgcccctccgggggacacgtcgcggatatttacctggccaacatcaataacaacctccacttggataatacaaaacctgttacgacaaagcagagaaaacggccagaatctggatccattagaaagaccttcaggtcggatagtcacgggctatctagctcactgacggattcaagctcaccaggcgtgggcgcatcttgcaggccaagctctcagcctatcatgtcacagtcactgcccaaggagggccctgacaagtgttcaatatctggccatggaagtctaaactctattagcaggcactcatctcttaagaaccggctggactcgcctcaaatcagaaagaccgctacagccggtcgctcaaagtcatttaacaaccattag

SEQ ID NO: 297612 - DNA, 690 bp, Artificial Sequence
  derived and/or modified sequence
ccgcagagcaccacacgagcgatgacgaatgtgagcccatcgaggccattgccaagtttgactacgtgggccggacagcccgagagctgtcctttaagaagggagcatccctgctgctttaccagcgggcttccgacgactggtgggaaggccggcacaatggcatcgacggactcatcccccatcagtacatcgtggtccaagacaccgaggacggtgtcgtggagaggtccagccccaagtctgagattgaggtcatttctgagccacctgaagaaaaggtgacagccagagcgggggccagctgtcccagtgggggtcatgtagccgatatttatcttgcaaacatcaacaacaacttacatcttgacaacacaaagcccgtgaccaccaagcaaaggaagcgtccagaatctgggagcatccggaaaacttttcggagtgacagccatgggctgagcagttccctgactgactcctcctccccaggggtgggggctagctgccgcccatcctcccagcccatcatgagccagagcctccccaaagaagggccagataagtgttccatcagtgggcacgggagcctcaactccatcagccgccactcatccctgaagaatcggctggatagtccacagatccggaagactgccacagcgggaaggtcaaaaagcttcaataaccatc

SEQ ID NO: 297613 - DNA, 759 bp, Artificial Sequence
  derived and/or modified sequence
atggaggactactgcgacagcccccacggcgagaccaccagcgtggaggacagcacccaggacgtgaccgccgagcaccacaccagcgacgacgagtgcgagcccatcgaggccatcgccaagttcgactacgtgggcagaaccgccagagagctgagcttcaagaagggcgccagcctgctgctgtaccagagagccagcgacgactggtgggagggcagacacaacggcatcgacggcctgatcccccaccagtacatcgtggtgcaggacaccgaggacggcgtggtggagagaagcagccccaagagcgagatcgaggtgatcagcgagccccccgaggagaaggtgaccgccagagccggcgccagctgccccagcggcggccacgtggccgacatctacctggccaacatcaacaacaacctgcacctggacaacaccaagcccgtgaccaccaagcagagaaagagacccgagagcggcagcatcagaaagaccttcagaagcgacagccacggcctgagcagcagcctgaccgacagcagcagccccggcgtgggcgccagctgcagacccagcagccagcccatcatgagccagagcctgcccaaggagggccccgacaagtgcagcatcagcggccacggcagcctgaacagcatcagcagacacagcagcctgaagaacagactggacagcccccagatcagaaagaccgccaccgccggcagaagcaagagcttcaacaaccactag

SEQ ID NO: 297614 - DNA, 693 bp, Artificial Sequence
  derived and/or modified sequence
tgagccgagcaccacaccagcgacgacgagtgcgagcccatcgaggccatcgccaagttcgactacgtgggcagaaccgccagagagctgagcttcaagaagggcgccagcctgctgctgtaccagagagccagcgacgactggtgggagggcagacacaacggcatcgacggcctgatcccccaccagtacatcgtggtgcaggacaccgaggacggcgtggtggagagaagcagccccaagagcgagatcgaggtgatcagcgagccccccgaggagaaggtgaccgccagagccggcgccagctgccccagcggcggccacgtggccgacatctacctggccaacatcaacaacaacctgcacctggacaacaccaagcccgtgaccaccaagcagagaaagagacccgagagcggcagcatcagaaagaccttcagaagcgacagccacggcctgagcagcagcctgaccgacagcagcagccccggcgtgggcgccagctgcagacccagcagccagcccatcatgagccagagcctgcccaaggagggccccgacaagtgcagcatcagcggccacggcagcctgaacagcatcagcagacacagcagcctgaagaacagactggacagcccccagatcagaaagaccgccaccgccggcagaagcaagagcttcaacaaccactag

SEQ ID NO: 297615 - DNA, 1353 bp, Artificial Sequence
  derived and/or modified sequence
gtgaagaaaacaatggaagccactctgcagacgatacaggacatcgtaacggtagaagatttcgatgtgagcgattgctttcagtatagtaacagcatggagagcgttaagagcactgtgagcgaaacatttatgtcaaaaccttcaattgccaaacggagagcaaaccagcaggaaacagaacagttctactttacaaagatgaaagagtatctggagggcaggaatttgataacaaagttgcaggcaaagcatgacctccttcaaaagaccctgggagaatctcagcggaccgactgcagcctggccagacggagtagcacggtgcgcaagcaggatagctcgcaagcgataccactggtggtcgagtcctgtattagatttatatcccgacacggactgcagcacgaaggaatcttcagggtttcaggttcccaagtggaggtgaatgacatcaagaacgcctttgagcggggcgaagaccctcttgccggggatcaaaatgatcacgacatggacagtattgctggggtgcttaagctgtactttcgaggtcttgaacatccacttttcccaaaagacatctttcatgacttgatggcttgcgttactatggacaatctccaggaaagggcgctgcatatcagaaaggtgctactcgtcctgccgaagactacactgattattatgaggtacctctttgcatttctgaaccatctctcccagtttagcgaagagaatatgatggacccttataatcttgccatatgctttggaccctcactcatgagcgtaccagagggtcacgatcaagtgtcttgtcaagcccatgtgaatgaacttattaaaaccatcatcatccagcatgaaaacatctttcccagcccaagagagcttgaaggtccagtttactcaaggggcggatccatggaggactactgtgactctcctcatggggaaacgacttcggttgaagacagcacccaagatgtgaccgcagagcatcacactagcgatgacgagtgtgagccaatcgaagccatcgccaagttcgattatgtgggcaggacagccagagagctctcctttaaaaagggcgccagcctgctgctgtatcagagggcttccgacgactggtgggaaggccgacacaatggcattgatggactgattccccaccaatacatcgtcgtgcaggacacggaggatggggtggtggagagaagcagcccaaagtccgagattgaggtgatttcagagccacccgaggaaaaggtgaccgctcgggcaggtgcctcttgcccctcgggtggtcacgtagccgatatctacctggcaaacatcaataagtag

SEQ ID NO: 297616 - DNA, 1353 bp, Artificial Sequence
  derived and/or modified sequence
gtgaagaagaccatggaggccaccctgcagaccatccaggacatcgtgacagtggaggactttgatgtgtctgactgcttccagtacagcaacagcatggagagcgtgaagagcacagtgtctgagaccttcatgagcaagcccagcatcgccaagagaagagccaaccagcaggagacagagcagttctacttcaccaagatgaaggagtacctggagggcaggaacctgatcaccaagctgcaggccaagcatgacctgctgcagaagaccctgggggagagccagaggacagactgcagcctggcccggcgcagcagcacagtgaggaagcaggacagcagccaggccatccccctggtggtggagagctgcatccgcttcatcagccgccacggcctgcagcacgagggcatcttccgggtgtctggcagccaggtggaggtgaatgacatcaagaatgcctttgagcggggggaggaccccctggccggggaccagaatgaccatgacatggacagcattgctggggtgctgaagctgtacttccggggcctggagcaccccctcttccccaaggacatcttccatgacctgatggcctgtgtgaccatggacaacctgcaggagcgggccctgcacatcaggaaggtgctgctggtgctgcccaagaccaccctcatcatcatgagatacctgtttgccttcctgaaccacctgagccagttcagcgaggagaacatgatggacccctacaacctggccatctgcttcggccccagcctgatgtctgtgcctgagggccatgaccaggtgtcctgccaggcccacgtgaatgaactcatcaagaccatcatcatccagcacgagaacatcttccccagcccccgggagctggagggccctgtgtacagcagaggaggctccatggaggactactgtgacagcccccacggggagaccacctctgtggaggacagcacccaggatgtgacagctgagcaccacaccagtgatgatgaatgtgagcccatcgaggccatcgccaagtttgattatgtgggccgcacagcccgggagctgtccttcaagaagggggccagcctgctgctgtaccagagggccagtgatgactggtgggagggccgccacaatggaattgatggcctcatcccccaccagtacatcgtggtgcaggacacagaagatggagtggtggagaggagcagccccaagtcagaaattgaagtcatcagcgagcccccagaggagaaggtgacagcccgggccggggccagctgccccagcggcggccacgtggccgacatctacctggccaacatcaacaagtag

SEQ ID NO: 297617 - DNA, 1353 bp, Artificial Sequence
  derived and/or modified sequence
gtgaagaagaccatggaggccaccctgcagaccatccaggacatcgttacagtggaagactttgacgtctcggactgttttcagtactctaacagtatggaatcggtgaaatctaccgtttctgagacgttcatgtctaaaccatctattgccaagaggcgcgcaaaccagcaggagacagagcagttttacttcactaagatgaaagaatacctggaaggtcgcaatctgataaccaaactgcaggcaaaacacgacttgctccagaagacattaggcgaaagccagcggacggattgttccctggcgcggcggtcctctacagtgaggaaacaagatagcagtcaggccatcccacttgtggttgagagctgcatccggtttatcagtaggcatggtcttcagcacgagggtatctttagggtgagtgggtctcaggttgaggttaacgatatcaagaacgcttttgagcgaggcgaggatccactcgctggggatcagaacgatcatgatatggactccatcgccggagtattgaaattgtatttccgaggcctggaacatcctctgtttcctaaggacatcttccatgatctgatggcgtgtgtgacaatggataacctgcaggaaagagctctgcacattcgcaaggtgttgctggtgctgccaaaaacaaccctgataattatgcgctatctgttcgcttttcttaaccatttaagtcagttcagtgaagaaaacatgatggatccatacaacctagctatttgtttcggacccagtcttatgtccgtccccgaaggacacgatcaagtgagttgccaggctcacgtgaacgagctgatcaagaccatcatcatccagcacgaaaacatatttccctccccacgcgagttggaaggtcccgtctacagtcgcggtggaagtatggaagactactgtgattcccctcatggagaaaccacttccgtagaggacagtacacaggacgtgaccgccgagcatcacacctcagatgatgaatgcgaacctatcgaggcgattgccaaatttgattacgtgggtagaaccgcccgcgaattgagctttaaaaagggggcctctttactcctgtatcagagggcgtcagatgattggtgggaaggtagacataatggtattgacggtctgatcccacaccagtacatcgtagtgcaggacacagaggatggcgtcgtcgagagatcttctcctaaatcagagatcgaggtcatctccgagccacctgaagagaaggtgacagctcgcgcaggcgcctcctgcccaagcggggggcacgtggctgatatttacctggcaaacatcaacaagtag

SEQ ID NO: 297618 - DNA, 1353 bp, Artificial Sequence
  derived and/or modified sequence
gtgaagaaaacgatggaagccaccttacaaactattcaagacatagtaacagtcgaagacttcgacgtcagcgactgttttcagtactctaattccatggagtcagtaaagagcaccgtcagcgaaacatttatgtctaaaccctctatcgcaaagcgtcgtgcgaatcagcaggagaccgagcagttctacttcactaagatgaaggagtatcttgaaggtcgaaatctgataaccaagcttcaagctaagcatgatctccttcagaagaccctcggtgaatcgcagcggactgattgctccttggcccgtcgctcatcaaccgtaagaaaacaagattcctcgcaggcgatcccccttgtcgtggagagttgcattagattcatctcccggcacggcctccagcacgaaggcatctttcgcgtgagtggttcacaggtggaagtcaatgatattaaaaacgcctttgagaggggcgaggaccctctcgccggagatcagaacgatcacgacatggactccattgccggagtcctgaagctgtacttccgaggcctggaacaccccctctttcccaaagacatcttccacgatctgatggcctgtgtaacaatggacaacctgcaggagcgcgcactgcacatcaggaaggttctgcttgtcctgccaaagactacactgatcatcatgagatatctgttcgccttcctgaatcatctctctcaattctctgaggaaaacatgatggacccctacaatctggcgatctgttttgggcctagcctaatgagtgtgccagaaggccatgatcaggtatcttgccaggcccacgtaaatgagcttataaaaacaattatcatacagcacgagaatatatttcccagcccgagggagttggaaggaccagtgtacagtagggggggtagcatggaggattattgcgacagtccgcacggcgaaacaacctcggtggaagacagtactcaggacgttaccgctgagcatcacacgagtgatgatgagtgtgaaccaattgaggcaatagctaagttcgactacgtcggcagaaccgcccgagaactttccttcaagaaaggtgcatcactgctgctgtaccaacgtgcgtctgatgattggtgggaaggccgacacaacggcatagacggtctgattccacatcaatatatcgtggtccaagatacagaggacggcgttgtggaacggagctctcctaaatccgagatagaagtcattagcgaacccccagaggaaaaggttacagcacgcgcaggcgctagttgcccatctgggggacatgtggccgatatatatctggctaatatcaacaagtag

SEQ ID NO: 297619 - DNA, 2486 bp, Artificial Sequence
  derived and/or modified sequence
gtaaagaagacaatggaggccaccctgcaaaccatccaggacattgtgactgtcgaggactttgatgtgtctgactgcttccagtacagcaactccatggagtccgtcaagtccacggtctctgaaaccttcatgagcaagcccagcattgctaagaggagagccaaccagcaagagacagagcagttttatttcacaaaaatgaaagagtacctggagggcaggaacctcatcaccaagttacaagccaagcatgaccttctgcagaaaaccctgggagaaagtcagcggacagattgcagtctagccaggcgcagctcaactgtgaggaaacaggactccagccaggcaattcctctggtggtggaaagctgtatccggtttatcagcagacacggactacagcatgaaggaattttccgggtgtcaggatcccaggtggaagtgaatgacatcaaaaatgcctttgagagaggagaggaccccctggctggggaccagaacgaccatgacatggattccatagctggtgtcctgaagctttacttccgggggctggaacaccctctcttccccaaggacatctttcatgacctgatggcctgcgtcacaatggacaacctgcaggagagagctctgcacatccggaaagtcctcctagtcctgcccaaaaccactctgattatcatgagatacctctttgccttcctcaatcatttatcacagttcagtgaagagaacatgatggacccctacaacctcgccatctgcttcgggccctcgctaatgtcagtgccagagggccacgaccaggtgtcctgccaagcccacgtgaatgagctgatcaaaaccatcatcatccagcatgagaacatcttcccaagccccagggagctggagggccctgtctacagcagaggaggaagcatggaggattactgtgatagccctcatggagagactacctcggttgaagactcaacccaggatgtgaccgcagagcaccacacgagcgatgacgaatgtgagcccatcgaggccattgccaagtttgactacgtgggccggacagcccgagagctgtcctttaagaagggagcatccctgctgctttaccagcgggcttccgacgactggtgggaaggccggcacaatggcatcgacggactcatcccccatcagtacatcgtggtccaagacaccgaggacggtgtcgtggagaggtccagccccaagtctgagattgaggtcatttctgagccacctgaagaaaaggtgacagccagagcgggggccagctgtcccagtgggggtcatgtagccgatatttatcttgcaaacatcaacaagtaagctctgcttttcattttctgctcccctgaatgacttgcaacacccagcctcaccctctggcctaacccccatctccattcctgtgctgcacgtagggctcccagctcccccagcctaacagtttgcatgtggtcattgctgctgcaaggcggacagggctgaggatgctgctacaagcctcggggcaggtccaggtctccagctagctgccctcgtgctgtggaagggtgctttactgtgtgttcccgcagtgtctgtccacccagacctttgtggcagtcttacagctaaaactttgaccaaagctttggtcactttatgcaacctggttttgtactgtttctcagaggtgccttcttttttccaatccatactcaaataatagtctttgatgtctgtcttccttgacccgtgttcgtgcaaagattcagagtctgtgtgtggcttctactaggctgatgttacaccaggtgggtttattgagatatcatgtgtctgttcctccccctgtcctgcattcactcctgtggaggaaaggaggccacgatgtccctaaggaaagctttgtcctgagctcttcattcattggctaacccctagctcccttttcttctgccctttcacaccaggagaaataattttccattttgttcctattgctttggccttttgtattattctacccccttagtccctttgcagatccccactcctgctcagcaggctcttacctctgacccccagctttcattgtggctgttagcaacatcctggggtttaaactccacccacgcccgatctggctgtctagagggattctacgcctgcgtgctgccgcctccccaagaggcattcaggttattggagaactaatctcatctcaaggggccagacaccaagtcccaaagcctacagacctctttccgccaggccctgaaacctggccccgtgccagcaggatgacaagccccagggcgctcctgatgaatatggattggagatgatgtacagtttttattcccctctggcttttgaggaatgaaatgatttgcactttgaaaacctgttaaccgtagcctctggacactgagactggaaggagaataaaggatgcttgttgtttttaaactata

SEQ ID NO: 297620 - DNA, 1353 bp, Artificial Sequence
  derived and/or modified sequence
gtgaagaagaccatggaggccaccctgcagaccatccaggacatcgtgaccgtggaggacttcgacgtgagcgactgcttccagtacagcaacagcatggagagcgtgaagagcaccgtgagcgagaccttcatgagcaagcccagcatcgccaagagaagagccaaccagcaggagaccgagcagttctacttcaccaagatgaaggagtacctggagggcagaaacctgatcaccaagctgcaggccaagcacgacctgctgcagaagaccctgggcgagagccagagaaccgactgcagcctggccagaagaagcagcaccgtgagaaagcaggacagcagccaggccatccccctggtggtggagagctgcatcagattcatcagcagacacggcctgcagcacgagggcatcttcagagtgagcggcagccaggtggaggtgaacgacatcaagaacgccttcgagagaggcgaggaccccctggccggcgaccagaacgaccacgacatggacagcatcgccggcgtgctgaagctgtacttcagaggcctggagcaccccctgttccccaaggacatcttccacgacctgatggcctgcgtgaccatggacaacctgcaggagagagccctgcacatcagaaaggtgctgctggtgctgcccaagaccaccctgatcatcatgagatacctgttcgccttcctgaaccacctgagccagttcagcgaggagaacatgatggacccctacaacctggccatctgcttcggccccagcctgatgagcgtgcccgagggccacgaccaggtgagctgccaggcccacgtgaacgagctgatcaagaccatcatcatccagcacgagaacatcttccccagccccagagagctggagggccccgtgtacagcagaggcggcagcatggaggactactgcgacagcccccacggcgagaccaccagcgtggaggacagcacccaggacgtgaccgccgagcaccacaccagcgacgacgagtgcgagcccatcgaggccatcgccaagttcgactacgtgggcagaaccgccagagagctgagcttcaagaagggcgccagcctgctgctgtaccagagagccagcgacgactggtgggagggcagacacaacggcatcgacggcctgatcccccaccagtacatcgtggtgcaggacaccgaggacggcgtggtggagagaagcagccccaagagcgagatcgaggtgatcagcgagccccccgaggagaaggtgaccgccagagccggcgccagctgccccagcggcggccacgtggccgacatctacctggccaacatcaacaagtag

SEQ ID NO: 297621 - protein, 305 aa, Artificial Sequence
  derived and/or modified sequence
MLKPINTTGTLKPDDRVVVAATRLDSRSFFWNVAPGAESAVASFVTQLAAAEALQKAPDVTTLPRNVMFVFFQGVALRTSLELWMHTDPVSQKNESVRNQVEDLLATLEKSGAGVPAVILRRPNQSQPLPPSSLQRFLRARNISGVVLADHSGAFHNKYYQSIYDTAENINVSYPEWLSPEEDLNFVTDTAKALADVATVLGRALYELAGGTNFSDTVQADPQTVTRLLYGFLIKANNSWFQSILRQDLRSYLGDGPLQHYIAVSSPTNTTYVVQYALANLTGTVVNLTREQCQDPSKVPSENKD

SEQ ID NO: 297622 - protein, 320 aa, Artificial Sequence
  derived and/or modified sequence
  misc_feature (1)..(1): Xaa can be any naturally occurring amino acid
XGFGVYSNSYGPEFAHCREIQWNSLGNGLAYEDFSFPIFLLEDENETKVIKQLFSHMHAVISTATCMRRSSIQSTFSINPEIVCDPLSDYNVWSMLKPINTTGTLKPDDRVVVAATRLDSRSFFWNVAPGAESAVASFVTQLAAAEALQKAPDVTTLPRNVMFVFFQGETFDYIGSSRMVYDMEKGKFPVQLENVDSFVELGQVALRTSLELWMHTDPVSQKNESVRNQVEDLLATLEKSGAGVPAVILRRPNQSQPLPPSSLQRFLRARNISGVVLADHSGAFHNKYYQSIYDTAENINVSYPEWLSPEEDLNFVTDTA

SEQ ID NO: 297623 - protein, 219 aa, Artificial Sequence
  derived and/or modified sequence
RSSIQSTFSINPEIVCDPLSDYNVWSMLKPINTTGTLKPDDRVVVAATRLAAAEALQKAPDVTTLPRNVMFVFFQGETFDYIGSSRMVYDMEKGKFPVQLENVDSFVELGQVALRTSLELWMHTDPVSQKNESVRNQVEDLLATLEKSGAGVPAVILRRPNQSQPLPPSSLQRFLRARNISGVVLADHSGAFHNKYYQSIYDTAENINVSYPEWLSPEE

SEQ ID NO: 297624 - protein, 275 aa, Artificial Sequence
  derived and/or modified sequence
  misc_feature (1)..(1): Xaa can be any naturally occurring amino acid
XNVAPGAESAVASFVTQLAAAEALQKAPDVTTLPRNVMFVFFQGVALRTSLELWMHTDPVSQKNESVRNQVEDLLATLEKSGAGVPAVILRRPNQSQPLPPSSLQRFLRARNISGVVLADHSGAFHNKYYQSIYDTAENINVSYPEWLSPEEDLNFVTDTAKALADVATVLGRALYELAGGTNFSDTVQADPQTVTRLLYGFLIKANNSWFQSILRQDLRSYLGDGPLQHYIAVSSPTNTTYVVQYALANLTGTVVNLTREQCQDPSKVPSENKD

SEQ ID NO: 297625 - DNA, 1356 bp, Artificial Sequence
  derived and/or modified sequence
atgcttaaaccaattaatacaaccggcacactgaagcccgacgaccgggtcgttgtggcagccacgcgccttgattcccggagcttcttttggaacgtcgcaccaggggctgagagtgccgtggccagtttcgtgacgcaattagctgccgcagaggccctccagaaagcgcccgacgtgactactcttccaagaaacgtcatgttcgtattcttccagggtgaaacttttgattacatcggatcctcccgtatggtctacgacatggaaaaaggaaagttcccggtgcagctggaaaatgttgactctttcgtggagctggggcaggtagctttacgcactagcctggaattatggatgcataccgatccagtgagccagaagaatgagtccgtacgcaaccaagtagaggatctcctcgccacacttgagaagagcggtgcgggcgttccagcagtaatcctacgtcggccaaatcagtcccagccgttgcccccatcctccttgcagcgattccttcgggctagaaatattagcggtgtggtgctcgccgaccactcgggagctttccataacaaatactaccagagcatctacgacactgcagagaacataaacgtaagctatcccgaatggctcagccctgaggaggacttgaattttgttaccgacactgccaaagccctcgcggatgtagctacagtgctgggccgcgccctctacgaactggctggagggaccaactttagcgacacggtccaggcagaccctcagactgttacaaggttgctgtacggcttcttgatcaaagctaacaactcctggttccaatctattctaagacaggacctgagatcttacctgggggacggaccactacagcactacatcgccgtgtcctcacccaccaacaccacttacgttgtgcagtacgcacttgcaaacttgacgggcactgtggttaatcttacacgcgagcagtgtcaggatccctctaaagtacccagcgagaataaggatttatatgaatattcctgggtgcaggggccgttgcactctaacgaaaccgaccgtttacctcgctgtgtgagaagtacagccagactggccagagccttgtccccagctttcgaactcagccagtggagttctacggagtacagcacttggaccgaatccaggtggaaggacatacgggcccgtatttttcttatcgcaagcaaagagctggagctaatcactttaacagttggatttggaatcctcattttctcactaattgtcacctactgtattaatgcgaaggcggacgttctcttcattgcccccagagaaccgggcgctgtgagttattag

SEQ ID NO: 297626 - DNA, 918 bp, Artificial Sequence
  derived and/or modified sequence
atgctgaaaccaataaataccaccggtacactgaaaccagacgacagagttgtagtggcagctacaagactggattctcgttcttttttttggaacgttgcgccaggggccgaatccgccgtcgcttcctttgtgacacagcttgcagcggcggaagcactgcagaaggcaccagatgtcacaactctgccgcgtaatgtgatgtttgtattctttcaaggagtcgccctcagaacttccctcgagctatggatgcatacagaccctgtgtcccagaaaaacgagtctgtgcgtaatcaggtagaagatctgctcgcaactctggagaagagtggtgccggggtgccagctgttatcctgcgacgacccaaccagtcccagccccttcctccatcgtccctccagcgtttcctaagagctcgcaacatcagcggcgttgtgcttgccgatcactcaggggcctttcataacaagtactaccagtctatctatgacaccgcggagaacataaacgtgtcttatccagagtggttaagccccgaagaggatctgaatttcgttaccgacaccgccaaagcactggctgatgtggcaaccgtgcttggacgggctctgtatgaacttgccggcggtaccaacttcagtgataccgtacaggctgatccacagacggttaccaggctcttgtacggatttttaatcaaggctaacaactcgtggttccagagtatactcaggcaggatcttaggtcctacctgggcgacggcccccttcagcattacatcgctgtctcctccccaaccaatactacctacgttgttcagtacgcccttgccaatttgaccggcacggtcgtgaacctaacccgggaacagtgtcaggacccttccaaggttcccagtgaaaacaaagactag

SEQ ID NO: 297627 - DNA, 963 bp, Artificial Sequence
  derived and/or modified sequence
taggggttcggagtctactccaacagttacggtccagagttcgctcactgccgcgagattcagtggaacagtttgggaaatggtttagcgtatgaagacttcagttttcccatctttctgctggaagacgagaatgaaacaaaggtgatcaaacagctgtttagccacatgcacgccgtgatcagtacggcaacatgcatgcgaaggtcaagcatacagagcaccttcagcattaatcctgagatcgtgtgcgaccctcttagtgactataacgtgtggtccatgttaaagcccattaacaccacgggcacgctgaaacccgatgatagagtcgtcgtcgcagcaaccaggctggactctcgctccttcttttggaatgtggcccctggtgctgagagcgcggtggcaagttttgtgactcagttagcagcggcggaggctttacagaaagccccagatgtaacaacattgcctcgcaacgtcatgttcgtgttctttcagggcgaaaccttcgactatatcggcagttctcgcatggtttacgatatggagaagggcaagttccctgtccagctcgagaacgtggacagcttcgtcgagctgggtcaggtagccctgcgcacaagtctcgagctgtggatgcatactgaccccgtaagccagaaaaatgaatctgtccggaatcaggtcgaggacctcctcgccactcttgagaagtcaggagcaggagtacccgcggtgatcctgcgcaggccgaaccagtcgcagccactccccccttcctctttgcagcgctttttgagagctcgcaatatctctggtgtggtactggccgatcactccggcgctttccacaacaagtactatcagtctatctatgataccgcagaaaacatcaatgtttcctatccggagtggttatcaccagaggaggacttgaatttcgtgaccgacactgcatag

SEQ ID NO: 297628 - DNA, 660 bp, Artificial Sequence
  derived and/or modified sequence
agatcatcaatccagtcaactttctccatcaatccagagatcgtttgtgacccgctgtcagattacaatgtatggtccatgctgaaacccatcaatactactggcacgctgaagcctgatgatcgcgtggttgtggcagcgacccggttggccgccgcagaggctttgcagaaagctcctgacgtgacaaccctgcctaggaatgtaatgttcgtgttcttccagggtgaaacatttgactatattggcagctcaaggatggtttacgatatggagaagggcaagtttccggttcagctcgaaaacgtggactcttttgtcgaactcggtcaggtagcccttcgtacatccttggagctctggatgcacactgatcccgtcagccagaaaaatgagtccgttaggaatcaggttgaggacctgcttgctaccctggagaaaagcggggccggcgtgcctgccgtcattctccgtcgcccaaaccagagccagcccctgccaccctcgtccctccagcggttccttagggccaggaacattagcggagttgttctggcagaccacagtggggcctttcacaacaagtactaccagtcaatttatgacacagccgagaatattaatgtgtcttaccccgagtggttgagtccagaagagtag

SEQ ID NO: 297629 - DNA, 828 bp, Artificial Sequence
  derived and/or modified sequence
taaaacgttgccccgggcgcagagtccgccgtggcttccttcgtgacacaactggctgcggccgaggccctgcagaaggctccagacgtgactactctgccccggaacgtgatgtttgtgttcttccagggcgtcgcgctgagaacgagtctggaattgtggatgcacacagatccagtatcacagaaaaatgaatctgtacgaaaccaggtcgaagatctacttgccaccctggagaagtcaggcgctggggtaccggccgtcatcctgagaaggcccaatcaatcccagcccttgcccccttccagtcttcagcgctttcttcgtgcccgcaatatcagtggggtagtgcttgccgaccactccggcgccttccacaataagtactatcagagtatttacgatacagcagaaaacatcaatgtgtcctatccagagtggctctcaccggaggaggacttgaatttcgtgacggataccgctaaagctttggcagatgtggcaaccgtgctgggacgagctctctacgagctggctggcggtaccaacttttctgacacagtacaggcagatccacaaactgtgacgagacttctgtacggatttctgatcaaagctaacaactcctggtttcagtctatcctcagacaagatcttagatcctacctgggtgacgggcctcttcagcactacattgccgtgtcgtcgccgactaataccacatacgttgtacagtacgccttagccaacctcactggcaccgttgtgaacttgacacgcgagcaatgccaagatccttcaaaggtgcccagtgagaacaaagattag

SEQ ID NO: 297630 - DNA, 1356 bp, Artificial Sequence
  derived and/or modified sequence
atgctgaagcccatcaacaccaccggcaccctgaagccagatgacagagtggtggtggccgccacccggctggacagccgctccttcttctggaatgtggcccctggagctgagagcgctgtggccagctttgtgacccagctggccgctgctgaggccctgcagaaggccccagatgtgaccaccctgcccagaaatgtgatgtttgtgttcttccagggcgagacctttgactacatcggcagcagcaggatggtgtatgacatggagaagggcaagtttcctgtgcagctggagaatgtggacagctttgtggagctgggccaggtggccctgcggaccagcctggagctgtggatgcacacagatcctgtgtcccagaagaatgaatctgtgaggaaccaggtggaggacctgctggccaccctggagaagagcggggccggcgtgcctgctgtgatcctgcggcggcccaaccagagccagcccctgccccccagcagcctgcagcgcttcctgcgggccaggaacatctctggagtggtgctggccgaccacagcggggccttccacaacaagtactaccagagcatctatgacacagctgagaacatcaacgtgtcctacccagagtggctgagccctgaggaggacctgaactttgtgacagacacagccaaggccctggctgatgtggccaccgtgctgggccgggccctgtatgagctggccggcggcaccaacttcagtgacacagtgcaggccgacccccagacagtgacccggctgctgtatggcttcctgatcaaggccaacaacagctggttccagagcatcctgcggcaggacctgcggagctacctgggagatggccccctgcagcactacatcgctgtgagcagccccaccaacaccacctacgtggtgcagtatgccctggccaacctgactggaacagtggtgaacctgacccgggagcagtgccaggaccccagcaaggtgcccagcgagaacaaggacctgtatgagtacagctgggtgcagggccccctgcacagcaatgaaacagaccggctgccccgctgtgtgcgcagcacagcccggctggcccgggccctgagccctgcctttgagctgagccagtggagcagcacagagtacagcacctggacagagagccgctggaaggacatccgggcccgcatcttcctgattgccagcaaggagctggagctgatcaccctgactgtgggcttcggcatcctgatcttcagcctgattgtgacctactgcatcaatgccaaggcagatgtgctcttcatcgccccccgggagcccggggctgtgtcctactag

SEQ ID NO: 297631 - DNA, 918 bp, Artificial Sequence
  derived and/or modified sequence
atgctgaagcccatcaacaccaccggcaccctgaagccagatgacagagtggtggtggccgccacccggctggacagccgctccttcttctggaatgtggcccctggagctgagagcgctgtggccagctttgtgacccagctggccgctgctgaggccctgcagaaggccccagatgtgaccaccctgcccagaaatgtgatgtttgtgttcttccagggcgtggccctgcggaccagcctggagctgtggatgcacacagatcctgtgtcccagaagaatgaatctgtgaggaaccaggtggaggacctgctggccaccctggagaagtctggagctggggtgcctgctgtgatcctgcggcggcccaaccagagccagcccctgccccccagcagcctgcagcgcttcctgcgggccaggaacatcagcggcgtggtgctggccgaccacagcggggccttccacaacaagtactaccagagcatctatgacacagctgagaacatcaacgtgtcctacccagagtggctgagccctgaggaggacctgaactttgtgacagacacagccaaggccctggctgatgtggccaccgtgctgggccgggccctgtatgagctggccggcggcaccaacttcagtgacacagtgcaggccgacccccagacagtgacccggctgctgtatggcttcctgatcaaggccaacaacagctggttccagagcatcctgcggcaggacctgcggagctacctgggagatggccccctgcagcactacatcgctgtgagcagccccaccaacaccacctacgtggtgcagtatgccctggccaacctgaccggcaccgtggtgaacctgacccgggagcagtgccaggaccccagcaaggtgcccagcgagaacaaggactag

SEQ ID NO: 297632 - DNA, 963 bp, Artificial Sequence
  derived and/or modified sequence
tgaggatttggagtgtacagcaacagctatggccctgagtttgcccactgccgggagatccagtggaacagcctgggcaatggcctggcctatgaggacttctccttccccatcttcctgctggaggatgaaaatgagaccaaggtgatcaagcagctgttcagccacatgcatgctgtgatcagcacagccacctgcatgaggaggagcagcatccagagcaccttcagcatcaaccctgagatcgtgtgtgaccccctgagtgactacaacgtgtggagcatgctgaagcccatcaacaccaccggcaccctgaagccagatgacagagtggtggtggccgccacccggctggacagccgctccttcttctggaatgtggcccctggagctgagagcgctgtggccagctttgtgacccagctggccgctgctgaggccctgcagaaggccccagatgtgaccaccctgcccagaaatgtgatgtttgtgttcttccagggcgagacctttgactacatcggcagcagcaggatggtgtatgacatggagaagggcaagtttcctgtgcagctggagaatgtggacagctttgtggagctgggccaggtggccctgcggaccagcctggagctgtggatgcacacagatcctgtgtcccagaagaatgaatctgtgaggaaccaggtggaggacctgctggccaccctggagaagagcggggccggcgtgcctgctgtgatcctgcggcggcccaaccagagccagcccctgccccccagcagcctgcagcgcttcctgcgggccaggaacatctctggagtggtgctggccgaccacagcggggccttccacaacaagtactaccagagcatctatgacacagctgagaacatcaacgtgtcctacccagagtggctgagccctgaggaggacctgaactttgtgacagacacagcctag

SEQ ID NO: 297633 - DNA, 660 bp, Artificial Sequence
  derived and/or modified sequence
cgcagcagcatccagagcaccttcagcatcaaccctgagatcgtgtgtgaccccctgagtgactacaacgtgtggagcatgctgaagcccatcaacaccaccggcaccctgaagccagatgacagagtggtggtggccgccacccggctggccgctgctgaggccctgcagaaggccccagatgtgaccaccctgcccagaaatgtgatgtttgtgttcttccagggcgagacctttgactacatcggcagcagcaggatggtgtatgacatggagaagggcaagtttcctgtgcagctggagaatgtggacagctttgtggagctgggccaggtggccctgcggaccagcctggagctgtggatgcacacagatcctgtgtcccagaagaatgaatctgtgaggaaccaggtggaggacctgctggccaccctggagaagagcggggccggcgtgcctgctgtgatcctgcggcggcccaaccagagccagcccctgccccccagcagcctgcagcgcttcctgcgggccaggaacatctctggagtggtgctggccgaccacagcggggccttccacaacaagtactaccagagcatctatgacacagctgagaacatcaacgtgtcctacccagagtggctgagccctgaggagtag

SEQ ID NO: 297634 - DNA, 828 bp, Artificial Sequence
  derived and/or modified sequence
tgaaatgtggcccctggagctgagagcgctgtggccagctttgtgacccagctggccgctgctgaggccctgcagaaggccccagatgtgaccaccctgcccagaaatgtgatgtttgtgttcttccagggcgtggccctgcggaccagcctggagctgtggatgcacacagatcctgtgtcccagaagaatgaatctgtgaggaaccaggtggaggacctgctggccaccctggagaagtctggagctggggtgcctgctgtgatcctgcggcggcccaaccagagccagcccctgccccccagcagcctgcagcgcttcctgcgggccaggaacatcagcggcgtggtgctggccgaccacagcggggccttccacaacaagtactaccagagcatctatgacacagctgagaacatcaacgtgtcctacccagagtggctgagccctgaggaggacctgaactttgtgacagacacagccaaggccctggctgatgtggccaccgtgctgggccgggccctgtatgagctggccggcggcaccaacttcagtgacacagtgcaggccgacccccagacagtgacccggctgctgtatggcttcctgatcaaggccaacaacagctggttccagagcatcctgcggcaggacctgcggagctacctgggagatggccccctgcagcactacatcgctgtgagcagccccaccaacaccacctacgtggtgcagtatgccctggccaacctgaccggcaccgtggtgaacctgacccgggagcagtgccaggaccccagcaaggtgcccagcgagaacaaggactag

SEQ ID NO: 297635 - DNA, 1356 bp, Artificial Sequence
  derived and/or modified sequence
atgctgaagcccatcaacaccaccggcaccctgaagcccgacgacagggtagtggtggccgcaaccagactggacagcaggtcgtttttttggaatgtagcccccggcgcggagtctgctgtggctagtttcgtcacacagctggcagccgcggaggccctccagaaagcaccggatgtgactacactacctcgaaacgtaatgtttgtcttcttccagggagaaacattcgactacatcgggagcagtaggatggtctacgatatggagaagggaaaattcccagtgcagctcgagaacgttgattcttttgtggagcttggacaagttgcattgcggacaagcctcgagctgtggatgcacacagatccggtgtcccaaaaaaacgagagcgtccgtaaccaggtcgaagacctccttgctaccttggaaaagagtggagcaggggtgccggccgtgatactgcgccggccaaaccagtcccagccactgccaccttcgagcctgcaaagattcctccgcgccaggaacatctccggcgtggtactcgccgatcactctggtgccttccacaacaagtactaccaaagtatctatgatactgctgagaacattaatgtatcctatcccgaatggctttcgcccgaagaagatttaaacttcgtaacagatacagctaaggcattggcagacgtcgctacagttctaggacgcgcattgtatgaattggctggcggtaccaatttctctgacaccgttcaagccgaccctcagaccgttacccggctgctgtatgggttcctgatcaaagccaacaatagctggtttcagtccattttgagacaggatctcagatcttacttgggcgatggacccctgcagcattatattgccgtcagctctcctacaaacactacttatgtggtgcagtacgcacttgcaaatttaactggcaccgtcgttaacctgactagagaacagtgccaggacccatcgaaggtgcctagtgaaaataaggacttatacgaatactcatgggtacagggacccctgcacagcaatgagaccgacaggctgccaagatgcgtccggagtacagcccgcctcgcaagggctttgagccccgcatttgagctgtctcagtggtcttccactgaatactctacatggacggagtccagatggaaggacattagggctcgtatcttcctcattgccagtaaggagttagagctgataacattgaccgtcgggttcggaattttgatcttctcgctgattgtaacatactgcatcaacgccaaagcagacgtcctgtttatcgcgccccgtgagccgggcgctgttagctattag

SEQ ID NO: 297636 - DNA, 918 bp, Artificial Sequence
  derived and/or modified sequence
atgctgaagcccatcaacaccaccggcaccctgaagcccgacgacagagtcgtggtggcggcgaccaggctggatagccgcagtttcttttggaatgtggcacccggagccgaaagcgccgttgcctcttttgtgacgcagttggctgccgctgaggctcttcagaaggcgccagacgtgacaacgctaccccggaacgtgatgttcgtattcttccaaggcgtggctctgcgtactagcttggaactgtggatgcacacagatcctgtctcccagaaaaacgagtctgtgagaaatcaggtggaagacttactggccacgcttgaaaaatccggagcaggggtgccagcagtaattctccggcggcctaatcagtcccagcctctgcctccttcctcgctgcagaggtttctgagggccagaaacatatccggggttgtactagcagaccactccggggccttccataacaagtattaccagtctatctacgataccgccgagaatataaacgtgagctaccctgagtggctcagtccagaagaagaccttaattttgtaaccgatacagcaaaggcactcgccgatgtcgctacagtcttgggccgtgctctgtacgagctggcaggtggcaccaatttctcggacaccgtacaagctgacccccagactgtgactaggctgctctatggttttctcataaaggcgaacaactcctggttccagtccatactcaggcaagacttgagatcctatctgggagacgggcccctgcagcattacatcgctgtgagctctcccacgaataccacttacgttgtgcagtacgccctcgccaatctcacaggaaccgtcgtcaacctaactagagagcagtgtcaggatccatcaaaggtgccctccgagaataaagactag

SEQ ID NO: 297637 - DNA, 963 bp, Artificial Sequence
  derived and/or modified sequence
tgaggcttcggcgtgtacagcaacagctacggccccgagttcgcccactgtagagagatacagtggaactctctcggcaatggtctggcgtatgaagatttctcttttccgatctttcttctggaagatgagaatgaaacgaaagtgattaagcagttattttcacatatgcatgcagtgatttcaaccgctacatgtatgagacgtagctctattcagtccacgtttagtattaatcccgagattgtctgcgacccactgagtgattacaacgtatggtcgatgttaaagcccatcaacaccacagggaccttaaaacccgatgacagagtggtggttgctgctaccaggcttgattcaaggagttttttctggaacgtggcacccggggctgagtcagcggtggcctcctttgtaactcagcttgcggctgcggaagccttacagaaagctccagacgtaaccactcttcccaggaatgtgatgttcgtgtttttccaaggagagaccttcgattatatcggcagctctcgcatggtctacgatatggaaaagggcaaatttcccgtgcagctcgaaaacgtggacagtttcgtggaactaggccaggtcgcactcaggacatctctggaactgtggatgcataccgatccagtctctcagaagaacgaaagtgtgcggaaccaagttgaggaccttctggctacactagagaaatccggggcaggagttccggctgtcattcttagaagacccaatcaatctcaaccattgcccccctccagcctgcagcgttttctcagggcacgcaacatctcgggagttgtgctggccgaccattcgggcgccttccataataagtattaccagtctatttacgatacagccgagaatattaacgtcagctaccctgaatggctgtcacccgaggaggacctgaattttgtcacagataccgcctag

SEQ ID NO: 297638 - DNA, 660 bp, Artificial Sequence
  derived and/or modified sequence
cggagcagcatccagagcaccttcagcatcaaccccgagatcgtgtgcgacccacttagcgattataatgtctggtccatgctcaagccaatcaatacaactggcaccctgaagccagacgaccgcgtggtcgtagctgccaccagacttgcagctgcagaggccctacaaaaagcgcccgacgttactactctcccaaggaacgtgatgtttgtgttctttcagggcgaaaccttcgactacatcgggtcctcccgcatggtgtacgacatggagaagggaaagttccccgtccagcttgagaatgttgactcgtttgtcgaactcggacaggtggctctgcggacgtctctagaactctggatgcacacagacccagttagtcaaaagaatgaaagcgttagaaaccaagtggaagatctcctggccaccctcgaaaaatctggtgccggagtgcccgccgtaatactaaggaggccaaaccagtctcagccactcccgccaagctcactgcagcgattcttgagagctcgcaatattagcggcgtcgtgctggcagaccactctggagcattccacaacaaatattatcaaagcatatatgacaccgcagagaacatcaatgtatcctaccccgagtggttgagtcccgaagagtag

SEQ ID NO: 297639 - DNA, 828 bp, Artificial Sequence
  derived and/or modified sequence
tgaaacgtggcccccggcgccgagagcgccgtggccagcttcgtgacgcagctggcagccgccgaggcattacagaaggcacctgacgtgacaaccctccctaggaacgtcatgttcgtgttcttccaaggcgtggctcttaggacctcactggaattatggatgcacaccgatccagtgtcacagaagaacgagtccgtgagaaaccaggtggaagaccttttggcgacgctcgagaagtctggcgcaggagtgcctgctgtgattctacggcggccaaaccaaagtcagcctctcccaccaagctcgctgcagaggtttttgcgcgcacgcaacatctctggcgttgtgctcgcagaccattcaggggcttttcataataagtattatcagtctatctacgacactgccgagaacattaatgtcagttacccggagtggctgtcaccggaagaggatcttaacttcgtcacagataccgcaaaggcactggcagacgttgccacagtcctgggtagggccttgtacgagctggccggcggcactaacttcagcgacacagtgcaggctgatccccaaacggtgacacgcctgctctacggattcctcataaaagccaataacagttggttccagtctattctgcgccaagatttgcgatcttatctgggagatggccctctccagcattacattgctgtctctagtcccactaacactacgtacgtggtgcagtacgccctggctaacctaaccgggactgtagtcaatctaactagggaacaatgtcaggatccctctaaagtgcctagtgaaaacaaggattag

SEQ ID NO: 297640 - DNA, 1912 bp, Artificial Sequence
  derived and/or modified sequence
ttactccaattcctatgggccagagtttgctcactgcagagaaatacagtggaattcgctgggcaatggtttggcttatgaagactttagtttccccatctttcttcttgaagatgaaaatgaaaccaaagtcatcaagcagaaatcgtctgtgaccccctgtctgattacaatgtgtggagcatgctaaagcctataaatacaactgggacattaaagcctgacgacagggttgtggttgctgccacccggctggatagtcgttcctttttctggaatgtggccccaggggctgaaagcgcagtggcttcctttgtcacccagctggctgctgctgaagctttgcaaaaggcacctgatgtgaccaccctgccccgcaatgtcatgtttgtcttctttcaaggggaaacttttgactacattggcagctcgaggatggtctacgatatggagaagggcaagtttcccgtgcagttagagaatgttgactcatttgtggagctgggacaggtggccttaagaacttcattagagctttggatgcacacagatcctgtttctcagaaaaatgagtctgtacggaaccaggtggaggatctcctggccacattggagaagagtggtgctggtgtccctgctgtcatcctcaggaggccaaatcagtcccagcctctcccaccatcttccctgcagcgatttcttcgagctcgaaacatctctggcgttgttctggctgaccactctggtgccttccataacaaatattaccagagtatttacgacactgctgagaacattaatgtgagctatcccgaatggctgagccctgaagaggacctgaactttgtaacagacactgccaaggccctggcagatgtggccacggtgctgggacgtgctctgtatgagcttgcaggaggaaccaacttcagcgacacagttcaggctgatccccaaacggttacccgcctgctctatgggttcctgattaaagccaacaactcatggttccagtctatcctcaggcaggacctaaggtcctacttgggtgacgggcctcttcaacattacatcgctgtctccagccccaccaacaccacttatgttgtacagtatgccttggcaaatttgactggcacagtggtcaacctcacccgagagcagtgccaggatccaagtaaagtcccaagtgaaaacaaggatctgtatgagtactcatgggtccagggccctttgcattctaatgagacggaccgactcccccggtgtgtgcgttctactgcacgattagccagggccttgtctcctgcctttgaactgagtcagtggagctctactgaatactctacatggactgagagccgctggaaagatatccgtgcccggatatttctcatcgccagcaaagagcttgagttgatcaccctgacagtgggcttcggcatcctcatcttctccctcatcgtcacctactgcatcaatgccaaagctgatgtccttttcattgctccccgggagccaggagctgtgtcatactgaggaggaccccagcttttcttgccagctcagcagttcacttcctagagcatctgtcccactgggacacaaccactaatttgtcactggaacctccctgggcctgtctcagattgggattaacataaaagagtggaactatccaaaagagacagggagaaataaataaattgcctcccttcctccgctcccctttcccatcaccccttccccatttcctcttccttctctactcatgccagattttgggattacaaatagaagcttcttgctcctgtttaactccctagttacccaccctaatttgcccttcaggacccttctactttttccttcctgccctgtacctctctctgctcctcacccccacccctgt

SEQ ID NO: 297641 - DNA, 958 bp, Artificial Sequence
  derived and/or modified sequence
atgggtttggtgtttactccaattcctatgggccagagtttgctcactgcagagaaatacagtggaattcgctgggcaatggtttggcttatgaagactttagtttccccatctttcttcttgaagatgaaaatgaaaccaaagtcatcaagcagctcttttcacacatgcatgctgtcatcagcactgccacctgcatgcggcgcagctccatccaaagcaccttcagcatcaacccagaaatcgtctgtgaccccctgtctgattacaatgtgtggagcatgctaaagcctataaatacaactgggacattaaagcctgacgacagggttgtggttgctgccacccggctggatagtcgttcctttttctggaatgtggccccaggggctgaaagcgcagtggcttcctttgtcacccagctggctgctgctgaagctttgcaaaaggcacctgatgtgaccaccctgccccgcaatgtcatgtttgtcttctttcaaggggaaacttttgactacattggcagctcgaggatggtctacgatatggagaagggcaagtttcccgtgcagttagagaatgttgactcatttgtggagctgggacaggtggccttaagaacttcattagagctttggatgcacacagatcctgtttctcagaaaaatgagtctgtacggaaccaggtggaggatctcctggccacattggagaagagtggtgctggtgtccctgctgtcatcctcaggaggccaaatcagtcccagcctctcccaccatcttccctgcagcgatttcttcgagctcgaaacatctctggcgttgttctggctgaccactctggtgccttccataacaaatattaccagagtatttacgacactgctgagaacattaatgtgagctatcccgaatggctgagccctgaagaggacctgaactttgtaacagacactgc

SEQ ID NO: 297642 - DNA, 659 bp, Artificial Sequence
  derived and/or modified sequence
cgcagctccatccaaagcaccttcagcatcaacccagaaatcgtctgtgaccccctgtctgattacaatgtgtggagcatgctaaagcctataaatacaactgggacattaaagcctgacgacagggttgtggttgctgccacccggctggctgctgctgaagctttgcaaaaggcacctgatgtgaccaccctgccccgcaatgtcatgtttgtcttctttcaaggggaaacttttgactacattggcagctcgaggatggtctacgatatggagaagggcaagtttcccgtgcagttagagaatgttgactcatttgtggagctgggacaggtggccttaagaacttcattagagctttggatgcacacagatcctgtttctcagaaaaatgagtctgtacggaaccaggtggaggatctcctggccacattggagaagagtggtgctggtgtccctgctgtcatcctcaggaggccaaatcagtcccagcctctcccaccatcttccctgcagcgatttcttcgagctcgaaacatctctggcgttgttctggctgaccactctggtgccttccataacaaatattaccagagtatttacgacactgctgagaacattaatgtgagctatcccgaatggctgagccctgaagagga

SEQ ID NO: 297643 - DNA, 824 bp, Artificial Sequence
  derived and/or modified sequence
ggaatgtggccccaggggctgaaagcgcagtggcttcctttgtcacccagctggctgctgctgaagctttgcaaaaggcacctgatgtgaccaccctgccccgcaatgtcatgtttgtcttctttcaaggggtggccttaagaacttcattagagctttggatgcacacagatcctgtttctcagaaaaatgagtctgtacggaaccaggtggaggatctcctggccacattggagaagagtggtgctggtgtccctgctgtcatcctcaggaggccaaatcagtcccagcctctcccaccatcttccctgcagcgatttcttcgagctcgaaacatctctggcgttgttctggctgaccactctggtgccttccataacaaatattaccagagtatttacgacactgctgagaacattaatgtgagctatcccgaatggctgagccctgaagaggacctgaactttgtaacagacactgccaaggccctggcagatgtggccacggtgctgggacgtgctctgtatgagcttgcaggaggaaccaacttcagcgacacagttcaggctgatccccaaacggttacccgcctgctctatgggttcctgattaaagccaacaactcatggttccagtctatcctcaggcaggacctaaggtcctacttgggtgacgggcctcttcaacattacatcgctgtctccagccccaccaacaccacttatgttgtacagtatgccttggcaaatttgactggcacagtggtcaacctcacccgagagcagtgccaggatccaagtaaagtcccaagtgaaaacaaggat

SEQ ID NO: 297644 - DNA, 1356 bp, Artificial Sequence
  derived and/or modified sequence
atgcttaaaccaataaataccactggcactctgaaacctgacgatagagtagttgtcgcagctacccggcttgatagcaggagcttcttttggaacgtggccccaggcgctgaatctgccgtggccagcttcgtgacacaactcgccgcagccgaggcgctgcaaaaggctcccgacgtgactacactccctagaaatgttatgtttgtgttcttccagggggaaactttcgattatatcggatctagtcggatggtatatgacatggaaaagggcaagtttcctgtacagctcgagaacgtcgatagctttgttgagctggggcaggtcgctctgagaacctccctagaactgtggatgcatacggatccagtttctcagaagaacgagtcagtacgcaatcaggtagaggacttgcttgccactctggaaaagtccggcgctggggttcctgctgtgattctgcgcaggcctaaccagtctcagccactgcccccttcctctctacagcgctttctaagagctcggaacatatccggtgttgtgctcgctgaccactccggcgctttccacaacaagtattatcagtccatttacgacactgccgaaaatatcaatgtgagctaccctgaatggctgtcacctgaggaggacctcaattttgtgaccgatactgctaaagccctggccgacgttgctaccgttctcggtagggccctgtacgaattagccggtgggacgaacttttctgacaccgtacaggctgatccccagacagtcacgcgactgctgtatggctttctgattaaggctaataatagttggttccagagcatccttagacaggacctgcgtagttatctgggcgacggacctctgcagcactacatcgctgtgagctctcccactaacacaacttacgtagtgcaatacgcactggccaacctcaccggaacggtggtaaatctgacgcgggagcagtgccaggacccctcgaaggttcccagcgagaacaaggacctctacgagtatagctgggtgcaggggccactccacagtaatgagactgatagattaccaaggtgtgtcagatccacggctcgcctggccagagctctgtcgcccgcttttgagctgtcccagtggtctagtacagaatactccacttggactgagagccgatggaaagatatccgcgcaaggattttcctgatagcatctaaagaacttgagctgataaccctgacagtgggattcggaatcctgatttttagtcttattgtcacgtactgtatcaacgctaaggctgatgtcctgttcatagcaccaagggaacctggcgctgtgtcatattag

SEQ ID NO: 297645 - DNA, 918 bp, Artificial Sequence
  derived and/or modified sequence
atgctcaagcccattaacaccaccggtacccttaaaccggacgacagagtggtggtggcagcaactcgcctcgattccaggtcgtttttttggaacgtggctccaggagccgaatctgcagtcgcttccttcgtgacccaactggcagcagctgaggctctgcagaaggccccagatgttacaactttgcccaggaacgtcatgtttgttttctttcagggagttgctctgagaacgtctctcgaactgtggatgcacactgaccccgtgtctcagaaaaatgaatctgtgagaaaccaggtggaagacctgttggccacccttgaaaaatccggcgctggggttcccgctgtgatcctgcggagaccgaaccaaagccagcctctgcctccaagttccctgcagaggtttttgagggctcggaacatctctggggtcgtgttagctgatcattccggagcgtttcacaacaaatattatcagtcaatctatgacacagcggagaatataaacgtctcttatcccgagtggctaagcccggaggaggatctgaattttgtcaccgacacagccaaggccctcgctgacgtggccaccgttcttggcagagccctctatgagcttgcagggggaactaatttctctgataccgtgcaggccgatcctcaaaccgttacaagactgttatacgggttcctcatcaaggccaacaactcttggttccagagtattctccggcaggatctgagatcctacctcggtgacgggcctctccaacactacattgctgtttcttcacccactaatactacctatgtcgtccagtacgctctggccaatcttacaggaaccgtggtgaatctcacgagagaacagtgtcaggacccgtcaaaagttcctagtgagaacaaggactag

SEQ ID NO: 297646 - DNA, 963 bp, Artificial Sequence
  derived and/or modified sequence
tagggcttcggcgtgtatagcaactcctacgggcctgagttcgcgcactgcagagagatccagtggaatagcctgggaaacggcctggcttacgaagactttagtttcccaatcttcctgctggaggacgaaaatgagactaaggttatcaaacagttattttcccacatgcacgctgtcatctccacagccacatgtatgcgtcgcagttctatccagagtaccttcagcataaatccggaaatcgtgtgcgatcccctgagcgactataacgtgtggtccatgttgaagccaattaataccactggcaccctcaagcccgatgatcgtgttgtggtggctgcaactcggctggattcccggagctttttctggaacgtggccccaggagccgagtctgcggtcgccagcttcgtgacccaactggccgcagcggaagcactccagaaggcacctgacgtgaccacattacctcggaatgtgatgtttgtgtttttccagggagaaacctttgactatattggctctagccgcatggtgtatgatatggaaaagggcaagttccctgttcagcttgagaacgttgattcctttgtcgagctgggacaagtggctttgcgcacttccctggagctgtggatgcacacagatcccgtgtcgcagaagaatgaaagtgtgcgcaatcaagtggaggatctgctggctactctggagaaatccggagcaggcgtgcctgccgttatactcaggagaccgaatcagagtcagccccttccacccagctcgctgcagcgctttctgagggccaggaacattagcggagtcgtgctagctgaccattcaggcgctttccataacaagtattatcaaagcatttacgatacagccgaaaatatcaatgtctcgtacccggagtggctgtctcctgaagaagacctgaattttgtcaccgataccgcctag

SEQ ID NO: 297647 - DNA, 660 bp, Artificial Sequence
  derived and/or modified sequence
cgatcatccattcagagtactttctcaattaacccagagatcgtgtgcgaccccctgtccgactacaacgtatggtcaatgctcaagcccataaacaccactgggactctgaagccagacgatagagtcgtggtggccgcaacccgccttgccgcagccgaggcgcttcagaaggccccagatgtgacgacactgccccgtaatgttatgttcgttttttttcaaggtgagacatttgattatatcggttccagcaggatggtgtacgacatggaaaaaggcaaattcccagtgcaactggagaacgtggactcttttgtggagctggggcaggtcgcccttaggacctcactggaactatggatgcacacagacccagtgagccaaaagaacgagagtgtgcggaatcaggtggaagacctactcgcgaccctggagaaatcaggggctggcgtaccagccgttattctccggaggcctaaccagtcccagcctctccctccctcttcattacaacgcttcctcagggcacgcaatatatcaggggtagtgctcgccgatcactcaggagcctttcacaacaaatattaccaatccatctacgacacagcagagaacataaacgtatcttaccctgagtggctttctcctgaggaatag

SEQ ID NO: 297648 - DNA, 828 bp, Artificial Sequence
  derived and/or modified sequence
tagaacgttgcacctggggcagaatccgccgtggcctcttttgtgacccagctggctgccgctgaagctctgcaaaaggcccctgacgtgacgactctgccacgtaacgtcatgtttgtgtttttccaaggtgtggcactcagaacctcactggagctttggatgcatactgatcccgtatcccagaagaatgaatctgttcggaatcaggtcgaggatcttctcgccaccctggaaaagtcaggcgctggagtacccgctgtgattctcagacggcctaaccagagccagcctctcccgccaagctcgctgcagagattcctcagagcccgtaatatttcaggagtggttttggccgaccactccggagcctttcacaacaagtactaccagtctatctacgacacagccgagaatataaatgtcagctacccagagtggttgtccccggaggaagacctaaactttgtgacagacaccgctaaagctcttgccgacgttgctacagtgctcggaagagccctgtatgaactagcgggtggaactaacttttcagacacagtgcaagccgaccctcagacagtgacacgcctgctgtatggattcttgatcaaagccaacaatagctggtttcaatccatactccgtcaggatcttcggtcatatctaggagacggaccactgcagcactatatcgccgttagctccccgacaaataccacatatgtcgtgcagtatgcccttgccaacctgacgggtacggttgtaaaccttactagagagcagtgccaggacccatccaaggtgccatctgagaacaaagattag

SEQ ID NO: 297649 - DNA, 1356 bp, Artificial Sequence
  derived and/or modified sequence
atgctgaagcccatcaacaccaccggcaccctgaagcccgacgacagagtggtggtggccgccaccagactggacagcagaagcttcttctggaacgtggcccccggcgccgagagcgccgtggccagcttcgtgacccagctggccgccgccgaggccctgcagaaggcccccgacgtgaccaccctgcccagaaacgtgatgttcgtgttcttccagggcgagaccttcgactacatcggcagcagcagaatggtgtacgacatggagaagggcaagttccccgtgcagctggagaacgtggacagcttcgtggagctgggccaggtggccctgagaaccagcctggagctgtggatgcacaccgaccccgtgagccagaagaacgagagcgtgagaaaccaggtggaggacctgctggccaccctggagaagagcggcgccggcgtgcccgccgtgatcctgagaagacccaaccagagccagcccctgccccccagcagcctgcagagattcctgagagccagaaacatcagcggcgtggtgctggccgaccacagcggcgccttccacaacaagtactaccagagcatctacgacaccgccgagaacatcaacgtgagctaccccgagtggctgagccccgaggaggacctgaacttcgtgaccgacaccgccaaggccctggccgacgtggccaccgtgctgggcagagccctgtacgagctggccggcggcaccaacttcagcgacaccgtgcaggccgacccccagaccgtgaccagactgctgtacggcttcctgatcaaggccaacaacagctggttccagagcatcctgagacaggacctgagaagctacctgggcgacggccccctgcagcactacatcgccgtgagcagccccaccaacaccacctacgtggtgcagtacgccctggccaacctgaccggcaccgtggtgaacctgaccagagagcagtgccaggaccccagcaaggtgcccagcgagaacaaggacctgtacgagtacagctgggtgcagggccccctgcacagcaacgagaccgacagactgcccagatgcgtgagaagcaccgccagactggccagagccctgagccccgccttcgagctgagccagtggagcagcaccgagtacagcacctggaccgagagcagatggaaggacatcagagccagaatcttcctgatcgccagcaaggagctggagctgatcaccctgaccgtgggcttcggcatcctgatcttcagcctgatcgtgacctactgcatcaacgccaaggccgacgtgctgttcatcgcccccagagagcccggcgccgtgagctactag

SEQ ID NO: 297650 - DNA, 918 bp, Artificial Sequence
  derived and/or modified sequence
atgctgaagcccatcaacaccaccggcaccctgaagcccgacgacagagtggtggtggccgccaccagactggacagcagaagcttcttctggaacgtggcccccggcgccgagagcgccgtggccagcttcgtgacccagctggccgccgccgaggccctgcagaaggcccccgacgtgaccaccctgcccagaaacgtgatgttcgtgttcttccagggcgtggccctgagaaccagcctggagctgtggatgcacaccgaccccgtgagccagaagaacgagagcgtgagaaaccaggtggaggacctgctggccaccctggagaagagcggcgccggcgtgcccgccgtgatcctgagaagacccaaccagagccagcccctgccccccagcagcctgcagagattcctgagagccagaaacatcagcggcgtggtgctggccgaccacagcggcgccttccacaacaagtactaccagagcatctacgacaccgccgagaacatcaacgtgagctaccccgagtggctgagccccgaggaggacctgaacttcgtgaccgacaccgccaaggccctggccgacgtggccaccgtgctgggcagagccctgtacgagctggccggcggcaccaacttcagcgacaccgtgcaggccgacccccagaccgtgaccagactgctgtacggcttcctgatcaaggccaacaacagctggttccagagcatcctgagacaggacctgagaagctacctgggcgacggccccctgcagcactacatcgccgtgagcagccccaccaacaccacctacgtggtgcagtacgccctggccaacctgaccggcaccgtggtgaacctgaccagagagcagtgccaggaccccagcaaggtgcccagcgagaacaaggactag

SEQ ID NO: 297651 - DNA, 963 bp, Artificial Sequence
  derived and/or modified sequence
tgaggcttcggcgtgtacagcaacagctacggccccgagttcgcccactgcagagagatccagtggaacagcctgggcaacggcctggcctacgaggacttcagcttccccatcttcctgctggaggacgagaacgagaccaaggtgatcaagcagctgttcagccacatgcacgccgtgatcagcaccgccacctgcatgagaagaagcagcatccagagcaccttcagcatcaaccccgagatcgtgtgcgaccccctgagcgactacaacgtgtggagcatgctgaagcccatcaacaccaccggcaccctgaagcccgacgacagagtggtggtggccgccaccagactggacagcagaagcttcttctggaacgtggcccccggcgccgagagcgccgtggccagcttcgtgacccagctggccgccgccgaggccctgcagaaggcccccgacgtgaccaccctgcccagaaacgtgatgttcgtgttcttccagggcgagaccttcgactacatcggcagcagcagaatggtgtacgacatggagaagggcaagttccccgtgcagctggagaacgtggacagcttcgtggagctgggccaggtggccctgagaaccagcctggagctgtggatgcacaccgaccccgtgagccagaagaacgagagcgtgagaaaccaggtggaggacctgctggccaccctggagaagagcggcgccggcgtgcccgccgtgatcctgagaagacccaaccagagccagcccctgccccccagcagcctgcagagattcctgagagccagaaacatcagcggcgtggtgctggccgaccacagcggcgccttccacaacaagtactaccagagcatctacgacaccgccgagaacatcaacgtgagctaccccgagtggctgagccccgaggaggacctgaacttcgtgaccgacaccgcctag

SEQ ID NO: 297652 - DNA, 660 bp, Artificial Sequence
  derived and/or modified sequence
agaagcagcatccagagcaccttcagcatcaaccccgagatcgtgtgcgaccccctgagcgactacaacgtgtggagcatgctgaagcccatcaacaccaccggcaccctgaagcccgacgacagagtggtggtggccgccaccagactggccgccgccgaggccctgcagaaggcccccgacgtgaccaccctgcccagaaacgtgatgttcgtgttcttccagggcgagaccttcgactacatcggcagcagcagaatggtgtacgacatggagaagggcaagttccccgtgcagctggagaacgtggacagcttcgtggagctgggccaggtggccctgagaaccagcctggagctgtggatgcacaccgaccccgtgagccagaagaacgagagcgtgagaaaccaggtggaggacctgctggccaccctggagaagagcggcgccggcgtgcccgccgtgatcctgagaagacccaaccagagccagcccctgccccccagcagcctgcagagattcctgagagccagaaacatcagcggcgtggtgctggccgaccacagcggcgccttccacaacaagtactaccagagcatctacgacaccgccgagaacatcaacgtgagctaccccgagtggctgagccccgaggagtag

SEQ ID NO: 297653 - DNA, 828 bp, Artificial Sequence
  derived and/or modified sequence
tgaaacgtggcccccggcgccgagagcgccgtggccagcttcgtgacccagctggccgccgccgaggccctgcagaaggcccccgacgtgaccaccctgcccagaaacgtgatgttcgtgttcttccagggcgtggccctgagaaccagcctggagctgtggatgcacaccgaccccgtgagccagaagaacgagagcgtgagaaaccaggtggaggacctgctggccaccctggagaagagcggcgccggcgtgcccgccgtgatcctgagaagacccaaccagagccagcccctgccccccagcagcctgcagagattcctgagagccagaaacatcagcggcgtggtgctggccgaccacagcggcgccttccacaacaagtactaccagagcatctacgacaccgccgagaacatcaacgtgagctaccccgagtggctgagccccgaggaggacctgaacttcgtgaccgacaccgccaaggccctggccgacgtggccaccgtgctgggcagagccctgtacgagctggccggcggcaccaacttcagcgacaccgtgcaggccgacccccagaccgtgaccagactgctgtacggcttcctgatcaaggccaacaacagctggttccagagcatcctgagacaggacctgagaagctacctgggcgacggccccctgcagcactacatcgccgtgagcagccccaccaacaccacctacgtggtgcagtacgccctggccaacctgaccggcaccgtggtgaacctgaccagagagcagtgccaggaccccagcaaggtgcccagcgagaacaaggactag

SEQ ID NO: 297654 - protein, 42 aa, Artificial Sequence
  derived and/or modified sequence
EKDIDECASDPCVNGGLCQDLLNKFQCLCDVAFAGERCEVDY

SEQ ID NO: 297655 - DNA, 129 bp, Artificial Sequence
  derived and/or modified sequence
gagaaagatatcgatgaatgcgcaagtgacccctgcgtgaacggaggtctttgtcaagacctcctcaataaatttcagtgtctgtgcgatgtcgcctttgctggggaacgttgtgaagtagactattag

SEQ ID NO: 297656 - DNA, 129 bp, Artificial Sequence
  derived and/or modified sequence
gagaaggacattgatgaatgtgccagtgacccctgtgtgaatggaggcctgtgccaggacctgctgaacaagttccagtgcctgtgtgatgtggcctttgctggggagcgctgtgaggtggactactag

SEQ ID NO: 297657 - DNA, 129 bp, Artificial Sequence
  derived and/or modified sequence
gagaaggacatcgacgagtgcgccagcgacccctgcgtgaacggcggcttgtgccaggacctcctgaacaaattccagtgcttgtgcgatgttgccttcgcaggcgagaggtgcgaagtcgattactag

SEQ ID NO: 297658 - DNA, 129 bp, Artificial Sequence
  derived and/or modified sequence
gagaaagacatcgacgagtgcgccagtgacccttgcgtgaatggcggactttgccaggaccttctaaataaatttcagtgcctttgtgatgtggcattcgctggggagcgctgcgaggtggattattag

SEQ ID NO: 297659 - DNA, 129 bp, Artificial Sequence
  derived and/or modified sequence
gagaaggacatcgacgagtgcgccagcgacccctgcgtgaacggcggcctgtgccaggacctgctgaacaagttccagtgcctgtgcgacgtggccttcgccggcgagagatgcgaggtggactactag

SEQ ID NO: 297660 - protein, 293 aa, Artificial Sequence
  derived and/or modified sequence
MPLCWSKPCHNNATCEDSVDNYTCHCWPGYTGAQCEIDLNECNSNPCQSNGECVELSSEKQYGRITGLPSSFSYHEASGYVCICQPGFTGIHCEEDVNECSSNPCQNGGTCENLPGNYTCHCPFDNLSRTFYGGRDCSDILLGCTHQQCLNNGTCIPHFQDGQHGFSCLCPSGYTGSLCEIATTLSFEGDGFLWVKSGSVTTKGSVCNIALRFQTVQPMALLLFRSNRDVFVKLELLSGYIHLSIQVNNQSKVLLFISHNTSDGEWHFVEAVSKTLKLIGITLPWRTSRLAHH

SEQ ID NO: 297661 - DNA, 2826 bp, Artificial Sequence
  derived and/or modified sequence
atgatccggaactctctctgtcagccatcccgctgtcttgacgggtatttgtttttcaataggaaaatgttcggcgctcgcacccacggttttcacatcctgatggccatgctcatcggtatccactgtgaagaggacgtgaacgaatgcagcagcaatccctgtcagaatggaggcacatgcgaaaacctcccggggaattacacatgccactgtcctttcgacaatcttagtcgaaccttttacgggggcagggattgctcagatatactcctgggctgcacccaccaacaatgcctaaataatgggacgtgcatcccccactttcaagatggccagcacgggtttagctgcctctgccctagcggttacactggcagtctgtgcgagatcgcaactactctcagttttgaaggggatgggttcctctgggtcaagtcaggaagcgttaccaccaagggaagcgtttgtaacatcgcgctgcggttccaaacagtgcagccgatggccctcttgctttttcgctccaacagagacgtttttgtgaagctggagctactctccggatatatccatctgtctattcaggttaataaccagagtaaggttcttctgtttatttcacacaacactagcgacggagagtggcactttgttgaggttatctttgcagaagctgtcactctgactttgatagatgatagctgcaaggaaaaatgtatcgctaaggctccaacccccttagaatctgaccagagcatctgcgcctttcagaactctttcctcggaggattgcctgttggcatgacctctaatggggtggcactgctgaacttttacaatatgccaagcacaccgtctttcgtgggatgcctgcaggacatcaagattgactggaatcatatcactttggaaaatatctcctctggctccagtcttaacgttaaagctgggtgtgtccggaaggactggtgcgagtcacagccctgtcagtcacggggacgctgcatcaacctgtggttaagctatcagtgcgattgccatagaccttacgaaggccccaattgcctgagggaatatgttgcaggacgattcggacaggacgacagcaccgggtacgtaatttttactttggacgaaagctacggcgacacaatctcactgagcatgttcgtgaggacactccagccaagtggcctcttactggccttagaaaattctacatatcagtacattagagtttggctagaacggggacggcttgcaatgttgacaccgaattcaccaaagcttgttgtcaagtttgtgctgaacgatgggaacgtgcatctgatttccctcaagatcaagccctataagatcgaactgtaccagagcagtcagaacctgggattcatctccgcatccacctggaaaatagaaaaaggtgacgtcatctacatcggcggtctgcccgataagcaggaaaccgaattgaacgggggcttcttcaagggctgtatccaggatgtgaggctgaacaatcagaacctggagttttttcccaacccaaccaataacgcttctcttaatccggtgctcgtgaatgtcacacagggctgcgccggagataacagctgcaaatcaaatccctgccacaacggcggggtctgtcatagtcgctgggacgatttttcctgttcctgtcctgccctgacaagcggaaaagcttgtgaggaggtccagtggtgcggattctcgccgtgtccgcatggcgctcaatgccagccggtcttgcaggggtttgagtgcatcgctaatgccgtgtttaacgggcagtctggacagattctatttcgctccaatggaaacattacgcgtgaactcacaaacatcacttttggtttccgcactagagatgcaaatgtcatcatcctgcacgccgaaaaggagcccgagttcttgaacattagcatccaggacagtagattgttctttcagttgcaaagtgggaatagtttctacatgttgtcgctgacctccctgcagtcggtaaatgatggcacttggcacgaggtgacactgtccatgactgaccccttgtctcaaacgagtaggtggcaaatggaggtggataacgagactccattcgtgacaagtaccatcgcgaccggctctctgaacttcctgaaagacaataccgacatctatgttggggacagggcaatcgacaacatcaagggtttacagggatgcctgagcacaattgagataggcggcatctatctatcgtactttgaaaatgtgcatggcttcattaataagcctcaggaagagcagttcttaaagatctctaccaactccgtggtaactgggtgcttgcagctaaacgtgtgcaatagcaacccatgccttcacggagggaactgcgaagatatttacagttcgtaccactgtagttgccctcttgggtggtccggaaagcactgcgaactgaacatcgacgagtgcttctccaatccctgtatccacgggaactgctcagatagggtggctgcatatcactgcacatgcgagccgggctacaccggcgtgaactgcgaggtcgatatcgataactgccagtctcatcagtgcgccaacggcgctacatgcatctcccataccaatgggtacagctgcctgtgcttcggtaacttcaccggaaaattctgtaggcagagtcgtctccctagtacagtgtgtggcaatgagaagacaaacctgacttgttacaacggcgggaattgcaccgagttccagactgagttgaagtgcatgtgtcggcctgggttcacaggtgagtag

SEQ ID NO: 297662 - DNA, 2826 bp, Artificial Sequence
  derived and/or modified sequence
atgatccggaacagcctgtgccagcccagccgctgcctggatggctacctgttcttcaacaggaagatgtttggagcccggacccacggcttccacatcctgatggccatgctgattggcatccactgtgaagaagatgtgaatgaatgtagcagcaacccctgccagaatggaggcacctgtgagaacctgcccggcaactacacctgccactgcccctttgacaacctgagcaggaccttctacggcggccgggactgcagcgacatcctgctgggctgcacccaccagcagtgcctgaacaacggcacctgcatcccccacttccaggacggccagcacggcttcagctgcctgtgccccagcggctacacaggcagcctgtgtgaaattgccaccaccctgagctttgaaggagatggcttcctgtgggtgaagagcggctctgtgaccaccaagggctctgtgtgcaacatcgccctgcgcttccagacagtgcagcccatggccctgctgctcttccgcagcaacagagatgtgtttgtgaagctggagctgctgagcggctacatccacctgagcatccaggtgaacaaccagagcaaggtgctgctcttcatcagccacaacaccagtgatggagagtggcactttgtggaggtgatctttgctgaggccgtgaccctgaccctgattgatgacagctgcaaggagaagtgcatcgccaaggcccccacccccctggagagtgaccagagcatctgtgccttccagaacagcttcctgggcggcctgcctgtgggcatgaccagcaatggagtggccctgctgaacttctacaacatgcccagcacccccagctttgtgggctgcctgcaggacatcaagattgactggaaccacatcaccctggagaacatcagcagcggcagcagcctgaatgtgaaggccggctgtgtgaggaaggactggtgtgagagccagccctgccagagccggggccgctgcatcaacctgtggctgagctaccagtgtgactgccaccggccctatgagggccccaactgcctgcgggagtatgtggccggccgcttcggccaggatgacagcacaggctacgtgatcttcaccctggatgagagctatggagacaccatcagcctgtccatgtttgtgaggaccctgcagcccagcggcctgctgctggccctggagaacagcacctaccagtacatccgggtgtggctggagcggggccgcctggccatgctgacccccaacagccccaagctggtggtgaagtttgtgctgaatgatggaaatgtgcacctgatcagcctgaagatcaagccctacaagattgagctgtaccagagcagccagaacctgggcttcatcagcgccagcacctggaagattgaaaaaggagatgtgatctacatcggcggcctgcctgacaagcaggagacagagctgaatggaggcttcttcaagggctgcatccaggatgtgcggctgaacaaccagaacctggagttcttccccaaccccaccaacaatgccagcctgaaccctgtgctggtgaatgtgacccagggctgtgccggggacaacagctgcaagagcaacccctgccacaatggaggagtgtgccacagccgctgggatgacttcagctgcagctgcccagccctgaccagcggcaaggcctgtgaggaggtgcagtggtgtggcttcagcccctgcccccacggggcccagtgccagcctgtgctgcagggctttgagtgcatcgccaatgctgtgttcaacggccagagcggccagatcctcttccgcagcaatggaaacatcacccgggagctgaccaacatcaccttcggcttccgcaccagagatgccaacgtcatcatcctgcatgctgagaaggagcctgagttcctgaacatcagcatccaggacagccgcctcttcttccagctgcagagcggcaacagcttctacatgctgagcctgaccagcctgcagagcgtgaatgatggcacctggcatgaggtgaccctgtccatgacagaccccctgagccagaccagccgctggcagatggaggtggacaatgagaccccatttgtgaccagcaccatcgccaccggcagcctgaacttcctgaaggacaacacagacatctacgtgggggaccgggccatcgacaacatcaagggcctgcagggctgcctgagcaccattgaaattggaggcatctacctgagctactttgaaaatgtgcacggcttcatcaacaagccccaggaggagcagttcctgaagatcagcaccaacagcgtggtgacaggctgcctgcagctgaatgtgtgcaacagcaacccctgcctgcatggaggcaactgtgaggacatctacagcagctaccactgcagctgccccctgggctggagcggcaagcactgtgagctgaacattgatgagtgcttcagcaacccctgcatccacggcaactgcagcgacagagtggccgcctaccactgcacctgtgagcccggctacacaggagtgaactgtgaggtggacatcgacaactgccagagccaccagtgtgccaacggggccacctgcatcagccacaccaacggctacagctgcctgtgcttcggcaacttcaccgggaagttctgccggcagagccggctgcccagcacagtgtgtggaaatgagaagaccaacctgacctgctacaatggaggcaactgcacagagttccagacagagctgaagtgcatgtgccggcccggcttcaccggggagtag

SEQ ID NO: 297663 - DNA, 2826 bp, Artificial Sequence
  derived and/or modified sequence
atgatccggaacagcctgtgccagcccagccggtgcctggacggctacctcttttttaatcggaagatgttcggcgcccgcacccatggtttccacattttgatggcaatgctgatcggcatccattgtgaagaagacgtgaacgagtgctcaagcaatccatgccagaatggcggcacatgcgaaaatctcccaggtaactacacttgccactgtcccttcgacaatctgtctagaacgttttacggcggcagagattgttctgacattttgctgggatgtacccaccagcagtgtctgaacaacggtacctgcattccgcattttcaggatgggcaacacggtttcagctgcctctgtccctccggatatactggttcgttgtgcgagattgctactacattgagcttcgaaggcgatggattcctttgggtgaaatccggatctgtgaccacgaaggggagtgtgtgtaacattgcccttcgttttcaaacagtgcaacctatggctttgctgctattccgttctaacagagacgtatttgtcaaacttgaattactgagcggatatattcacctaagtatacaggtgaacaaccagtccaaggtgttgctgttcatctcccataatacgtctgacggagagtggcatttcgtcgaagtgatattcgctgaagcagtcaccctcactctgattgacgattcctgcaaggagaagtgcattgcaaaagctcctacgccccttgaatccgaccagtcaatatgcgctttccagaattcctttttgggcggattgcctgtgggcatgaccagcaatggcgtggcattgctgaacttctataatatgccttctactccaagcttcgtgggttgtctgcaagatatcaagattgattggaatcacatcacgctagaaaacatttcttcaggtagttccctgaacgttaaggcaggctgtgtccgcaaggattggtgtgagagccagccatgtcagtcccgcggtcgatgcattaacttgtggctgagttatcaatgcgactgtcacaggccgtacgaaggacctaactgtctgagagaatatgtagcaggacgatttgggcaagacgacagcacaggctacgttatctttaccttagacgagagctatggagacaccatctccctaagtatgttcgtcagaactcttcagccatcgggcctgttgctcgctttagagaattctacttaccagtacatccgggtttggttagagaggggtaggctggcaatgctcacaccaaacagccctaaactggtggtgaagtttgtgcttaacgacggaaatgtacatctgatcagcctgaaaatcaagccctacaagattgagctgtaccagagcagtcagaacctcgggtttatatccgctagcacctggaagattgagaaaggggacgtgatctacatcggcggactgcctgataaacaggagaccgaacttaacggcggcttcttcaaagggtgcatccaagacgtgagacttaacaaccagaacctggaattttttccaaaccctaccaataacgccagcctgaacccagtcctggttaatgtaacacagggttgcgccggcgacaattcatgtaagtcgaatccgtgtcacaatggaggggtatgccactcccgctgggatgacttttcctgtagctgcccagcacttaccagcggaaaagcctgcgaagaggtgcagtggtgcggtttttccccttgtccacatggcgcacaatgccagccagtgctgcaggggttcgaatgtattgctaacgctgtcttcaacggacaatctggacagatcctgtttaggtctaacgggaatatcactcgggagcttaccaacatcactttcggctttcggaccagggatgcaaatgttatcatactccatgccgaaaaggaacccgagttcctgaatatctccattcaggactctaggctttttttccagctgcagtctgggaattccttttacatgctgtctctgacaagtttgcagagtgtcaatgacggcacttggcatgaagtgacgctctccatgactgatcctctgtcacaaacatccaggtggcagatggaggtggataatgagacgccctttgtgactagtaccatcgctacggggagcttaaactttctcaaggataataccgacatctatgtgggggaccgagccattgacaatatcaaaggcttgcagggttgcttgagcacaatcgagatcggcggaatctatctatcttatttcgagaacgtgcacgggtttattaataagcctcaggaggagcagttcctgaagataagtacaaactctgtggtgaccggctgcctgcagctcaacgtttgcaacagcaacccatgcctgcatggaggcaattgcgaggatatttacagctcctaccattgtagctgcccactggggtggagcggaaaacattgtgaattaaacatcgacgagtgcttctccaatccgtgtatccacggtaactgctccgatcgagtggccgcttaccattgcacctgcgaacccggctacaccggtgtcaactgtgaggtcgatattgacaattgccagtcccaccagtgtgcgaacggcgcgacatgcatttctcacactaacggttactcttgtttatgctttggaaatttcacggggaagttctgccggcagagcagactcccttctaccgtatgtggcaacgagaagactaacttgacttgttacaatggcggaaactgtacagaattccagactgaactcaagtgtatgtgccgtcccggcttcaccggcgaatag

SEQ ID NO: 297664 - DNA, 2826 bp, Artificial Sequence
  derived and/or modified sequence
atgattcgtaatagtttgtgccaaccaagcaggtgtctggatggctatctcttcttcaatagaaagatgtttggcgcacgcacccatggcttccatatactgatggcaatgctcattggtatccactgcgaagaggatgtgaacgagtgtagctccaacccttgccagaacggtggcacgtgtgagaatcttccaggcaattatacctgccactgtcctttcgataacctgagtagaactttctacgggggacgcgactgcagcgatattttactgggttgcacccaccagcagtgccttaacaacggaacctgcataccacacttccaggacggtcaacacggtttttcatgtctgtgcccaagtggctacaccgggagcctctgcgagattgctactaccctatcctttgaaggcgacggctttctttgggtaaaatcagggtctgtgacaacgaaaggctctgtgtgtaatatcgccctgcgtttccagacagttcagccaatggctttactcctattccgaagcaaccgcgatgtatttgttaagctggaattgctttcggggtatatacatctctcgattcaggtgaacaaccagagcaaagttctgctgttcatctctcacaacacttctgacggcgagtggcattttgtggaggttatctttgcagaggccgttaccctcactctgattgatgacagctgcaaagaaaaatgtatcgccaaagctccaactccacttgaaagcgaccagtctatctgcgccttccagaacagtttcttgggtggcttacctgtgggaatgacctctaatggcgtggcactgctcaatttttacaacatgccttccactccctcgttcgtgggctgcctgcaagatataaagatcgattggaaccatatcactctggagaacatcagcagcggctctagcctgaatgtgaaggcgggatgcgtgaggaaggactggtgtgagtctcaaccttgccagtctagaggcaggtgtattaacctgtggctgagttaccagtgcgattgtcaccggccttatgaaggtcccaattgcctcagggagtacgttgccggtcgatttgggcaagatgacagcactggatatgtcatctttactctagatgagagttacggagacaccatatccctgtctatgttcgtgaggacactgcagccctcagggcttctgctggccctagaaaattccacctaccaatatattcgggtgtggctggaacgcggaaggcttgcaatgctgacgccaaattccccaaagttggtcgttaagtttgtattgaacgacggcaatgtgcatctcattagtcttaaaatcaaaccatataagatcgagctttaccagagttcccaaaaccttggctttattagtgccagcacctggaagattgagaagggggacgttatttatataggaggcctgcctgataagcaggaaaccgagctaaatgggggatttttcaagggatgtatccaggatgtaagactcaataaccagaacttagaattcttccctaatccgacgaacaatgcctccctcaaccccgttctcgtgaatgtgacccagggttgcgccggagataatagttgtaaatcaaacccctgtcacaatggcggagtgtgccattctcggtgggacgatttttcgtgcagctgccctgctctcacttcaggtaaggcgtgcgaggaggtgcaatggtgcggcttctccccttgtccgcacggcgctcagtgtcaacctgtgttacagggtttcgagtgtatagctaatgcagtcttcaacgggcagagtggacagatactgtttcgttccaacggcaacattacccgtgagctgacgaatattacttttgggttcaggaccagggatgctaacgttataatcttgcatgcggagaaagagccagaatttctgaacatatctattcaggattcaaggctcttttttcagctgcagtcagggaatagtttctacatgcttagcctaactagtctgcagtccgtgaacgacggcacttggcatgaggtaacccttagcatgacagaccccctgagccagactagccgatggcaaatggaagttgataacgaaaccccattcgtgacttccactatcgccaccggtagtctaaattttcttaaggacaatacagacatctatgttggagatcgggcaatcgataacattaagggcttgcaaggctgtctttcgacaatcgagataggcggtatctatctgtcttactttgagaacgtgcatgggttcatcaacaagccccaggaagaacagttcttgaaaatatccacaaatagtgtggtcactggctgcttgcagctgaacgtttgcaattcaaatccatgcctgcacggcggaaactgcgaagacatatacagcagttaccactgctcatgccctttgggttggtctggcaaacactgtgaactcaacatagatgagtgtttcagcaacccctgtatccacggtaattgtagcgacagggtcgcagcgtaccactgcacatgcgaacccggttacaccggagtgaactgcgaggtcgacatcgacaactgccaatctcaccagtgcgccaacggggctacctgtattagccatacaaacggttatagctgcctttgcttcggcaactttacaggcaagttttgtaggcagagcaggctgccatcgactgtttgtggtaacgagaaaactaacttaacatgctataacggcggaaattgcacggaattccagaccgagttgaagtgcatgtgtaggcccggatttacaggcgagtag

SEQ ID NO: 297665 - DNA, 9023 bp, Artificial Sequence
  derived and/or modified sequence
gcgagaaagaggtgacattgaagaacaagcccacacttctggatatggtccaaaatgatcagaaactcactctgtcaacctagtaggtgtttggatggatacctcttttttaacagaaagatgtttggagccaggacacatggttttcacattttaatggcaatgctcataggaatccactgcgaagaagacgtcaatgaatgttcttcaaacccttgccaaaatggtggtacttgtgagaacttgcctgggaattatacttgccattgcccatttgataacctttctagaactttttatggaggaagggactgttctgatattctcctgggctgtacccatcagcaatgtctaaataatggaacatgcatccctcacttccaagatggccagcatggattcagctgcctatgtccatctggctacaccgggtccctgtgtgaaatcgcaaccacactttcatttgagggcgatggcttcctgtgggtcaaaagtggctcagtgacaaccaagggctcagtttgtaacatagccctcaggtttcagactgttcagccaatggctcttctacttttccgaagcaacagggatgtgtttgtgaagctggagctgctaagtggctacattcacttatcaattcaggtcaataatcagtcaaaggtgcttctgttcatttcccacaacaccagcgatggagagtggcatttcgtggaggtaatatttgcagaggctgtgacccttaccttaatcgacgactcctgtaaggagaaatgcatcgcgaaagctcctactccacttgaaagtgatcaatcaatatgtgcttttcagaactcctttttgggtggtttaccagtgggaatgaccagcaatggtgttgctctgcttaacttctataatatgccatccacaccttcgtttgtaggctgtctccaagacattaaaattgattggaatcacattaccctggagaacatctcgtctggctcatcattaaatgtcaaggcaggctgtgtgagaaaggattggtgtgaaagccaaccttgtcaaagcagaggacgctgcatcaacttgtggctgagttaccagtgtgactgccacaggccctatgaaggccccaactgtctgagagagtatgtggcaggcagatttggccaggatgactccactggttatgtcatctttactcttgatgagagctatggagacaccatcagcctctccatgtttgtccgaacgcttcaaccatcaggcttacttctagctttggaaaacagcacttatcaatatatccgtgtctggctagagcgcggcagactagcaatgctgactccaaactctcccaaattagtagtaaaatttgttcttaatgatggaaatgtccacttgatatctttgaaaatcaagccatataaaattgaactgtatcagtcttcacaaaacctaggatttatttctgcttctacgtggaaaatcgaaaagggagatgtcatctacattggtggcctacctgacaagcaagagactgaacttaatggtggattcttcaaaggctgtatccaagatgtaagactaaacaaccaaaatctggaattctttccaaatccaacaaacaatgcatctctcaatccagttcttgtcaatgtaacccaaggctgtgctggagacaacagctgcaagtccaacccctgtcacaatggaggtgtttgccattcccggtgggatgacttctcctgttcctgtcctgccctcacaagtgggaaagcctgtgaggaggttcagtggtgtggattcagcccgtgtcctcacggagcccagtgccagccggtgcttcaaggatttgaatgtattgcaaatgctgtttttaatggacaaagcggtcaaatattattcagaagcaatgggaatattaccagagaactcaccaatatcacatttggtttcagaacaagggatgcaaatgtaataatattgcatgcagaaaaagagcctgaatttcttaatattagcattcaagattccagattattctttcaattgcaaagtggcaacagcttttatatgctaagtctgacaagtttgcagtcagtgaatgatggcacatggcacgaagtgaccctttccatgacagacccactgtcccagacctccaggtggcaaatggaagtggacaacgaaacaccttttgtgaccagcacaattgctactggaagcctcaactttttgaaggataatacagatatttatgtgggagacagagctattgacaatataaagggcctgcaagggtgtctaagtacaatagaaatcggaggcatttatctctcttactttgaaaatgttcatggtttcattaataaacctcaggaagagcaatttctcaaaatctctaccaattcagtggtcactggctgtttgcagttaaatgtctgcaactccaacccctgtttgcatggaggaaactgtgaagacatctatagctcttatcattgctcctgtcccttgggatggtcagggaaacactgtgaactcaacatcgatgaatgcttttcaaacccctgtatccatggcaactgctctgacagagttgcagcctaccactgcacatgtgagcctggatacactggtgtgaactgtgaagtggatatagacaactgccagagtcaccagtgtgcaaatggagccacctgcattagtcatactaatggctattcttgcctctgttttggaaattttacaggaaaattttgcagacagagcagattaccctcaacagtctgtgggaatgagaagacaaatctcacttgctacaatggaggcaactgcacagagttccagactgaattaaaatgtatgtgccggccaggttttactggagaatggtgagtcacattagagccttctggaagagaattctgagctaaagaatgatgggattactcaaagttcattttctcctctaattttttatctcagttcccataggaaaatctatgctgaaatagaggttcagacagaatgaaacaataaaaaagaagaaaaactacagtttaggtcaaaggggagaacattttattagacaaaacttcaaatagggaaaaatgatttttaaaaaatgtataatgtgctatttttctttcttataagtacttctgaattcatgtctcttttttgttgctaactctaatacatgatgcaaatatggttgctgtcgaggtaaaataaattacaactaaaagattgcctcatagaattgcctacaacccaaaagtatatataccttatccatatgagtctacttttcccagagaaactcttcaactgttcttcacctcatacaggaattcttaaaatggagttggtcaatggcttcaggcaatctgtgacctgctgaaaatacaggaaaattagaatatgtatttgagtggctaggggtaagttcaggggtagaaataatgcatactgaatagcttttatcagctgcttaaagggatttatgtccccaaaacagttatgaactggggctctatagaatacagatactatataagcagataattgttaaccttttgttttagcactgtgccatgcaccttacaaataccatctctaattcttatagctctgtaaagaaggtttcatgatttttattttgcatatgtgtaaactgaggctgagaggttgagtgacgtataaagggcctatccacacgtttgctgcagtaaggttgagctgccttcaaagcctctgctcttctatttgatgtgccagcataactgtatgaataaatctttgctcaacacaatttctttttttttaatgagaaaggtgttcttccatctcatgtatcatcgagggtaagataagtgatctctgatcaaacttcctacattgaaaaaattaaataaactgagctcagacatatttgacaaagatattttgactgactcaatatttcccataagcatagttaataaaataatggatatgtgagtgctccctggcaagtgccctttggattaattggaattttctgttttctagctggcctcttttgcatcacaaagacacaggtcttttgccatttttacaaaacagcggggagtctagggtatacctgaatttgacccttttaacgttcattttcatttgcagcctgccttctgtggttggttctttgtggtacaggcattccaagtctatatgtgcatgaaaggagatagccttgagtcacattctgctttctgttgcaccaattttggttctgcaacttattaactgagatcgtttagttgtattccaattccatgtatctttcaaaatattgcaaatattttcttgtcattaattttgagtaatccaactattgtcaagggtgggttgcttcctggttgaacgtcacactttctgcctaatggcacaatgcatggaactcatccaaaaccctggattatttttctctgccactcacacattgtttctatttacaacaaatatctccctgtcttctgatatttattagtttacaaaatttatatttgacatttaaattcagatatatttgaaatatagaaagaaaagaaagcttagagttttccttcttttcccaggagacttttcaactggaaaaacttacatgatgctagatatttctaaaacattgaacctgtgttcagtagattctatgctttcaaagtccttaaccatcattacttaattgactagatgttaatggatttatttttacttttcatgcattaattaacctctaataaaaatgccaatgatgctgataatacatgtgtatctattgttgactgtttagttcaacagagaaataggtgagaaagtgatggagtagttagaggaagacagaaaatagtgggctatctcccatggcctagggaaatgtgacttccatcacatccaaggatattgaaaagctatcctcaaataaattggcttctctcctgccttggttaaaccttcagcttaatagtgtcatcctggcaggttttgaatgatggatggtgtgaacactctggcccacccaagaccgagaatgcttggcaggctcctgagggttgtcaagttttgctcagatctaatcagagaagtctccctccagtccagaagcataagccaaaaaaggaaaacaaaatgtctcagctatgcttggtatccaaagggataaggagctgtttttcttggaagaaatctttgttttcctttataccttgggctggccttgccccactacctcaccccctttcattttgagcctagtgattagtctctgacccatacgtgcaagttttacattttggaaggtgagggaaagaataagggaaaattaaaaattgtttacatacaatttcaacattataagctgcactatagagatcttggagctaagattttatataaattttcaaaagtaaaatagccgccttagttgctgttctatcccaaggtcttagcagagtgtttgtcacatagtatgtgttaaataaatatccactgtgtgactgaatacatgattggtgacttaatccatgaatatacagaaaaacaaattcttgctggaaaattagtttaaaaaaatgacaatatcccaggaagaagaaaacttcaatttacctgagacttgatgtcacttgtcttggaaaatttggcttttgaaagtcattctacctcaacatttcagaaattatgcttggctattggaacacagatttattagcaagtacaatcttctaattattgatttttgcttttgttataaaaaaaggatttccacagaaaataattcaaaatctctcagaataaacctctcctcttcctcctcctcctccttccctccttcttttttttttttttttttttttttggtttctctttggtgggctttttccttagcctgagggctctgatgcatgaggatcctgatagcctgaatgtaggtctgccctgcagactccagatggcaaaatacagcctctctccttgtgcccctaataaactgaacatttatataaggtggcaaccacactaatgctcttgagcattgacactggtgtaggcatggcccacttttctcttggtttctaaatatttgcatctattttctcattctaattaattccgtgtgtatatgtatatatatgtgtacagattatttccattaaaccccaaatgtgttaaagaaattttaagaaacatctccgacattatcaagtatgtataaagtatgtgtggatgggtagataagactgtgctgttccagagagataaggcaaactttttcttcccatttcacaaccaatgtattcaacagggacctgggtttctgctgttctgtttattttgaaggtgtgaaaaggacattgatgagtgtgcctctgatccgtgtgtcaatggaggtctgtgccaggacttactcaacaaattccagtgcctctgtgatgttgcctttgctggcgagcgctgcgaggtggacgtaagcagcctctccttttatgtctctctcttattctggcagaatctttttcagcttctttcttacctcattttgcgtatgaatgacgagccagttgttgagtggggtgaacaggaagattattaacatacatttgaacattcccaaatgaaaaaaaaagccattgaatttcaagaaatgccttgattcattttagatctctggggaagaaaaaggaaataaaaaccatctcaataattaaggtaaattcaaggcttattttaaacatatcagaagcactttgtctgtgtataaaatattttcctattctaactttaaatatgaaaaaagtgttcttaatataactagaaatatctccttattgtgtgtatttagtacaaacatattatcattctcaacacttctatatgtgaatgaccactgcaatttcttcccactccatttctgggtattttcacattttaagttgccctccatcactatgattctattttcatttctgttctttcattcttatctattatttatgacacaaaaattgagaattacaggccaggtgtggtggttcactcctataatcccagcactatgggaggctgaagtgggcggaacacctgaggccaggagtttgagaccagcctagccaacgtggtgaaaacctgtctctactaaaaatacaaaagtaactgggagtggtggcacatgcctgtaatcccagctactcaggagggtgaagcaggagacttgcttgaacccaggaggcggccgttgcaatgagccaagattgtgccactgcactccagcctgggcgacaggtgagattctgtctaaaaaaaaaaaaaaaaaaagagagaattaccgattaaaattactgattatattcatctatgtttttacatgaagctattcaaatgaattgttacgttttctctgatatatgattaaatatataaagagaaatcaggaatttacatcgagtccctaaattgtagaaaaacaattatctagtatcagtactcaaattatacctccctggtataatttctgattccataaaactgtctctctaacaaagttacaaataatcctttctctatttcctttcctgcaatactttcccttttcctaacaaatagaacaatttttctgttgtttctaaatttatgagctccttgacttttctatcaaatggactaatttcagttgcttttcaatgaatatttaataaaaataagcactgtagtttatacataaatttaaaagtatatattgtaaaacttgaattttcttagaagcatggttttctaagatttgcaagtaaatttattttcttaagtatctttcagaaaaaaatatgaaagcatagtatacatcataaccaaaatatatttgacattatgattttttaaaataaatgtatacctgaaataatggatctataaagtatactaagatatgcaaaaattaatatattctttattataaatatttcagagattataaaataataatttaaaaaaactttcttaatgtttttattgtttccaccagtacgttatcatttatgctaaatatctttgtgtagatatacccttccaaagaagacgttatttgtgttcatttaaaggaaaaatagtttgatcctatgaattaattcagaaagcaactaaaataacaatggcctgccaaatgtcattttgtaaatatacgtctatgactttaggagctgtcctggtttgaaaacatgaggacagtttatccattggatgccatctatttagtcccaattaagaaagttgtttttttgtgagaatgaccaaggtaaatttaaatataccattcaaacaaacaaggacaaaataatatccttgttatagagtacatgtagcatatagtatgaagtaatatactacaaaagcaaagaaagtgtattctatcttgcaatagtaatagacaatttttatatagcaaattcatatcctttggagtagtgacaatcatttcaaactgggagcaactaattgtgaagattttccttcttactcatccattttcttcacatccaaggctgaacgtgtgatgctgctgcttcagatgatttgttccaaagttaaattttgtgacaaaagacatggggaaaaccttcccatcaatatttacattcacaagtatttgcaataagcataaaatagattatagccagaccatatgtatagttttcacatttactcccttctagacatacctgtacttatgtacttacaggctgttccaaatgtaatatgttctctaccaaatgtggttaagaaatattcactcacaatttctttctgtgtacaattctgatgcctctgttgtcactgtaattgtcagttgcttttctgttttccaaatgtcttcttgtcataaggtatctgactttaaaaaatgttttcccttttctttttattcttctgtattttccagctgcatgtgtgtgactatggcttttacatatttgcacagaaaaataaaacctttgtttctg

SEQ ID NO: 297666 - DNA, 3743 bp, Artificial Sequence
  derived and/or modified sequence
atgatcagaaactcactctgtcaacctagtaggtgtttggatggatacctcttttttaacagaaagatgtttggagccaggacacatggttttcacattttaatggcaatgctcataggaatccactgcgaagaagacgtcaatgaatgttcttcaaacccttgccaaaatggtggtacttgtgagaacttgcctgggaattatacttgccattgcccatttgataacctttctagaactttttatggaggaagggactgttctgatattctcctgggctgtacccatcagcaatgtctaaataatggaacatgcatccctcacttccaagatggccagcatggattcagctgcctatgtccatctggctacaccgggtccctgtgtgaaatcgcaaccacactttcatttgagggcgatggcttcctgtgggtcaaaagtggctcagtgacaaccaagggctcagtttgtaacatagccctcaggtttcagactgttcagccaatggctcttctacttttccgaagcaacagggatgtgtttgtgaagctggagctgctaagtggctacattcacttatcaattcaggtcaataatcagtcaaaggtgcttctgttcatttcccacaacaccagcgatggagagtggcatttcgtggaggtaatatttgcagaggctgtgacccttaccttaatcgacgactcctgtaaggagaaatgcatcgcgaaagctcctactccacttgaaagtgatcaatcaatatgtgcttttcagaactcctttttgggtggtttaccagtgggaatgaccagcaatggtgttgctctgcttaacttctataatatgccatccacaccttcgtttgtaggctgtctccaagacattaaaattgattggaatcacattaccctggagaacatctcgtctggctcatcattaaatgtcaaggcaggctgtgtgagaaaggattggtgtgaaagccaaccttgtcaaagcagaggacgctgcatcaacttgtggctgagttaccagtgtgactgccacaggccctatgaaggccccaactgtctgagagagtatgtggcaggcagatttggccaggatgactccactggttatgtcatctttactcttgatgagagctatggagacaccatcagcctctccatgtttgtccgaacgcttcaaccatcaggcttacttctagctttggaaaacagcacttatcaatatatccgtgtctggctagagcgcggcagactagcaatgctgactccaaactctcccaaattagtagtaaaatttgttcttaatgatggaaatgtccacttgatatctttgaaaatcaagccatataaaattgaactgtatcagtcttcacaaaacctaggatttatttctgcttctacgtggaaaatcgaaaagggagatgtcatctacattggtggcctacctgacaagcaagagactgaacttaatggtggattcttcaaaggctgtatccaagatgtaagactaaacaaccaaaatctggaattctttccaaatccaacaaacaatgcatctctcaatccagttcttgtcaatgtaacccaaggctgtgctggagacaacagctgcaagtccaacccctgtcacaatggaggtgtttgccattcccggtgggatgacttctcctgttcctgtcctgccctcacaagtgggaaagcctgtgaggaggttcagtggtgtggattcagcccgtgtcctcacggagcccagtgccagccggtgcttcaaggatttgaatgtattgcaaatgctgtttttaatggacaaagcggtcaaatattattcagaagcaatgggaatattaccagagaactcaccaatatcacatttggtttcagaacaagggatgcaaatgtaataatattgcatgcagaaaaagagcctgaatttcttaatattagcattcaagattccagattattctttcaattgcaaagtggcaacagcttttatatgctaagtctgacaagtttgcagtcagtgaatgatggcacatggcacgaagtgaccctttccatgacagacccactgtcccagacctccaggtggcaaatggaagtggacaacgaaacaccttttgtgaccagcacaattgctactggaagcctcaactttttgaaggataatacagatatttatgtgggagacagagctattgacaatataaagggcctgcaagggtgtctaagtacaatagaaatcggaggcatttatctctcttactttgaaaatgttcatggtttcattaataaacctcaggaagagcaatttctcaaaatctctaccaattcagtggtcactggctgtttgcagttaaatgtctgcaactccaacccctgtttgcatggaggaaactgtgaagacatctatagctcttatcattgctcctgtcccttgggatggtcagggaaacactgtgaactcaacatcgatgaatgcttttcaaacccctgtatccatggcaactgctctgacagagttgcagcctaccactgcacatgtgagcctggatacactggtgtgaactgtgaagtggatatagacaactgccagagtcaccagtgtgcaaatggagccacctgcattagtcatactaatggctattcttgcctctgttttggaaattttacaggaaaattttgcagacagagcagattaccctcaacagtctgtgggaatgagaagacaaatctcacttgctacaatggaggcaactgcacagagttccagactgaattaaaatgtatgtgccggccaggttttactggagaatggtgtgaaaaggacattgatgagtgtgcctctgatccgtgtgtcaatggaggtctgtgccaggacttactcaacaaattccagtgcctctgtgatgttgcctttgctggcgagcgctgcgaggtggacttggcagatgacttgatctccgacattttcaccactattggctcagtgactgtcgccttgttactgatcctcttgctggccattgttgcttctgttgtcacctccaacaaaagggcaactcagggaacctacagccccagccgtcaggagaaggagggctcccgagtggaaatgtggaacttgatgccaccccctgcaatggagagactgatttaggagcattgtgtcccttcgagatggggatccacacactgtgaatgtgatgactgtacttcaggtatctctgacatacctgacaatgttaatctgcaactgggattacactggaactacaggaatgattcctttgaccaccttaaaaactttcacagtggttccgctcgacaccattgttttattatattatatcagccaattgcaaaaaaagtctgtgccagtaatttcagccttataattagcaaaaacatcttccagagaataaagtcttctgtggctttagtggctatcactgaaactctttcctcttttcaacctgggaacaaattttagttttcattttaggtttctgtactttctgtagtttctgtgtaaactgccatatgtttacatggaaactacaggaaaaaattggctacatttctcacttctcctatcatgtggtcaaagttattgttgtataccagcgatgggatgtatacttttgtccttcattcatggattcagagaaagctctgggaatgacttatggtccaaaaaagtgacccaatggcaacaaataaaaattgaaatgc

SEQ ID NO: 297667 - DNA, 3474 bp, Artificial Sequence
  derived and/or modified sequence
actgctgtaactttcttctgcggggagggcaaaaggttcttctgctgcagcatgaaatggttgcatgctgccaactgccccgcatctgctgaaaggaggccctgctgtttatggggactgcttatggggtcaccacatagctgaccttgctctgtctcttctctatgaatccactgcgaagaagacgtcaatgaatgttcttcaaacccttgccaaaatggtggtacttgtgagaacttgcctgggaattatacttgccattgcccatttgataacctttctagaactttttatggaggaagggactgttctgatattctcctgggctgtacccatcagcaatgtctaaataatggaacatgcatccctcacttccaagatggccagcatggattcagctgcctatgtccatctggctacaccgggtccctgtgtgaaatcgcaaccacactttcatttgagggcgatggcttcctgtgggtcaaaagtggctcagtgacaaccaagggctcagtttgtaacatagccctcaggtttcagactgttcagccaatggctcttctacttttccgaagcaacagggatgtgtttgtgaagctggagctgctaagtggctacattcacttatcaattcaggtcaataatcagtcaaaggtgcttctgttcatttcccacaacaccagcgatggagagtggcatttcgtggaggtaatatttgcagaggctgtgacccttaccttaatcgacgactcctgtaaggagaaatgcatcgcgaaagctcctactccacttgaaagtgatcaatcaatatgtgcttttcagaactcctttttgggtggtttaccagtgggaatgaccagcaatggtgttgctctgcttaacttctataatatgccatccacaccttcgtttgtaggctgtctccaagacattaaaattgattggaatcacattaccctggagaacatctcgtctggctcatcattaaatgtcaaggcaggctgtgtgagaaaggattggtgtgaaagccaaccttgtcaaagcagaggacgctgcatcaacttgtggctgagttaccagtgtgactgccacaggccctatgaaggccccaactgtctgagagagtatgtggcaggcagatttggccaggatgactccactggttatgtcatctttactcttgatgagagctatggagacaccatcagcctctccatgtttgtccgaacgcttcaaccatcaggcttacttctagctttggaaaacagcacttatcaatatatccgtgtctggctagagcgcggcagactagcaatgctgactccaaactctcccaaattagtagtaaaatttgttcttaatgatggaaatgtccacttgatatctttgaaaatcaagccatataaaattgaactgtatcagtcttcacaaaacctaggatttatttctgcttctacgtggaaaatcgaaaagggagatgtcatctacattggtggcctacctgacaagcaagagactgaacttaatggtggattcttcaaaggctgtatccaagatgtaagactaaacaaccaaaatctggaattctttccaaatccaacaaacaatgcatctctcaatccagttcttgtcaatgtaacccaaggctgtgctggagacaacagctgcaagtccaacccctgtcacaatggaggtgtttgccattcccggtgggatgacttctcctgttcctgtcctgccctcacaagtgggaaagcctgtgaggaggttcagtggtgtggattcagcccgtgtcctcacggagcccagtgccagccggtgcttcaaggatttgaatgtattgcaaatgctgtttttaatggacaaagcggtcaaatattattcagaagcaatgggaatattaccagagaactcaccaatatcacatttggtttcagaacaagggatgcaaatgtaataatattgcatgcagaaaaagagcctgaatttcttaatattagcattcaagattccagattattctttcaattgcaaagtggcaacagcttttatatgctaagtctgacaagtttgcagtcagtgaatgatggcacatggcacgaagtgaccctttccatgacagacccactgtcccagacctccaggtggcaaatggaagtggacaacgaaacaccttttgtgaccagcacaattgctactggaagcctcaactttttgaaggataatacagatatttatgtgggagacagagctattgacaatataaagggcctgcaagggtgtctaagtacaatagaaatcggaggcatttatctctcttactttgaaaatgttcatggtttcattaataaacctcaggaagagcaatttctcaaaatctctaccaattcagtggtcactggctgtttgcagttaaatgtctgcaactccaacccctgtttgcatggaggaaactgtgaagacatctatagctcttatcattgctcctgtcccttgggatggtcagggaaacactgtgaactcaacatcgatgaatgcttttcaaacccctgtatccatggcaactgctctgacagagttgcagcctaccactgcacatgtgagcctggatacactggtgtgaactgtgaagtggatatagacaactgccagagtcaccagtgtgcaaatggagccacctgcattagtcatactaatggctattcttgcctctgttttggaaattttacaggaaaattttgcagacagagcagattaccctcaacagtctgtgggaatgagaagacaaatctcacttgctacaatggaggcaactgcacagagttccagactgaattaaaatgtatgtgccggccaggttttactggagaatggtgtgaaaaggacattgatgagtgtgcctctgatccgtgtgtcaatggaggtctgtgccaggacttactcaacaaattccagtgcctctgtgatgttgcctttgctggcgagcgctgcgaggtggacttggcagatgacttgatctccgacattttcaccactattggctcagtgactgtcgccttgttactgatcctcttgctggccattgttgcttctgttgtcacctccaacaaaagggcaactcagggaacctacagccccagccgtcaggagaaggagggctcccgagtggaaatgtggaacttgatgccaccccctgcaatggagagactgatttaggagcattgtgtcccttcgagatggggatccacacactgtgaatgtgatgactgtacttcaggtatctctgacatacctgacaatgttaatctgcaactgggattacactggaactacaggaatgattcctttgaccaccttaaaaactttcacagtggttccgctcgacaccattgttttattatattatatcagccaattgcaaaaaaagtctgtgccagtaatttcagccttataattagcaaaaacatcttccag

SEQ ID NO: 297668 - DNA, 2826 bp, Artificial Sequence
  derived and/or modified sequence
atgatcagaaacagcctgtgccagcccagcagatgcctggacggctacctgttcttcaacagaaagatgttcggcgccagaacccacggcttccacatcctgatggccatgctgatcggcatccactgcgaggaggacgtgaacgagtgcagcagcaacccctgccagaacggcggcacctgcgagaacctgcccggcaactacacctgccactgccccttcgacaacctgagcagaaccttctacggcggcagagactgcagcgacatcctgctgggctgcacccaccagcagtgcctgaacaacggcacctgcatcccccacttccaggacggccagcacggcttcagctgcctgtgccccagcggctacaccggcagcctgtgcgagatcgccaccaccctgagcttcgagggcgacggcttcctgtgggtgaagagcggcagcgtgaccaccaagggcagcgtgtgcaacatcgccctgagattccagaccgtgcagcccatggccctgctgctgttcagaagcaacagagacgtgttcgtgaagctggagctgctgagcggctacatccacctgagcatccaggtgaacaaccagagcaaggtgctgctgttcatcagccacaacaccagcgacggcgagtggcacttcgtggaggtgatcttcgccgaggccgtgaccctgaccctgatcgacgacagctgcaaggagaagtgcatcgccaaggcccccacccccctggagagcgaccagagcatctgcgccttccagaacagcttcctgggcggcctgcccgtgggcatgaccagcaacggcgtggccctgctgaacttctacaacatgcccagcacccccagcttcgtgggctgcctgcaggacatcaagatcgactggaaccacatcaccctggagaacatcagcagcggcagcagcctgaacgtgaaggccggctgcgtgagaaaggactggtgcgagagccagccctgccagagcagaggcagatgcatcaacctgtggctgagctaccagtgcgactgccacagaccctacgagggccccaactgcctgagagagtacgtggccggcagattcggccaggacgacagcaccggctacgtgatcttcaccctggacgagagctacggcgacaccatcagcctgagcatgttcgtgagaaccctgcagcccagcggcctgctgctggccctggagaacagcacctaccagtacatcagagtgtggctggagagaggcagactggccatgctgacccccaacagccccaagctggtggtgaagttcgtgctgaacgacggcaacgtgcacctgatcagcctgaagatcaagccctacaagatcgagctgtaccagagcagccagaacctgggcttcatcagcgccagcacctggaagatcgagaagggcgacgtgatctacatcggcggcctgcccgacaagcaggagaccgagctgaacggcggcttcttcaagggctgcatccaggacgtgagactgaacaaccagaacctggagttcttccccaaccccaccaacaacgccagcctgaaccccgtgctggtgaacgtgacccagggctgcgccggcgacaacagctgcaagagcaacccctgccacaacggcggcgtgtgccacagcagatgggacgacttcagctgcagctgccccgccctgaccagcggcaaggcctgcgaggaggtgcagtggtgcggcttcagcccctgcccccacggcgcccagtgccagcccgtgctgcagggcttcgagtgcatcgccaacgccgtgttcaacggccagagcggccagatcctgttcagaagcaacggcaacatcaccagagagctgaccaacatcaccttcggcttcagaaccagagacgccaacgtgatcatcctgcacgccgagaaggagcccgagttcctgaacatcagcatccaggacagcagactgttcttccagctgcagagcggcaacagcttctacatgctgagcctgaccagcctgcagagcgtgaacgacggcacctggcacgaggtgaccctgagcatgaccgaccccctgagccagaccagcagatggcagatggaggtggacaacgagacccccttcgtgaccagcaccatcgccaccggcagcctgaacttcctgaaggacaacaccgacatctacgtgggcgacagagccatcgacaacatcaagggcctgcagggctgcctgagcaccatcgagatcggcggcatctacctgagctacttcgagaacgtgcacggcttcatcaacaagccccaggaggagcagttcctgaagatcagcaccaacagcgtggtgaccggctgcctgcagctgaacgtgtgcaacagcaacccctgcctgcacggcggcaactgcgaggacatctacagcagctaccactgcagctgccccctgggctggagcggcaagcactgcgagctgaacatcgacgagtgcttcagcaacccctgcatccacggcaactgcagcgacagagtggccgcctaccactgcacctgcgagcccggctacaccggcgtgaactgcgaggtggacatcgacaactgccagagccaccagtgcgccaacggcgccacctgcatcagccacaccaacggctacagctgcctgtgcttcggcaacttcaccggcaagttctgcagacagagcagactgcccagcaccgtgtgcggcaacgagaagaccaacctgacctgctacaacggcggcaactgcaccgagttccagaccgagctgaagtgcatgtgcagacccggcttcaccggcgagtag

SEQ ID NO: 297669 - protein, 674 aa, Artificial Sequence
  derived and/or modified sequence
MTSNGVALLNFYNMPSTPSFVGCLQDIKIDWNHITLENISSGSSLNVKAGCVRKDWCESQPCQSRGRCINLWLSYQCDCHRPYEGPNCLREYVAGRFGQDDSTGYVIFTLDESYGDTISLSMFVRTLQPSGLLLALENSTYQYIRVWLERGRLAMLTPNSPKLVVKFVLNDGNVHLISLKIKPYKIELYQSSQNLGFISASTWKIEKGDVIYIGGLPDKQETELNGGFFKGCIQDVRLNNQNLEFFPNPTNNASLNPVLVNVTQGCAGDNSCKSNPCHNGGVCHSRWDDFSCSCPALTSGKACEEVQWCGFSPCPHGAQCQPVLQGFECIANAVFNGQSGQILFRSNGNITRELTNITFGFRTRDANVIILHAEKEPEFLNISIQDSRLFFQLQSGNSFYMLSLTSLQSVNDGTWHEVTLSMTDPLSQTSRWQMEVDNETPFVTSTIATGSLNFLKDNTDIYVGDRAIDNIKGLQGCLSTIEIGGIYLSYFENVHGFINKPQEEQFLKISTNSVVTGCLQLNVCNSNPCLHGGNCEDIYSSYHCSCPLGWSGKHCELNIDECFSNPCIHGNCSDRVAAYHCTCEPGYTGVNCEVDIDNCQSHQCANGATCISHTNGYSCLCFGNFTGKFCRQSRLPSTVCGNEKTNLTCYNGGNCTEFQTELKCMCRPGFTGEW

SEQ ID NO: 297670 - protein, 887 aa, Artificial Sequence
  derived and/or modified sequence
MALLLFRSNRDVFVKLELLSGYIHLSIQVNNQSKVLLFISHNTSDGEWHFVEVIFAEAVTLTLIDDSCKEKCIAKAPTPLESDQSICAFQNSFLGGLPVGMTSNGVALLNFYNMPSTPSFVGCLQDIKIDWNHITLENISSGSSLNVKAGCVRKDWCESQPCQSRGRCINLWLSYQCDCHRPYEGPNCLREYVAGRFGQDDSTGYVIFTLDESYGDTISLSMFVRTLQPSGLLLALENSTYQYIRVWLERGRLAMLTPNSPKLVVKFVLNDGNVHLISLKIKPYKIELYQSSQNLGFISASTWKIEKGDVIYIGGLPDKQETELNGGFFKGCIQDVRLNNQNLEFFPNPTNNASLNPVLVNVTQGCAGDNSCKSNPCHNGGVCHSRWDDFSCSCPALTSGKACEEVQWCGFSPCPHGAQCQPVLQGFECIANAVFNGQSGQILFRSNGNITRELTNITFGFRTRDANVIILHAEKEPEFLNISIQDSRLFFQLQSGNSFYMLSLTSLQSVNDGTWHEVTLSMTDPLSQTSRWQMEVDNETPFVTSTIATGSLNFLKDNTDIYVGDRAIDNIKGLQGCLSTIEIGGIYLSYFENVHGFINKPQEEQFLKISTNSVVTGCLQLNVCNSNPCLHGGNCEDIYSSYHCSCPLGWSGKHCELNIDECFSNPCIHGNCSDRVAAYHCTCEPGYTGVNCEVDIDNCQSHQCANGATCISHTNGYSCLCFGNFTGKFCRQSRLPSTVCGNEKTNLTCYNGGNCTEFQTELKCMCRPGFTGEWCEKDIDECASDPCVNGGLCQDLLNKFQCLCDVAFAGERCEVDLADDLISDIFTTIGSVTVALLLILLLAIVASVVTSNKRATQGTYSPSRQEKEGSRVEMWNLMPPPAMERLI

SEQ ID NO: 297671 - DNA, 2025 bp, Artificial Sequence
  derived and/or modified sequence
atgaccagcaacggggtggccttgttaaatttttacaatatgccgagtaccccgtcttttgtggggtgccttcaggacattaaaatagattggaaccacatcacactcgagaatatctctagcggctcgagcttgaacgttaaggcaggatgtgtgagaaaggattggtgcgagagtcaaccttgtcaaagcaggggccgctgcatcaacctttggctgagctatcagtgcgactgccaccggccctatgagggcccaaattgtttacgggaatacgtggctggaagatttgggcaagacgactccaccggatacgtcatatttaccctggacgagtcctacggtgatacaatctctttgtcaatgtttgtccgcacattgcaaccttcaggcctgttattagcactggagaattcaacttaccagtacattcgggtgtggctggagagaggacggctagcgatgctgacacctaacagccccaagttagtggttaagttcgtcctgaacgacggtaacgttcacctgatatccctcaagattaagccatacaagatcgagctgtatcagtctagccaaaatctcgggtttatatctgcctcgacatggaaaattgagaaaggggatgtgatttacattggaggcttgccagataagcaagagaccgaactgaatggggggtttttcaagggatgcatccaggacgtgaggctcaacaaccaaaacttggagttttttccaaaccctaccaacaacgccagcctcaatccagttctagtgaatgtgacccaagggtgtgcaggcgataacagttgcaagagtaacccttgccataacggtggtgtgtgtcatagccgatgggacgatttttcttgcagttgtcctgctctgacttccggaaaggcatgtgaggaagtgcagtggtgcgggttctcgccttgcccgcatggtgctcagtgccagcccgtactccagggctttgagtgtatcgccaatgccgtctttaatggccagtccggtcagatcctctttcggtcaaatggtaacataacccgggagttgaccaatattactttcggatttagaactagagatgctaatgtgataatcctgcatgctgaaaaggaacccgagttcttaaacatctctattcaggactctcggctctttttccagttgcagagcgggaattctttttacatgctcagcctaacatcactccagtctgtcaacgatggaacctggcatgaagtgacgttgtcaatgactgaccccctttcacaaacctctcgctggcaaatggaagtagacaacgagacaccctttgttaccagtactattgccacggggtccctcaacttcctgaaggacaacaccgacatttatgtcggcgatcgggcaatcgataacatcaaaggcctgcaaggatgcctttctaccatcgaaataggtggcatttatctctcctactttgaaaatgtccacggcttcattaacaagccccaagaggaacagttcctaaagattagcactaacagtgttgttacagggtgtctacagctgaatgtctgcaacagcaatccatgccttcatggggggaactgcgaggatatttattctagttaccattgctcttgtcctcttgggtggagtggaaagcattgtgagttgaacatagatgagtgcttctccaatccgtgtatccacggcaattgctcagaccgagtggcggcataccattgtacttgcgaacctggctacacaggggtgaattgtgaggtagatattgataattgccagagccatcagtgcgccaatggagctacctgcatttcacatacaaacggttacagctgtctgtgcttcggcaatttcaccggtaagttttgccgccagagcagacttccatccacagtctgcgggaacgaaaaaaccaacttgacgtgctacaacggaggcaattgtacagaatttcagactgagttgaaatgtatgtgtcggccagggtttacaggagagtggtag

SEQ ID NO: 297672 - DNA, 2664 bp, Artificial Sequence
  derived and/or modified sequence
atggctctgcttcttttccgctcgaaccgcgacgtgtttgtgaagctcgaactgctttctggctatattcatctgtcaatccaggttaataatcaatctaaagtgcttctcttcattagtcacaataccagtgacggagagtggcattttgtagaagtgatcttcgcagaggcagtgaccttgaccctcattgatgactcctgtaaagagaaatgcattgcaaaagcaccaacaccattggagagcgaccagtccatctgcgcttttcaaaactcctttctgggtgggctacctgtgggcatgacctcgaacggcgtggccctactgaatttctacaatatgccctctacacctagtttcgtaggctgtctgcaggacatcaagatcgattggaaccacataaccctcgaaaatatcagctccggatcatcattgaatgttaaagctggttgcgtacggaaagactggtgtgagtcacaaccatgtcaaagccgtggtagatgtatcaatctgtggctgtcctaccagtgcgattgccatagaccttatgaggggcctaattgcctgagggagtacgttgccggtcgcttcggacaggatgattcaacaggatatgttatctttacactggacgaatcctacggcgataccatttcactctccatgtttgttcggaccctgcagccaagtgggctgctcctagctcttgaaaattccacttaccagtatatcagggtgtggcttgagcgaggacggctcgctatgctcacccctaacagtcctaagctggtcgtgaaattcgtactcaatgatgggaacgtacacttgattagtctgaagatcaagccctataagattgagttgtaccagtctagccagaatctaggcttcattagtgcgagtacatggaaaatcgaaaaaggggatgtgatctacattggggggctacccgataaacaggagaccgaattgaatggcggcttttttaagggctgcattcaggatgtgcgcctcaataaccagaacttagagtttttcccaaaccctacaaacaatgcttccttgaaccctgtactggtgaatgttacgcagggttgcgccggcgacaattcatgtaaaagcaatccatgccacaacgggggagtttgccactctagatgggacgactttagctgctcctgccccgcactgacctccgggaaggcttgcgaggaggtgcagtggtgcggtttcagcccctgccctcatggagctcagtgccagccagttttacagggctttgagtgcatcgcaaatgcagtttttaatggccagtccggtcagatcctgttcaggtctaacggaaacataacccgcgagttgaccaacattacattcggttttcgtacccgagacgccaacgttattattctgcatgctgagaaagaacccgagttcctgaatattagcatccaggacagcagacttttttttcagcttcagtcaggcaacagcttttatatgctctccttaacatcactccagtccgtcaacgatggtacttggcacgaagttactttatccatgacagatcctctgtcccagacttcccgctggcagatggaagtggataatgagaccccctttgtgacatccacaattgcaacaggcagcctgaactttctgaaagataacaccgatatctacgtcggcgacagagccattgataacatcaaggggttgcaggggtgcctgtccactatagagatagggggcatctacttgtcatacttcgagaatgtgcatggtttcatcaataaaccacaggaggaacagttcctgaaaatatccactaattcagtcgtgaccggctgcctgcagctgaacgtgtgcaatagcaacccttgtctgcacggcggtaactgcgaggatatctattcgtcctaccattgttcatgccccctggggtggagcggcaagcactgcgagctgaatattgacgagtgtttctccaatccctgcattcatggcaattgttctgatagggtggccgcttatcactgcacctgcgagcctggctacaccggggtcaattgtgaagtggacatcgataattgtcaatctcatcaatgcgctaacggtgccacatgtattagccatacaaacggctattcctgtctctgctttggtaattttaccgggaaattctgtagacaatccagactgccgagcaccgtgtgcggtaatgagaagaccaacctcacctgctataacggtggcaattgcactgaatttcagaccgaactgaaatgtatgtgccgaccaggattcacgggggaatggtgcgagaaggatattgatgagtgcgcctccgacccgtgcgttaacgggggcttgtgtcaggacttgctgaacaagttccagtgcttatgcgacgtagccttcgccggtgaacgatgcgaggtggacctcgctgatgacctgattagcgacatctttacgactatcggtagcgtgaccgtcgcactgctgttgatcctgctgctggcgatcgtcgctagcgtggttaccagcaataaacgcgcaacacagggcacgtatagtccctccagacaggagaaggaaggttctagggtggagatgtggaacctcatgcccccgcctgccatggaacgactaatttag

SEQ ID NO: 297673 - DNA, 2025 bp, Artificial Sequence
  derived and/or modified sequence
atgaccagcaatggagtggccctgctgaacttctacaacatgcccagcacccccagctttgtgggctgcctgcaggacatcaagattgactggaaccacatcaccctggagaacatcagcagcggcagcagcctgaatgtgaaggccggctgtgtgaggaaggactggtgtgagagccagccctgccagagccggggccgctgcatcaacctgtggctgagctaccagtgtgactgccaccggccctatgagggccccaactgcctgcgggagtatgtggccggccgcttcggccaggatgacagcacaggctacgtgatcttcaccctggatgagagctatggagacaccatcagcctgtccatgtttgtgaggaccctgcagcccagcggcctgctgctggccctggagaacagcacctaccagtacatccgggtgtggctggagcggggccgcctggccatgctgacccccaacagccccaagctggtggtgaagtttgtgctgaatgatggaaatgtgcacctgatcagcctgaagatcaagccctacaagattgagctgtaccagagcagccagaacctgggcttcatcagcgccagcacctggaagattgaaaaaggagatgtgatctacatcggcggcctgcctgacaagcaggagacagagctgaatggaggcttcttcaagggctgcatccaggatgtgcggctgaacaaccagaacctggagttcttccccaaccccaccaacaatgccagcctgaaccctgtgctggtgaatgtgacccagggctgtgccggggacaacagctgcaagagcaacccctgccacaatggaggagtgtgccacagccgctgggatgacttcagctgcagctgcccagccctgaccagcggcaaggcctgtgaggaggtgcagtggtgtggcttcagcccctgcccccacggggcccagtgccagcctgtgctgcagggctttgagtgcatcgccaatgctgtgttcaacggccagagcggccagatcctcttccgcagcaatggaaacatcacccgggagctgaccaacatcaccttcggcttccgcaccagagatgccaacgtcatcatcctgcatgctgagaaggagcctgagttcctgaacatcagcatccaggacagccgcctcttcttccagctgcagagcggcaacagcttctacatgctgagcctgaccagcctgcagagcgtgaatgatggcacctggcatgaggtgaccctgtccatgacagaccccctgagccagaccagccgctggcagatggaggtggacaatgagaccccatttgtgaccagcaccatcgccaccggcagcctgaacttcctgaaggacaacacagacatctacgtgggggaccgggccatcgacaacatcaagggcctgcagggctgcctgagcaccattgaaattggaggcatctacctgagctactttgaaaatgtgcacggcttcatcaacaagccccaggaggagcagttcctgaagatcagcaccaacagcgtggtgacaggctgcctgcagctgaatgtgtgcaacagcaacccctgcctgcatggaggcaactgtgaggacatctacagcagctaccactgcagctgccccctgggctggagcggcaagcactgtgagctgaacattgatgagtgcttcagcaacccctgcatccacggcaactgcagcgacagagtggccgcctaccactgcacctgtgagcccggctacacaggagtgaactgtgaggtggacatcgacaactgccagagccaccagtgtgccaacggggccacctgcatcagccacaccaacggctacagctgcctgtgcttcggcaacttcaccgggaagttctgccggcagagccggctgcccagcacagtgtgtggaaatgagaagaccaacctgacctgctacaatggaggcaactgcacagagttccagacagagctgaagtgcatgtgccggcccggcttcaccggggagtggtag

SEQ ID NO: 297674 - DNA, 2664 bp, Artificial Sequence
  derived and/or modified sequence
atggccctgctgctcttccgcagcaacagagatgtgtttgtgaagctggagctgctgagcggctacatccacctgagcatccaggtgaacaaccagagcaaggtgctgctcttcatcagccacaacaccagtgatggagagtggcactttgtggaggtgatctttgctgaggccgtgaccctgaccctgattgatgacagctgcaaggagaagtgcatcgccaaggcccccacccccctggagagtgaccagagcatctgtgccttccagaacagcttcctgggcggcctgcctgtgggcatgaccagcaatggagtggccctgctgaacttctacaacatgcccagcacccccagctttgtgggctgcctgcaggacatcaagattgactggaaccacatcaccctggagaacatcagcagcggcagcagcctgaatgtgaaggccggctgtgtgaggaaggactggtgtgagagccagccctgccagagccggggccgctgcatcaacctgtggctgagctaccagtgtgactgccaccggccctatgagggccccaactgcctgcgggagtatgtggccggccgcttcggccaggatgacagcacaggctacgtgatcttcaccctggatgagagctatggagacaccatcagcctgtccatgtttgtgaggaccctgcagcccagcggcctgctgctggccctggagaacagcacctaccagtacatccgggtgtggctggagcggggccgcctggccatgctgacccccaacagccccaagctggtggtgaagtttgtgctgaatgatggaaatgtgcacctgatcagcctgaagatcaagccctacaagattgagctgtaccagagcagccagaacctgggcttcatcagcgccagcacctggaagattgaaaaaggagatgtgatctacatcggcggcctgcctgacaagcaggagacagagctgaatggaggcttcttcaagggctgcatccaggatgtgcggctgaacaaccagaacctggagttcttccccaaccccaccaacaatgccagcctgaaccctgtgctggtgaatgtgacccagggctgtgccggggacaacagctgcaagagcaacccctgccacaatggaggagtgtgccacagccgctgggatgacttcagctgcagctgcccagccctgaccagcggcaaggcctgtgaggaggtgcagtggtgtggcttcagcccctgcccccacggggcccagtgccagcctgtgctgcagggctttgagtgcatcgccaatgctgtgttcaacggccagagcggccagatcctcttccgcagcaatggaaacatcacccgggagctgaccaacatcaccttcggcttccgcaccagagatgccaacgtcatcatcctgcatgctgagaaggagcctgagttcctgaacatcagcatccaggacagccgcctcttcttccagctgcagagcggcaacagcttctacatgctgagcctgaccagcctgcagagcgtgaatgatggcacctggcatgaggtgaccctgtccatgacagaccccctgagccagaccagccgctggcagatggaggtggacaatgagaccccatttgtgaccagcaccatcgccaccggcagcctgaacttcctgaaggacaacacagacatctacgtgggggaccgggccatcgacaacatcaagggcctgcagggctgcctgagcaccattgaaattggaggcatctacctgagctactttgaaaatgtgcacggcttcatcaacaagccccaggaggagcagttcctgaagatcagcaccaacagcgtggtgacaggctgcctgcagctgaatgtgtgcaacagcaacccctgcctgcatggaggcaactgtgaggacatctacagcagctaccactgcagctgccccctgggctggagcggcaagcactgtgagctgaacattgatgagtgcttcagcaacccctgcatccacggcaactgcagcgacagagtggccgcctaccactgcacctgtgagcccggctacacaggagtgaactgtgaggtggacatcgacaactgccagagccaccagtgtgccaacggggccacctgcatcagccacaccaacggctacagctgcctgtgcttcggcaacttcaccgggaagttctgccggcagagccggctgcccagcacagtgtgtggaaatgagaagaccaacctgacctgctacaatggaggcaactgcacagagttccagacagagctgaagtgcatgtgccggcccggcttcaccggggagtggtgtgagaaggacattgatgaatgtgccagtgacccctgtgtgaatggaggcctgtgccaggacctgctgaacaagttccagtgcctgtgtgatgtggcctttgctggggagcgctgtgaggtggacctggctgatgacctgatcagtgacatcttcaccaccatcggctctgtgacagtggccctgctgctgatcctgctgctggccatcgtggcctctgtggtgaccagcaacaagagggccacccagggcacctacagccccagccggcaggagaaggagggcagccgggtggagatgtggaacctgatgcctcctccagccatggagcggctcatctag

SEQ ID NO: 297675 - DNA, 2025 bp, Artificial Sequence
  derived and/or modified sequence
atgaccagcaacggcgtggccctgctgaacttctacaacatgcccagcaccccatcttttgtggggtgtctgcaggacataaaaatagattggaatcacattaccttagagaatatttcatctggatcctcgctgaatgtgaaagcaggctgcgtgcgaaaagattggtgcgagagccagccttgccagtctcgcggccgctgcattaatctatggctttcataccaatgtgattgtcatcgtccttatgagggtcccaactgcttaagggagtacgtggccggacggtttggccaggatgacagcacaggctacgtgatctttacgctggatgagtcctatggagacaccatctctctctccatgttcgtgcgcacattgcagccttcgggtctgttactggctctggaaaactccacgtatcagtacatccgggtttggcttgaaagaggtaggctggctatgttgacgcccaattcaccgaaacttgtggtcaagtttgttctgaatgatgggaacgtgcacctgatcagtctgaagatcaaaccttataagattgagctgtaccagtcttcccagaacctcggctttatctccgcttcaacatggaagattgaaaagggagacgtcatttacatcggcggactaccagacaagcaggagacagaattaaacggaggcttctttaagggatgcatacaggatgttcgcctgaacaatcaaaacctggaattcttccccaatcccacgaataacgcatccctgaatcctgtactagttaatgtgactcagggctgtgcaggcgacaacagctgcaagagtaacccttgccataacggcggcgtctgccacagtagatgggacgacttcagttgttcttgtccagccttaaccagcggcaaggcttgcgaagaagttcaatggtgtggtttttcaccctgcccacatggagcccagtgccagcccgtgctacaagggtttgagtgtatcgccaacgctgtgtttaacggccagtcgggacagatccttttcagaagtaatggaaacatcacaagagagctcaccaacattacatttggcttcaggactcgtgatgccaatgtgattattctgcatgcggagaaggagcctgaattcttaaatatatccatacaagatagccgcctgtttttccagttgcagtcgggtaattctttctatatgctttctctaacgtctctgcagagtgtaaacgacggcacgtggcacgaggtgactttgtctatgacagatccgctgtcacagacatccaggtggcagatggaggtagataacgaaacacctttcgtgaccagcaccattgctaccggctcactcaatttcctgaaagacaatacggacatctacgtaggagatagggccattgacaacatcaaagggcttcagggatgcttgtctacgatcgagataggaggcatatacctctcttactttgaaaacgtgcacggctttattaacaaaccgcaggaggagcaatttctgaagattagtaccaacagcgttgtgaccggttgtctccagcttaatgtgtgcaactccaacccttgcttgcatggaggaaactgcgaagacatttactctagctatcattgtagctgtcccttagggtggagtgggaagcattgcgagttgaacattgatgaatgtttctcaaacccctgtatacatggcaattgttccgaccgggtggctgcctaccactgtacctgcgagcccggttacacaggcgttaactgcgaagtggatatagataactgtcagtcacatcaatgtgctaacggtgccacatgcatcagccatactaatggttacagttgcttgtgctttgggaacttcacgggcaaattctgtagacagagccgtctccccagcacggtgtgtggtaatgagaagactaacctaacgtgctataacggaggaaattgcacagagttccagacagagttgaaatgtatgtgtcgccccggttttactggagagtggtag

SEQ ID NO: 297676 - DNA, 2664 bp, Artificial Sequence
  derived and/or modified sequence
atggccctgctgctgttccggagcaaccgggacgtgttcgtgaagctcgagctgctgtcagggtacattcatctgagtatccaggtgaataaccagtcaaaggtgctgctctttatcagccataacactagtgacggcgagtggcacttcgtggaagtgatttttgcagaagctgtgacacttaccctgatcgatgattcttgtaaggaaaaatgtatcgccaaggctccaacaccactggagtccgatcagtctatttgcgcctttcagaactcattcctgggtgggcttcctgtaggaatgacctctaatggagttgccttactcaatttctataacatgccttctacaccttcctttgtcggatgtctccaagatattaagattgattggaatcatattacactggagaacattagcagtggctcctcgttgaacgtcaaagctggttgtgtcaggaaagactggtgtgagagccagccatgccaaagccgggggagatgcatcaatttatggttaagctatcaatgcgattgtcataggccctacgaggggccaaactgtctgagagaatacgtggctggacgatttgggcaggacgattcaactggatatgtgatctttaccttggacgagtcttatggcgataccatttctttgagtatgttcgtccgcaccctgcagcccagtggtctcctccttgcccttgaaaacagtacataccaatatatccgcgtctggttggaaaggggacggctcgccatgctaacccccaacagcccaaaacttgtggtcaaattcgtactgaacgacggcaatgtgcacctgatctcactgaagatcaagccttacaagatcgaactgtatcagagcagtcagaatctcggctttataagcgcttccacatggaagatagagaagggcgatgtcatctacattgggggtctgcctgacaagcaggaaactgagttaaacggaggcttctttaagggctgtattcaggatgtccggttgaacaaccagaatctggagttctttcccaaccctaccaacaacgccagtctgaacccagtactggtaaatgtgactcaaggatgcgctggtgacaacagctgtaaaagcaatccttgtcacaacggaggcgtctgccacagtcgatgggatgacttctcctgctcatgccctgccttgacctctgggaaagcctgtgaggaggtacagtggtgcggcttcagcccttgccctcacggtgcccagtgccagccagtgctgcaaggattcgagtgcatcgctaacgcggtgtttaatggtcagagcggacaaatcctgttccgcagtaacgggaacatcacacgggagctcaccaacatcacattcggctttcgcaccagggacgccaacgtgatcatattgcacgcagaaaaggaaccagagttcctgaacatctcgatccaggatagcaggctcttcttccagctgcagtcgggcaatagtttttacatgctctctctgacgtcactacagtctgtgaatgacggtacctggcacgaggtcactctgtccatgactgacccccttagccagaccagccgctggcagatggaggtggacaatgagacccccttcgtaaccagcaccatcgccaccggaagtctgaactttctgaaagacaacactgacatttatgtaggagaccgtgcaatcgacaacatcaagggacttcagggttgtctgagcacaattgagattggtggtatatatctgagttacttcgaaaacgttcatggattcataaataaaccacaggaggagcaattcctgaagattagcacaaactctgtcgtgacgggatgcctgcagttgaatgtgtgtaacagcaacccctgcctgcacggcggaaactgcgaggatatatacagttcctaccactgcagttgtcctctggggtggagcgggaagcattgcgaactgaatatcgacgagtgcttctccaatccttgtatccacggcaattgttcagatcgagtggctgcttatcactgcacctgtgaaccaggatacactggggtgaattgtgaggtggatatcgataattgccaatcccatcagtgtgcaaatggagctacatgcataagtcacacaaacggatatagctgcctttgctttggcaatttcactgggaagttctgcaggcagagtaggctgccttcgaccgtgtgcggcaacgaaaaaaccaatctgacctgctacaatgggggtaattgtaccgagttccagactgagctcaagtgcatgtgtcggcctgggtttaccggggagtggtgcgagaaggacatcgacgagtgcgcgtctgatccctgcgtgaatggcggactctgccaagacctgctgaacaaattccagtgcctctgcgatgtagctttcgccggagagcggtgcgaggtcgacctggctgatgatcttatctccgatatctttacgactattgggtccgtgacggtggccttgctcctaatccttctgttggccatcgtggctagcgttgttacatcaaacaaaagggccacccaggggacctacagcccctctcgccaggagaaggagggatcacgagttgaaatgtggaacttgatgcctccacctgctatggaacgactgatctag

SEQ ID NO: 297677 - DNA, 2025 bp, Artificial Sequence
  derived and/or modified sequence
atgacatccaacggtgtggccctgctgaacttctacaacatgccttccacaccctcattcgtggggtgcctacaggacatcaagattgactggaatcacattaccttggagaatatcagttcaggttcttccctcaacgtaaaggctggatgtgtgagaaaagactggtgtgagagccagccctgtcagagtcggggaaggtgcatcaatctgtggctgtcctaccaatgcgattgccaccgcccttatgaggggcctaattgtctgcgtgaatacgtagccggtaggttcggtcaggacgattctaccgggtacgtgatattcaccctggatgagagctacggcgacaccatatccctgtctatgtttgtgcggaccctccagccttctggcctgttgctggctttagagaatagtacttaccagtacatccgggtgtggctggagaggggacgcctagccatgctgacacctaatagtcccaagttggtagttaagtttgtactcaatgatgggaatgtgcatttgattagcctgaaaatcaagccatacaaaattgagctttatcagagttctcagaacctgggctttatcagcgcctccacctggaagattgagaaaggagacgtcatatatatcgggggactgcctgacaaacaagagaccgagctgaatggtggtttctttaagggctgtatccaggatgtcagacttaataaccagaatcttgagttcttccctaatccaactaacaacgcaagtctcaatccagtattggtcaacgtcacccagggttgtgcaggcgataatagctgcaaaagcaatccatgccacaacgggggagtctgtcacagtcggtgggacgattttagctgctcatgtcctgccctgacgtcaggcaaggcctgtgaggaagtccagtggtgcggcttctcaccatgtccgcacggcgctcaatgtcaaccggtactgcaaggcttcgagtgtattgctaacgcagtctttaatgggcagagcggccagattctctttcgaagtaatggtaacatcaccagggaactgacaaatatcactttcgggttccggactagggacgcaaatgtaattatcctacatgctgaaaaggaaccagagttcttgaacatctcaatccaggattcacgtctctttttccagttgcagagcggtaattccttttacatgttgtccctgacatcactgcagagcgtgaacgacggcacctggcatgaagtcactctcagtatgactgatccactgagtcagacgtcccgatggcagatggaagtggataatgaaacccctttcgttacctcaaccatcgccacaggcagtcttaattttctgaaggacaacacggatatctatgttggggatcgcgctattgataatataaaaggcctccaggggtgcctgagcaccatcgagataggcggtatatatctaagttacttcgagaacgtgcatggatttataaataaaccacaggaggagcagtttttaaaaatttctactaattccgtggtcacaggatgcctgcagctcaacgtatgtaattcaaacccttgtctgcacggaggcaactgcgaagatatctactcatcataccactgctcttgccctctcggatggagcggtaagcattgcgaattgaacatagatgagtgcttctctaacccatgtatacacggcaactgctcagaccgggtggccgcttaccactgtacctgcgaaccaggctacaccggcgtgaactgtgaggttgatattgacaactgccagagccatcagtgcgcaaacggagccacttgtatctcccatacaaatgggtacagctgtctctgcttcgggaatttcaccggcaagttctgtcggcagagccgactccccagtacagtgtgcggtaacgaaaaaactaacctgacatgttataacgggggtaactgcacagaatttcaaactgagctcaagtgcatgtgtcgacccggatttactggggaatggtag

SEQ ID NO: 297678 - DNA, 2664 bp, Artificial Sequence
  derived and/or modified sequence
atggctctattactgttccggagcaatagggatgtcttcgtgaaattggagttactgagcggctacatccacctgtccattcaagtgaataaccagtccaaggtactgctgttcataagccataatacatccgacggcgagtggcatttcgttgaggtcatcttcgctgaagccgtaacccttaccctgatcgacgatagctgcaaagagaagtgtatagctaaagcgccaactcccctggagagtgatcagagcatctgcgccttccagaactcttttttggggggactcccagtcgggatgacgtcgaacggcgttgccctgttgaatttctacaacatgccctccaccccgtccttcgtgggctgcctgcaagatataaagatcgattggaaccacattaccctggagaatatttcttctggtagctcgctgaacgttaaggcaggttgcgtaagaaaagactggtgcgagagtcagccttgtcagtctagagggagatgcattaacttatggttgtcttaccagtgtgactgtcaccgcccttatgaaggccctaactgcttacgcgagtacgtcgccggacgattcggccaggacgatagcactggatacgttattttcaccttggatgagagctatggagataccataagcctgagtatgtttgtcagaactctccagcctagcggattactgctggctcttgagaactcaacctatcagtatattagagtgtggctcgaacgaggtcggttagcaatgctgaccccgaactccccaaagctggtggtgaaatttgtgctgaacgacggcaatgtacacctgatcagcctgaagataaagccctataagatcgaactttatcagagcagccaaaacctgggtttcatctcagcctccacttggaaaatagaaaaaggagacgtgatctatattgggggtctgcctgataaacaggaaacagaactcaatgggggtttttttaaaggttgcatccaagatgtccggctgaataatcagaatttggagttctttcctaatccaaccaacaatgcatctctgaatcccgtgttggtgaacgtcacacaggggtgcgcaggagacaattcgtgtaagtcaaatccatgccataacggaggcgtgtgtcacagtaggtgggatgattttagctgttcttgtccagctctgacttcaggcaaagcctgtgaagaagtgcagtggtgcggctttagcccctgtcctcatggggcacagtgccagccagtgttgcagggctttgagtgcatagccaacgccgtgtttaacggacagtcgggtcagattctgtttcggtcgaacggcaatatcacgagagaattaactaacatcacgtttggattccggacaagggatgccaacgtgattattctccacgccgagaaagaaccagagttcctcaatatatccatacaggacagccgtttgttcttccagttgcagtccgggaacagtttttatatgcttagcctcacctccctgcaaagcgtgaatgatggcacttggcacgaagttaccctctccatgactgatcccttgagtcaaacaagccggtggcagatggaggtggacaacgagacaccctttgtgacttctaccatcgctaccggaagccttaactttctcaaggataataccgacatttacgtgggcgaccgcgctattgacaatattaaagggctccagggatgcctctctacgatcgagatcgggggtatatatttgagttacttcgagaacgtacatggtttcatcaacaagcctcaagaagagcagttcctgaagattagcaccaattcggtcgtgacagggtgtcttcagttaaatgtctgcaactctaacccttgcctgcacgggggaaattgtgaggacatctacagctcttatcactgcagttgtccactaggatggtccggtaagcactgtgagcttaacattgatgaatgctttagcaacccgtgcattcacggcaattgtagcgatagggttgctgcttaccactgtacctgcgagcccggatacactggggtaaattgcgaggtcgacatcgataactgccagagtcatcagtgtgcgaatggagccacttgtatctcccacaccaacggctacagttgtctctgttttggcaacttcaccggtaaattctgcagacagtccagactgcccagtacagtctgtggaaacgagaaaacaaacctaacctgctataatgggggtaattgtactgagtttcagactgagctgaagtgtatgtgcagaccagggttcactggtgaatggtgcgagaaggacatagacgagtgcgcgagcgacccatgtgtaaacgggggattatgccaagatctgctaaataaatttcagtgcctttgcgacgtggcctttgcaggcgagcggtgtgaggttgacctggcagatgacctaatatccgatattttcaccaccattggctccgtgacagtcgccctgctcctcattttattgttggccatagtcgcttcagtggtgaccagcaacaagcgggcaactcagggcacatacagtccgagcagacaagaaaaggaggggtctagagtcgagatgtggaacctgatgccccctccagctatggaacgcttgatttag

SEQ ID NO: 297679 - DNA, 2025 bp, Artificial Sequence
  derived and/or modified sequence
atgaccagcaacggcgtggccctgctgaacttctacaacatgcccagcacccccagcttcgtgggctgcctgcaggacatcaagatcgactggaaccacatcaccctggagaacatcagcagcggcagcagcctgaacgtgaaggccggctgcgtgagaaaggactggtgcgagagccagccctgccagagcagaggcagatgcatcaacctgtggctgagctaccagtgcgactgccacagaccctacgagggccccaactgcctgagagagtacgtggccggcagattcggccaggacgacagcaccggctacgtgatcttcaccctggacgagagctacggcgacaccatcagcctgagcatgttcgtgagaaccctgcagcccagcggcctgctgctggccctggagaacagcacctaccagtacatcagagtgtggctggagagaggcagactggccatgctgacccccaacagccccaagctggtggtgaagttcgtgctgaacgacggcaacgtgcacctgatcagcctgaagatcaagccctacaagatcgagctgtaccagagcagccagaacctgggcttcatcagcgccagcacctggaagatcgagaagggcgacgtgatctacatcggcggcctgcccgacaagcaggagaccgagctgaacggcggcttcttcaagggctgcatccaggacgtgagactgaacaaccagaacctggagttcttccccaaccccaccaacaacgccagcctgaaccccgtgctggtgaacgtgacccagggctgcgccggcgacaacagctgcaagagcaacccctgccacaacggcggcgtgtgccacagcagatgggacgacttcagctgcagctgccccgccctgaccagcggcaaggcctgcgaggaggtgcagtggtgcggcttcagcccctgcccccacggcgcccagtgccagcccgtgctgcagggcttcgagtgcatcgccaacgccgtgttcaacggccagagcggccagatcctgttcagaagcaacggcaacatcaccagagagctgaccaacatcaccttcggcttcagaaccagagacgccaacgtgatcatcctgcacgccgagaaggagcccgagttcctgaacatcagcatccaggacagcagactgttcttccagctgcagagcggcaacagcttctacatgctgagcctgaccagcctgcagagcgtgaacgacggcacctggcacgaggtgaccctgagcatgaccgaccccctgagccagaccagcagatggcagatggaggtggacaacgagacccccttcgtgaccagcaccatcgccaccggcagcctgaacttcctgaaggacaacaccgacatctacgtgggcgacagagccatcgacaacatcaagggcctgcagggctgcctgagcaccatcgagatcggcggcatctacctgagctacttcgagaacgtgcacggcttcatcaacaagccccaggaggagcagttcctgaagatcagcaccaacagcgtggtgaccggctgcctgcagctgaacgtgtgcaacagcaacccctgcctgcacggcggcaactgcgaggacatctacagcagctaccactgcagctgccccctgggctggagcggcaagcactgcgagctgaacatcgacgagtgcttcagcaacccctgcatccacggcaactgcagcgacagagtggccgcctaccactgcacctgcgagcccggctacaccggcgtgaactgcgaggtggacatcgacaactgccagagccaccagtgcgccaacggcgccacctgcatcagccacaccaacggctacagctgcctgtgcttcggcaacttcaccggcaagttctgcagacagagcagactgcccagcaccgtgtgcggcaacgagaagaccaacctgacctgctacaacggcggcaactgcaccgagttccagaccgagctgaagtgcatgtgcagacccggcttcaccggcgagtggtag

SEQ ID NO: 297680 - DNA, 2664 bp, Artificial Sequence
  derived and/or modified sequence
atggccctgctgctgttcagaagcaacagagacgtgttcgtgaagctggagctgctgagcggctacatccacctgagcatccaggtgaacaaccagagcaaggtgctgctgttcatcagccacaacaccagcgacggcgagtggcacttcgtggaggtgatcttcgccgaggccgtgaccctgaccctgatcgacgacagctgcaaggagaagtgcatcgccaaggcccccacccccctggagagcgaccagagcatctgcgccttccagaacagcttcctgggcggcctgcccgtgggcatgaccagcaacggcgtggccctgctgaacttctacaacatgcccagcacccccagcttcgtgggctgcctgcaggacatcaagatcgactggaaccacatcaccctggagaacatcagcagcggcagcagcctgaacgtgaaggccggctgcgtgagaaaggactggtgcgagagccagccctgccagagcagaggcagatgcatcaacctgtggctgagctaccagtgcgactgccacagaccctacgagggccccaactgcctgagagagtacgtggccggcagattcggccaggacgacagcaccggctacgtgatcttcaccctggacgagagctacggcgacaccatcagcctgagcatgttcgtgagaaccctgcagcccagcggcctgctgctggccctggagaacagcacctaccagtacatcagagtgtggctggagagaggcagactggccatgctgacccccaacagccccaagctggtggtgaagttcgtgctgaacgacggcaacgtgcacctgatcagcctgaagatcaagccctacaagatcgagctgtaccagagcagccagaacctgggcttcatcagcgccagcacctggaagatcgagaagggcgacgtgatctacatcggcggcctgcccgacaagcaggagaccgagctgaacggcggcttcttcaagggctgcatccaggacgtgagactgaacaaccagaacctggagttcttccccaaccccaccaacaacgccagcctgaaccccgtgctggtgaacgtgacccagggctgcgccggcgacaacagctgcaagagcaacccctgccacaacggcggcgtgtgccacagcagatgggacgacttcagctgcagctgccccgccctgaccagcggcaaggcctgcgaggaggtgcagtggtgcggcttcagcccctgcccccacggcgcccagtgccagcccgtgctgcagggcttcgagtgcatcgccaacgccgtgttcaacggccagagcggccagatcctgttcagaagcaacggcaacatcaccagagagctgaccaacatcaccttcggcttcagaaccagagacgccaacgtgatcatcctgcacgccgagaaggagcccgagttcctgaacatcagcatccaggacagcagactgttcttccagctgcagagcggcaacagcttctacatgctgagcctgaccagcctgcagagcgtgaacgacggcacctggcacgaggtgaccctgagcatgaccgaccccctgagccagaccagcagatggcagatggaggtggacaacgagacccccttcgtgaccagcaccatcgccaccggcagcctgaacttcctgaaggacaacaccgacatctacgtgggcgacagagccatcgacaacatcaagggcctgcagggctgcctgagcaccatcgagatcggcggcatctacctgagctacttcgagaacgtgcacggcttcatcaacaagccccaggaggagcagttcctgaagatcagcaccaacagcgtggtgaccggctgcctgcagctgaacgtgtgcaacagcaacccctgcctgcacggcggcaactgcgaggacatctacagcagctaccactgcagctgccccctgggctggagcggcaagcactgcgagctgaacatcgacgagtgcttcagcaacccctgcatccacggcaactgcagcgacagagtggccgcctaccactgcacctgcgagcccggctacaccggcgtgaactgcgaggtggacatcgacaactgccagagccaccagtgcgccaacggcgccacctgcatcagccacaccaacggctacagctgcctgtgcttcggcaacttcaccggcaagttctgcagacagagcagactgcccagcaccgtgtgcggcaacgagaagaccaacctgacctgctacaacggcggcaactgcaccgagttccagaccgagctgaagtgcatgtgcagacccggcttcaccggcgagtggtgcgagaaggacatcgacgagtgcgccagcgacccctgcgtgaacggcggcctgtgccaggacctgctgaacaagttccagtgcctgtgcgacgtggccttcgccggcgagagatgcgaggtggacctggccgacgacctgatcagcgacatcttcaccaccatcggcagcgtgaccgtggccctgctgctgatcctgctgctggccatcgtggccagcgtggtgaccagcaacaagagagccacccagggcacctacagccccagcagacaggagaaggagggcagcagagtggagatgtggaacctgatgcccccccccgccatggagagactgatctag

SEQ ID NO: 297681 - DNA, 2400 bp, Artificial Sequence
  derived and/or modified sequence
gttttgtgatgactgctccctggccttttggttccgagggagtgcagggcagcagtgtgaagacctgtttacgtccactccccactccccggggctggcttcgggacgaattcactgtggtattaacagagcccgggacagagcctggcagaaggcagatggatgctcgtgcccgtcggctggatgaatgaaaggtgagcagcaaaggcgataccaggatcgtccacggcgggactggaggaggagaatgggactgtgcggagcctgcgggaagaatctgaaagtgtctgtgtgatggagagagacatggaaaaggcgacgtcccagcggctggaactggggcggaggaacgggaacagggaaggcctgagttaggcaccacaaaggttttcaggagaaaagtggggcgagccgagaggagtctcaccctgttgcttaggcagatggcgcgatctcggctcctgggttcaagcaattctcctgcctcagcctcctgaatagccgggattacagtcgtccagcatgctctgcccaccccacgccgaggtgcactgaccatgagcctcaactcctccctcagctgcaggaaggagctgagtaatctcactgaggaggagggtggcgaagggggcgtcatcatcacccagttcatcgccatcattgtcatcaccatttttgtctgcctgggaaacctggtcatcgtggtcaccttgtacaagaagtcctacctcctcaccctcagcaacaagttcgtcttcagcctgactctgtccaacttcctgctgtccgtgttggtgctgccttttgtggtgacgagctccatccgcagggaatggatctttggtgtagtgtggtgcaacttctctgccctcctctacctgctgatcagctctgccagcatgctaaccctcggggtcattgccatcgaccgctactatgctgtcctgtaccccatggtgtaccccatgaagatcacagggaaccgggctgtgatggcacttgtctacatctggcttcactcgctcatcggctgcctgccacccctgtttggttggtcatccgtggagtttgacgagttcaaatggatgtgtgtggctgcttggcaccgggagcctggctacacggccttctggcagatctggtgtgccctcttcccctttctggtcatgctggtgtgctatggcttcatcttccgcgtggccagggtcaaggcacgcaaggtgcactgtggcacagtcgtcatcgtggaggaggatgctcagaggaccgggaggaagaactccagcacctccacctcctcttcaggcagcaggaggaatgcctttcagggtgtggtctactcggccaaccagtgcaaagccctcatcaccatcctggtggtcctcggtgccttcatggtcacctggggcccctacatggttgtcatcgcctctgaggccctctgggggaaaagctccgtctccccgagcctggagacttgggccacatggctgtcctttgccagcgctgtctgccaccccctgatctatggactctggaacaagacagttcgcaaagaactactgggcatgtgctttggggaccggtattatcgggaaccatttgtgcaacgacagaggacttccaggctcttcagcatttccaacaggatcacagacctgggcctgtccccacacctcactgcgctcatggcaggtggacagcccctggggcacagcagcagcacgggggacactggcttcagctgctcccaggactcagggacagatatgatgctgcttgaggactacacgtctgatgacaaccctccctctcactgcacttgcccacccaagagaaggagctcggtgacatttgaggatgaagtggaacaaatcaaagaagctgccaagaactcgattcttcatgtgaaagctgaagtacacaagtccttggacagttacgcagcaagcttggccaaagccattgaggccgaagccaaaatcaacttatttggggaggaggctttgccaggggtcttggttacagcacggactgtcccggggggcggcttcgggggccgccgaggcagcagaactcttgtgagccagaggctgcagttgcagagcatcgaagaaggagatgttttagctgccgagcagagatgagggcctcagggtgccgtggggctgcagcctgagaggctggcccggggaggagttcccatcaccgcctgtgccgcggccttgggagcatgtcactgtgtacagctggccacacacagggaaggagcagcatctggtatgcagccaccaggacaaggactgaaaataatgtctacagtccacagcttcagcatttccagagaccacatgtgagcttcttttaggtcccagtgatgggaccagaagcatctaaagc

SEQ ID NO: 297682 - DNA, 2676 bp, Artificial Sequence
  derived and/or modified sequence
gtaggtgcgtgcccgggactctgccgatgcgggccgcgccccctggggccaagagactccacgtcccgctcagggcaaagggtgtggggagaagcggtcacgcccctcggctggaatccgtgaggaccaggtctttttcagtgtgctcaatatggtcaccaagcctggaaacatagagtctcaccctgttgcttaggcagatggcgcgatctcggctcctgggttcaagcaattctcctgcctcagcctcctgaatagccgggattacagtcgtccagcatgctctgcccaccccacgccgaggtgcactgaccatgagcctcaactcctccctcagctgcaggaaggagctgagtaatctcactgaggaggagggtggcgaagggggcgtcatcatcacccagttcatcgccatcattgtcatcaccatttttgtctgcctgggaaacctggtcatcgtggtcaccttgtacaagaagtcctacctcctcaccctcagcaacaagttcgtcttcagcctgactctgtccaacttcctgctgtccgtgttggtgctgccttttgtggtgacgagctccatccgcagggaatggatctttggtgtagtgtggtgcaacttctctgccctcctctacctgctgatcagctctgccagcatgctaaccctcggggtcattgccatcgaccgctactatgctgtcctgtaccccatggtgtaccccatgaagatcacagggaaccgggctgtgatggcacttgtctacatctggcttcactcgctcatcggctgcctgccacccctgtttggttggtcatccgtggagtttgacgagttcaaatggatgtgtgtggctgcttggcaccgggagcctggctacacggccttctggcagatctggtgtgccctcttcccctttctggtcatgctggtgtgctatggcttcatcttccgcgtggccagggtcaaggcacgcaaggtgcactgtggcacagtcgtcatcgtggaggaggatgctcagaggaccgggaggaagaactccagcacctccacctcctcttcaggcagcaggaggaatgcctttcagggtgtggtctactcggccaaccagtgcaaagccctcatcaccatcctggtggtcctcggtgccttcatggtcacctggggcccctacatggttgtcatcgcctctgaggccctctgggggaaaagctccgtctccccgagcctggagacttgggccacatggctgtcctttgccagcgctgtctgccaccccctgatctatggactctggaacaagacagttcgcaaagaactactgggcatgtgctttggggaccggtattatcgggaaccatttgtgcaacgacagaggacttccaggctcttcagcatttccaacaggatcacagacctgggcctgtccccacacctcactgcgctcatggcaggtggacagcccctggggcacagcagcagcacgggggacactggcttcagctgctcccaggactcagggacagatatgatgctgcttgaggactacacgtctgatgacaaccctccctctcactgcacttgcccacccaagagaaggagctcggtgacatttgaggatgaagtggaacaaatcaaagaagctgccaagaactcgattcttcatgtgaaagctgaagtacacaagtccttggacagttacgcagcaagcttggccaaagccattgaggccgaagccaaaatcaacttatttggggaggaggctttgccaggggtcttggttacagcacggactgtcccggggggcggcttcgggggccgccgaggcagcagaactcttgtgagccagaggctgcagttgcagagcatcgaagaaggagatgttttagctgccgagcagagatgagggcctcagggtgccgtggggctgcagcctgagaggctggcccggggaggagttcccatcaccgcctgtgccgcggccttgggagcatgtcactgtgtacagctggccacacacagggaaggagcagcatctggtatgcagccaccaggacaaggactgaaaataatgtctacagtccacagcttcagcatttccagagaccacatgtgagcttcttttaggtcccagtgatgggaccagaagcatctaaagcaaaaaaaaaaccaaaaaaaaatctagagatgtggctgtggctttttgggaggtggggcatgggaggaccagagacgaagggcttggaaggagacccccacatgcatcatttcctcctcttcacagtgtgctgggagtccagccgtgcactgtgccagatgcctcaggaggagaaccctccccagtgtactgtgaaggatgacacagcacttcttcctaatgacacgcgaccgtcctggtgcctctacatggttgatgcgggcagtgtgggaccctcagttctaggactggtccgcagagaaagcacccaggagcagagcgcttcggagcggtcctcagtggcgccacctgctggtgctaatagggacagccacaggcctcttgcagactggcccaccctgcctacttccctactgacaagttctttggtatttcaaaagggagaaaccactataaaagacaagaggaagggcaggtactaggtgtttcatttccagaattaaaaaaaaaatccatttaa

SEQ ID NO: 297683 - DNA, 1590 bp, Artificial Sequence
  derived and/or modified sequence
atgagcctgaattctagtctctcgtgtcgaaaagaacttagcaatttaacagaggaagaaggaggggagggaggtgtgatcattacccaatttattgccattatagtgattacaatatttgtgtgcttgggaaatctagtcattgttgtgacactgtataagaaaagttacctgctgaccctttcgaataaattcgtgttttcactgactctctcaaactttctcttgagtgtgctcgtgctcccttttgttgtgacatcctctatcaggcgagaatggattttcggtgtcgtctggtgcaatttcagcgccctgctgtatctgctcatcagttcagcctcaatgcttaccttgggtgtgatcgcaattgataggtattacgccgtgttgtatccaatggtctaccctatgaaaataacaggcaaccgggctgtcatggcactcgtgtatatttggctgcattcactgattggctgtctgcccccactattcggctggtccagtgtagagttcgacgaatttaaatggatgtgtgtcgccgcgtggcatagggagccaggttacaccgccttctggcaaatttggtgcgcgctgtttccatttcttgtcatgctcgtctgctacggtttcattttccgagtcgcacgcgtgaaagctcgcaaagtgcactgtgggactgttgtcatcgtggaagaagacgcccagcgcaccggcagaaagaactcctccacctctacctcaagtagtggctctaggcgcaatgcttttcagggagtggtgtattctgcgaaccaatgcaaagcgctgattaccatcctggtagtccttggggcatttatggtaacctggggcccatacatggttgtgattgcctcggaggcactgtgggggaagtcatctgttagtccgagcctggagacctgggctacctggctctccttcgcttctgcagtctgtcatcctctcatatacggattatggaacaagacggtccggaaggaactgctcggaatgtgttttggagaccggtattatcgcgaaccgtttgtgcaacgccaacgaacttctcgtctgttctcaatcagtaaccggatcaccgatctgggactaagtccgcacctgacagccctgatggcgggcggccagcctctcgggcacagcagtagcacaggggataccggcttttcatgcagccaggacagtggaactgacatgatgctgttggaggattatacctccgatgataatccgccatctcattgtacctgccctcccaagcgtcgctccagtgtaacttttgaggacgaggtcgagcaaatcaaggaggctgccaagaactcgatactacacgttaaggctgaagtgcacaagtcgctggattcttacgccgcatctctggctaaagcgattgaggcggaagccaagatcaacctattcggtgaggaggctcttcctggagtgttagtcactgctcgcactgtccccgggggcggatttggcggacgccgggggtcccgaacactcgtctcccaaagacttcagctgcagagcatagaagagggcgatgtgctggctgcagaacagaggtag

SEQ ID NO: 297684 - DNA, 1590 bp, Artificial Sequence
  derived and/or modified sequence
atgagtctcaactcctccctgagctgcaggaaggagctatctaatttgactgaggaagagggcggcgaaggtggcgtgataatcacacaatttatcgccatcatcgtaatcaccatctttgtctgtcttggcaatcttgtgatcgtagtcacactttacaagaaatcctatctgcttactttgtctaacaagtttgtgttcagcctgacactcagcaacttcttgttaagtgtgctggtgcttccgtttgtcgtgacctcatcaattaggcgtgagtggatcttcggagttgtttggtgtaattttagcgccctgctttacctgttaatttcatctgcaagcatgctgactctgggtgtgattgccatcgatagatattacgcagtgctgtaccctatggtttatcccatgaaaattaccggaaacagggcggttatggccctggtttacatctggttgcacagtctcatcggctgcttgcctcctcttttcggatggagctcggtcgagtttgacgaattcaagtggatgtgtgttgctgcgtggcatagagaaccaggatacacagccttctggcagatctggtgcgccctcttccccttcctggtgatgctagtatgctatggctttatatttcgcgtggcacgggtcaaagccagaaaggtgcattgcggtactgtcgtgatcgttgaagaggatgctcaaaggaccgggcggaagaatagctcaaccagtacttcctctagtggatcccgcaggaatgccttccagggtgtggtgtactctgctaaccagtgtaaagcactgattaccattctggtggtcctcggcgccttcatggtgacttggggcccttatatggtcgttattgcgagtgaagcgctatggggcaaatcctccgtctctccatctctggagacttgggcaacatggcttagcttcgcgtcagcggtctgccatcccctcatctatgggctgtggaataagactgtgagaaaggaactattgggcatgtgtttcggggaccggtattatcgggagccgttcgttcagaggcagagaacttctagactgttcagcatcagtaacaggataaccgatcttggactctctccccatctgacagcactcatggctggtggccagccactggggcacagcagtagtactggagacacagggttctcttgctcccaggatagcgggactgatatgatgctgcttgaggactacacatccgacgataaccccccttcacattgcacctgcccaccaaagaggcgcagttctgtcaccttcgaagatgaagtcgaacagatcaaggaagccgcgaagaatagcatcctgcatgtgaaagcggaggttcataaaagcctcgactcttacgcagcttctctcgctaaagccatagaagctgaggcaaaaatcaatctgttcggtgaagaagcactgcctggcgtgctggtgacggctagaactgtgcctggagggggttttggcggccggaggggttctaggacattagtgtcacagcgtctgcagctgcagtctatcgaagaaggagacgtcctggcggctgagcagcggtag

SEQ ID NO: 297685 - DNA, 1590 bp, Artificial Sequence
  derived and/or modified sequence
atgtctctaaactcgtcattgagctgtaggaaggaactgagtaatctgactgaggaggagggcggtgaagggggggtcatcatcacacaattcatcgcaatcatagtcatcactatctttgtctgtctcggaaacttggtgatcgtggttaccctgtataagaagtcttatctactcaccttgagcaacaagtttgtgttctcgcttacactcagcaacttcttgttgtctgttctcgtcctgccgtttgtggtcacctcctccatccgtagagagtggatctttggtgttgtgtggtgtaacttttccgctctcctttacctgcttatctccagcgcttcaatgctgaccctgggcgtcatcgcaattgacaggtattatgccgtcctgtaccccatggtgtatcctatgaagattacaggaaacagggccgtgatggccctggtctatatttggctgcattctcttatcggctgtctaccacccctgttcggatggtcaagtgtagagttcgacgaatttaaatggatgtgcgttgcagcctggcacagggaaccaggttacaccgctttttggcagatctggtgtgctctgtttccatttctggtaatgctggtatgctacggatttattttccgggtcgcccgcgtaaaggccagaaaagtgcactgcgggacggtggttattgtggaggaagacgcccagcgtactgggcgaaagaatagttccaccagcacttcttcctctggcagtcgccgaaatgcgttccaaggagtcgtgtacagcgccaaccagtgcaaagcactgattacgatccttgtagtgctgggagcattcatggtcacttggggtccatacatggtggtcatcgcctccgaggctttgtgggggaagagttccgtgagcccctctttagaaacctgggccacctggttatccttcgccagtgcagtgtgccacccattgatatacgggttatggaacaagactgtcaggaaagagctgctcggcatgtgttttggcgacagatattatcgggagccgttcgtgcagcgacagaggacaagtcgccttttcagcatctctaacagaatcaccgacttgggtctgtcaccccatctcactgccctcatggctggcggacaaccactgggccactcctcgtctactggagatactgggttctcctgtagccaggattctggcaccgacatgatgttattggaggactacacatctgacgataatccgccttcgcattgtacatgcccccccaagcgaagaagctcagtaacatttgaagacgaagtggaacaaattaaagaggcagctaaaaacagcatcctgcacgtcaaggctgaagtgcacaagtcactggatagttacgctgcctctctggccaaagccatcgaggcggaggctaagattaacctgtttggagaggaggctctgccaggagtgctggtgactgccaggacagtacccggcggagggttcggaggcaggcgcgggtccaggacattagtgtcccagagactgcagctgcaatccatagaagagggagatgtgctggccgccgagcagagatag

SEQ ID NO: 297686 - DNA, 1590 bp, Artificial Sequence
  derived and/or modified sequence
atgtcactcaattcatccctgagctgcaggaaggaactttccaatttaaccgaagaggaggggggtgaaggaggcgttattattacacaattcatcgcaataattgtgattaccattttcgtctgtttaggaaatctagttatagtcgtgacgttatacaaaaaaagctacctccttactctgtcaaacaagttcgtttttagcctcactctgagtaattttctgttatctgttctcgtactcccctttgtggtcacaagcagcattaggagggaatggatctttggtgtggtgtggtgcaacttcagcgcactgctgtaccttttaatcagctcagcgtcaatgctgacactgggtgtgatcgctattgacagatattatgccgtcttatatcctatggtctatccgatgaagatcactggaaatcgggctgtcatggccctagtctatatatggctgcactcactgatcggatgtttacctccactgttcggctggtcatccgtcgaattcgatgagtttaaatggatgtgcgtcgctgcctggcacagggagcctggctacacagccttttggcaaatctggtgtgccctgtttcctttcctggtgatgctggtgtgctacggtttcatttttagagtcgccagggtgaaagcgcggaaagtccactgcggcaccgtggtgatcgttgaggaagatgcccaacgcaccggccgaaaaaattcctcaacaagtacaagttcaagcggctcccgtaggaacgcttttcagggggtggtctacagtgctaatcagtgtaaggcactcattaccatccttgtcgtgctgggagccttcatggttacttggggcccctacatggtcgtgatcgcgtccgaggctctctggggcaagtccagcgtatcaccttccctagagacatgggccacttggctcagcttcgcctccgctgtatgtcatcctcttatttatggcctctggaataaaactgtgaggaaagagctgctggggatgtgtttcggagatcgctactaccgggaaccatttgtccagcgccagagaactagccgtctgttttccatctccaaccggattactgacctgggtttatccccccatctgaccgcgctgatggctggggggcaaccactgggacactcaagcagtacaggggatactggcttctcatgttctcaagattccggtaccgacatgatgctgctggaggactacacctccgacgacaaccctccttcacactgtacatgcccacccaagaggaggtcctccgtgaccttcgaggacgaagttgaacagatcaaggaagccgctaaaaactccatccttcacgtgaaggccgaggtacacaaaagccttgactcgtacgcagctagcttggcgaaggccattgaggccgaggccaagattaatctctttggcgaagaagcgctgccgggtgtgcttgtgaccgcgcgaactgttcccggggggggcttcggaggcaggcgtggaagccgaaccttagtgtcacagcgcttacagctgcaatccatagaagagggcgatgttctggctgcagagcagcgctag

SEQ ID NO: 297687 - DNA, 1590 bp, Artificial Sequence
  derived and/or modified sequence
atgagcctgaacagcagcctgagctgcaggaaggagctgagcaacctgacagaggaggagggcggggagggcggcgtcatcatcacccagttcatcgccatcatcgtcatcaccatctttgtgtgcctgggcaacctggtgattgtggtgaccctgtacaagaagagctacctgctgaccctgagcaacaagtttgtgttcagcctgaccctgagcaacttcctgctgtctgtgctggtgctgccctttgtggtgaccagcagcatccggcgggagtggatctttggagtggtgtggtgcaacttcagcgccctgctgtacctgctgatcagcagcgcctccatgctgaccctgggcgtgattgccatcgaccgctactatgctgtgctgtaccccatggtgtaccccatgaagatcaccggcaacagagctgtgatggccctggtgtacatctggctgcacagcctgattggctgcctgccccccctgtttggctggagctctgtggagtttgatgagttcaagtggatgtgtgtggccgcctggcaccgggagcccggctacacagccttctggcagatctggtgtgccctcttccccttcctggtgatgctggtgtgctacggcttcatcttccgggtggcccgggtgaaggccaggaaggtgcactgcggcaccgtggtgattgtggaggaggatgcccagaggactggaaggaagaacagcagcaccagcaccagcagcagcggcagcagaagaaatgccttccagggcgtggtgtacagcgccaaccagtgcaaggccctgatcaccatcctggtggtgctgggcgccttcatggtgacctggggcccctacatggtggtgattgccagcgaggccctgtggggcaagagctctgtgagccccagcctggagacctgggccacctggctgagctttgccagcgctgtgtgccaccccctcatctacggcctgtggaacaagacagtgaggaaggagctgctgggcatgtgcttcggggaccgctactaccgggagccctttgtgcagaggcagaggaccagccgcctcttcagcatcagcaaccgcatcacagacctgggcctgagcccccacctgacagccctgatggccggcggccagcccctgggccacagcagcagcactggagacaccggcttcagctgcagccaggacagcggcacagacatgatgctgctggaggactacaccagtgatgacaacccccccagccactgcacctgcccccccaagagaagaagctctgtgacctttgaagatgaggtggagcagatcaaggaggccgccaagaacagcatcctgcacgtgaaggccgaggtgcacaagagcctggacagctatgctgccagcctggccaaggccatcgaggccgaggccaagatcaacctgtttggagaggaggccctgcccggggtgctggtgacagccaggacagtgcctgggggcggctttggaggccggcggggcagcaggaccctggtgtcccagaggctgcagctgcagagcattgaggagggagatgtgctggccgctgagcagaggtag

SEQ ID NO: 297688 - DNA, 1590 bp, Artificial Sequence
  derived and/or modified sequence
atgagcctgaacagcagcctgagctgccggaaggagctgagcaaccttaccgaggaggagggaggcgaagggggggtcatcatcacacaattcattgcaatcattgtgatcactatcttcgtgtgtttggggaacctggtaatcgtggtgaccctctacaaaaagtcttatttattaacattgtccaataagttcgtgttctcccttaccctgagcaacttccttctgtcggtccttgtcctgccatttgttgtcacttcgtcaatccgtagagaatggatttttggcgtcgtttggtgtaattttagtgctctcctgtatctcttaatcagttctgccagtatgttaaccttgggcgtcatcgccatcgatagatattatgcagtgctataccccatggtgtacccaatgaagattaccggcaaccgcgcagttatggctctggtctatatatggctccactcactcatcggttgcctcccccctctgtttgggtggagcagcgtagagttcgacgagttcaaatggatgtgtgtggccgcttggcaccgggagccggggtacactgctttttggcagatatggtgcgcgttgttcccatttctagtgatgctcgtgtgctatggcttcatatttagggtggcaagagtgaaagctcgtaaagtccactgcggcacagttgttattgtggaagaagatgcccagagaacgggacggaagaatagtagcacatccacgagcagctcaggaagccgacgtaacgccttccagggagtggtatactctgcgaaccagtgtaaggcactgatcaccattctcgtcgttctcggagccttcatggtgacttgggggccttatatggtggtgattgcctctgaagctctgtggggcaaaagttcggtctcaccgtcactagagacttgggccacatggctgtcttttgcaagcgctgtgtgtcatccattaatctacggcctgtggaataaaactgtacgaaaagaactgctgggaatgtgcttcggcgacagatactatagggagcccttcgtccagcgccagcgtacatcccggctttttagcataagtaacagaatcaccgacctaggcttaagcccccatctgacagcactgatggctggaggccaaccgctcgggcactcctccagtacgggcgacacaggtttctcgtgctcccaagatagtggaaccgatatgatgctgctggaggattacacaagtgacgacaaccctccgtctcattgcacctgtccgcctaagaggcggtcgtcggtgacattcgaagacgaagtcgagcagattaaagaggctgccaagaactcgatcctgcatgtcaaagcggaagtgcacaagtccctggacagttacgcagcttcccttgctaaagccattgaagccgaggccaaaatcaatttatttggggaggaggctctgccaggcgtcctggttaccgctagaacagtgcccggaggtggtttcgggggccgcagagggtcaaggaccctggtgagccaaagactgcagcttcagtctatcgaggaaggcgacgtcttggctgctgagcagaggtag

SEQ ID NO: 297689 - DNA, 1590 bp, Artificial Sequence
  derived and/or modified sequence
atgagcctgaacagcagcctgagctgccggaaggagctgagcaacttgacggaagaggagggcggtgagggaggcgtgattatcacacagtttattgcgattatagtgatcacgatcttcgtgtgtctaggtaacctggtcatcgtggtgacattgtataagaagtcttaccttctcactctgagtaataaatttgtgttcagcctcaccctatctaactttctgctcagcgtgctggtactgccgttcgtggtgactagcagtatccgcagggagtggatattcggggtagtctggtgtaacttctctgctctactgtacttacttatatcctcggcctccatgctcactctcggcgtgattgctatagaccgctattatgccgtactctatccaatggtgtatcctatgaagatcactgggaacagagccgtcatggcgctcgtctacatatggctgcattcacttattggttgcctgccaccgctgtttggctggtctagtgtagaatttgatgaatttaaatggatgtgcgtggctgcatggcaccgcgagcccggctacaccgcattctggcaaatctggtgcgctctttttcccttcctggtgatgctcgtttgctacgggttcatcttccgtgtggcgagagtcaaagctaggaaggtgcactgtggaactgtagtgatagtcgaggaggatgctcaacggaccggaaggaagaattctagcactagcaccagttcttccggctctcgtcggaacgccttccagggagtcgtctattccgctaaccagtgtaaggctctgattactatccttgtggtgctgggagctttcatggtgacatggggcccctatatggtggtgatagccagcgaggcactatggggtaaatcgtccgtgagtccatccctagaaacttgggctacttggctgtcattcgcctccgctgtgtgtcatccacttatttacggcctctggaataaaacagtccgaaaggagctgctgggtatgtgttttggggaccgatattacagggagccgttcgtgcaacggcagcggaccagtcgcctcttcagtatcagcaacagaattacagacctgggcttatcgcctcatcttaccgctctaatggctggcgggcagccgctcggccactctagttcgaccggggatacaggattctcatgtagccaggactccggcaccgacatgatgctgttggaagattacacgtctgacgacaatcctccgagccactgtacctgcccaccaaagcgccggagttcggttactttcgaagacgaggtcgagcagatcaaagaggccgcgaaaaacagtatcctgcacgtcaaagctgaggtgcataagtccctagacagctacgcagcatccctggctaaggctatcgaggccgaggccaagatcaatttgtttggggaggaagccctgccgggggttctagtgacggcccggactgttccagggggaggctttggcgggcgcagaggaagcagaacacttgttagtcaaaggctgcaattgcagtcaatcgaggaaggggacgtcctggcggccgagcaacgctag

SEQ ID NO: 297690 - DNA, 1590 bp, Artificial Sequence
  derived and/or modified sequence
atgagcctgaacagcagcctgagctgccggaaggagctgagcaacttgacagaagaggaaggaggcgagggcggggttattataacgcagtttatcgctatcatcgtcataacaatattcgtgtgtcttggcaatctcgtgattgtagtgaccctgtataagaaatcctatctgctcaccctttcgaataagtttgtctttagcttaactctgtccaacttcctgctgagcgtcttagtgctaccatttgtggtgacttcttctatccgcagagagtggatcttcggcgtggtatggtgcaacttcagcgctctgttgtacctgctgatctcttccgcatctatgctcaccctcggtgtgatagccatcgatcgctactacgcagtgctttatcccatggtgtaccctatgaaaatcaccgggaaccgggctgtgatggctttggtgtatatctggttgcactccctcatcggctgcttacccccattatttggatggtctagtgttgaattcgatgagtttaagtggatgtgcgttgcagcatggcaccgagagccaggatatactgctttttggcagatttggtgcgccctatttcccttcctagtgatgcttgtgtgttatggtttcatctttcgagtggctcgcgtgaaagcacgcaaagtgcactgcggcactgtcgtaatagtcgaggaagacgcacagcgcacaggaaggaagaactcctctacatcaacttcaagtagtggtagcagaaggaatgccttccagggcgttgtttactccgcaaatcagtgcaaagctctgatcactatcctggtggtgctgggggcctttatggtgacgtggggcccctatatggtggtgatagcttcagaagccctctgggggaagtcatccgtatcacctagtcttgagacatgggctacttggttgagtttcgccagcgccgtttgccaccccttaatctacggactctggaataaaacagtccggaaggagctgctcggtatgtgttttggggatcgctactacagggaaccgttcgtgcagagacagagaacctctcgactgttttctataagcaataggatcacggacctgggccttagcccccacctgaccgcacttatggctgggggtcaaccattgggtcattcaagttctactggcgatacggggttctcttgttctcaggattcagggactgatatgatgctgctggaagattacacctccgatgacaatccaccctctcactgcacttgcccccctaagaggcgcagctcagtgacattcgaggatgaagtggaacagatcaaggaagctgctaagaactccatccttcacgtgaaggctgaggtacataagtcccttgactcctacgctgcgtctctagccaaagcgatagaagccgaggccaaaattaacctgtttggtgaagaggccctgccgggtgtgctggtgacagcacgtactgtgccggggggggggttcggagggagacgcgggagccgcaccctggtgagccagcggctccagctccagtccatcgaggagggagacgtgctcgcagcagaacaaagatag

SEQ ID NO: 297691 - DNA, 1590 bp, Artificial Sequence
  derived and/or modified sequence
atgagcctgaacagcagcctgagctgccggaaggagctgagcaacttaacagaagaagaagggggggaaggcggagtgattattacgcagttcatagcgattattgtgataacaatctttgtctgcctgggaaatcttgtcattgtggtgacattgtataaaaaaagctatctcctgaccctgtccaacaagtttgtattctccctgacattgagcaacttcttgctgtctgtgctggtgttgccatttgtggtaacatcgagtatcagaagagagtggattttcggcgtcgtttggtgtaacttcagtgcactgctatatctgctgatcagcagtgcttccatgctgacgctgggggtgattgccatagaccgatactacgcagtcctatatcccatggtttaccccatgaagataaccggcaacagggccgtgatggctctggtctacatttggctgcacagcctcatcgggtgtctcccccctctcttcggatggtcctcagtcgagttcgatgaattcaagtggatgtgtgtggccgcgtggcacagggaacccggttataccgcattttggcaaatttggtgcgcacttttcccgtttctggtaatgctcgtgtgctacggtttcatatttagagtggctcgagtgaaggcgcgcaaggttcactgcgggaccgtggttatcgtagaggaggacgcccaaagaaccgggcgtaagaatagtagtaccagcacatcgtctagtgggtctcggagaaacgcctttcagggggttgtgtacagcgctaaccagtgcaaggccttaattacgatcctggtggtgctgggggctttcatggtgacttggggtccatatatggtggtgatagcatctgaagcactttggggcaaatcttcagtgtcgccatccctggagacatgggccacttggctgagctttgcttcggcagtgtgtcaccctctgatatatggactgtggaacaagaccgtccgcaaggagctgttaggcatgtgctttggcgaccggtactaccgggagccctttgttcagaggcagcgcacgtcgagactgttttcaatttctaaccggatcacggatctgggattatctcctcaccttacggcccttatggcaggtggacagcccctgggtcactcttcaagcaccggggacactggttttagctgttcacaggacagtggaactgatatgatgcttttggaggactacacgtccgatgataacccccccagtcactgcacctgcccgcctaagcggcgcagctccgttacttttgaggacgaagtcgagcagattaaggaagcagccaaaaatagtatcctccacgtgaaagcagaggttcataagtccttagactcatacgccgcatccctggcaaaagccatcgaggctgaggctaagattaacttgttcggtgaagaagccctacccggcgtgctggtcactgcccggacggtgccgggcgggggattcggcggccgacggggctctcgaaccctggtgtcccagcgactccagcttcagtctattgaggagggcgatgtgctggcagcggaacagaggtag

SEQ ID NO: 297692 - DNA, 1590 bp, Artificial Sequence
  derived and/or modified sequence
atgtctctgaactccagtctcagttgtcgcaaggagctaagcaacctgacagaggaggagggaggggagggcggtgttatcatcactcagtttattgctatcatcgtgatcacaattttcgtgtgcttagggaatctagtaatcgtggtaactctgtacaaaaagtcttatctgctgaccctctcaaacaaatttgtcttctctttaaccctgagcaactttcttctcagtgttctggtgctgcccttcgttgtgacttctagtattcggagggaatggatattcggcgtggtttggtgcaacttctcggctctgctctacctgctcattagctcagcttctatgttgactctgggggtgattgccatagatagatactatgcagtgctctacccgatggtctaccccatgaagatcacaggtaatcgcgctgtgatggccttggtatacatctggttacactctcttatcgggtgcctgccccctctctttggctggtcctcagtggaattcgacgagtttaagtggatgtgcgtcgccgcttggcaccgggagccagggtataccgctttctggcagatctggtgtgccctgttcccttttttggttatgctggtatgctatggatttatcttccgggtcgccagggtaaaggccagaaaagttcactgtggtaccgtcgtgattgtggaggaggacgcacagcgtactggacgtaagaatagctcaaccagtaccagcagttcaggttcccgccgaaacgcattccagggcgtggtgtactcagccaaccagtgcaaggctctgattacaatcctggtggtgctgggcgcttttatggtgacatggggcccttacatggtagtgatcgcatcagaggctctatggggtaagtcatctgtctcaccttcactggagacatgggccacctggttgtctttcgcgagcgctgtctgccatccactgatctatggcctctggaataaaacagttcgcaaggagctgctaggcatgtgcttcggagaccgatactaccgagaaccctttgtgcagcgccaacgtacctccaggctctttagtatcagcaataggattactgaccttggactatccccccacctgactgccctgatggccggagggcagccactcggccactctagcagcacaggtgatacaggcttctcatgctcccaggactccgggaccgatatgatgctgttagaggattatacctctgatgacaacccgcctagtcactgcacatgtccccctaaaaggcgttcctctgtgaccttcgaggacgaggttgaacagattaaagaagctgctaagaactccattctccacgtgaaggctgaagtacacaaatcccttgacagctacgcagccagtctcgccaaagccatagaggcagaggcaaagatcaatctgttcggtgaggaggccctgccgggagtgcttgtgacagccaggacagtaccaggcggtggatttggcggtaggcggggtagccggaccttagtaagccagcgcttgcagctccagtctattgaggagggggacgtgctggctgctgagcaaagatag

SEQ ID NO: 297693 - DNA, 1590 bp, Artificial Sequence
  derived and/or modified sequence
atgtccctcaatagctctctgtcctgcaggaaagagttatccaatctgaccgaggaggaggggggagagggaggggtgatcattacgcagtttatagcaatcatcgtgataaccatatttgtctgtctgggtaacctggtgatagtggtgactctctataagaaatcgtatctcctgactttgtcaaacaagtttgtgttctctctgactctgtctaactttttactttcagtcttagtccttccttttgtggtcacaagcagcatcagacgcgagtggatcttcggggtggtgtggtgtaacttttcagcactattgtatctgctgatcagttctgcatcaatgctgactctcggcgtgattgcaatcgatcgatactatgcagtgctataccccatggtgtaccctatgaagatcacaggaaatcgagctgtcatggccctggtctacatttggctgcacagcctgatcggctgcctgccgcctttgttcggatggagctccgtcgaatttgacgagtttaaatggatgtgtgtcgccgcatggcatagagagcccggttataccgcattctggcagatctggtgcgcgctcttcccattcctggtaatgctcgtttgctacgggttcatcttccgtgtagccagggtgaaggccaggaaggtgcactgtgggaccgtggtgattgtggaagaggacgcgcagcggaccgggcgaaagaactctagcacctcaacaagctcaagtggtagccgcaggaacgcattccaaggggtggtttacagtgccaatcagtgtaaggcattaataacaatccttgtggttctcggggcattcatggtgacctggggcccttatatggtggtgatcgcctccgaggccctgtgggggaagagttcagtgagtccttccttagaaacgtgggcaacctggttatccttcgccagcgctgtgtgccatcctctgatatatggcctgtggaacaagactgtcaggaaagagcttttgggcatgtgtttcggcgaccgatattaccgcgagccatttgtccagaggcagcggacaagtagattattctcaatctccaatcgtatcacggacctcgggctctctcctcatcttaccgcactaatggccggaggacagcctctgggacatagctcttccaccggagatacgggcttctcctgtagtcaagattctggcacggacatgatgttgcttgaggactatacttcggacgacaacccaccgagccattgcacttgtcccccaaaaaggcgttcctccgtcacatttgaggatgaggttgaacagattaaagaggccgcaaaaaattccatcctccacgttaaggctgaggtgcacaaaagcctcgatagctacgcagctagcctcgctaaggccattgaggccgaggccaagattaacttgtttggcgaagaggcgctcccgggtgtgctcgtgaccgcgcgaacagtgccaggcggagggtttggaggaaggcgcggtagcaggaccttagtctcacagcggctgcaacttcagtccatcgaggagggtgatgtgctagcagcggagcagcggtag

SEQ ID NO: 297694 - DNA, 1590 bp, Artificial Sequence
  derived and/or modified sequence
atgtctttaaacagttcactgtcttgcagaaaagagcttagcaacctgacagaggaggaaggcggtgaaggcggagtgatcatcacacagttcatagctatcattgtgatcaccatctttgtgtgcctcggcaatctcgtgatcgtagtgacactgtataaaaagtcgtacctgctgactttatctaataaatttgtgttttccctgacactgagcaactttttgctgagtgtgcttgtgctgccttttgtggtgacatctagcatcagacgcgagtggatctttggcgtggtttggtgcaacttcagtgctctgttgtacctcctcatttcctccgccagcatgctcacactgggcgtgattgctattgaccggtattacgctgtgctgtatcctatggtgtacccaatgaagattacagggaatagagctgtaatggcactagtctacatttggcttcactcgctgattggctgtctgccaccattatttgggtggtcctccgtggagttcgatgaattcaagtggatgtgtgtggcagcttggcatcgtgaacccggatacacagctttttggcagatttggtgtgccctttttccatttctcgtgatgcttgtttgttacggcttcatctttagagtagccagagtcaaggctaggaaggttcactgcggaactgttgttattgttgaggaggatgctcagcgaacaggaagaaagaattcttcaacctcaacctccagtagtgggagtcggcgaaatgcattccagggagtggtgtacagtgcgaaccaatgtaaggcactgatcacgattctggtggtcctcggcgcattcatggtaacctggggcccttatatggtagtgatcgctagcgaagcactgtggggcaaatcgtccgtttctccaagtctggagacttgggctacctggctcagcttcgcatccgcagtgtgtcatccgctgatctacggcctctggaacaaaacggtcagaaaggaattgctgggcatgtgctttggagaccggtactacagagaaccctttgtacagcgacagaggacctcacgccttttttccatttctaaccggatcactgacctggggctctcgccacacctaacagctcttatggctggaggccaacccctaggtcattcatcgtccaccggagacacaggcttctcctgctctcaagatagcggcaccgatatgatgcttcttgaagactacacatctgatgacaacccaccatcccactgtacatgcccccctaagcgccgttccagcgtcacttttgaagacgaagttgagcagatcaaagaggccgcaaagaacagtatcctgcatgttaaggcggaggtgcacaaatccttggactcatacgcggcaagcctggcgaaagctattgaagctgaggccaagataaacctctttggagaagaagcactgcctggcgtgctcgtgacagctcgcacagtccctggcggtggcttcggtggacgaaggggttcccggacgctggtatctcagcgcctccagcttcagagcattgaggaaggagatgttctagccgctgagcagaggtag

SEQ ID NO: 297695 - DNA, 1590 bp, Artificial Sequence
  derived and/or modified sequence
atgtcacttaatagctccttgagctgccggaaggaactatccaatctcacggaagaggaagggggtgaggggggtgtcattattacacagttcatagctattattgttattacaatatttgtctgtttgggtaatctggtgatcgtagtaaccctgtacaaaaagtcttacctgctgacactcagtaacaagtttgttttttccttgactctgtccaatttccttctctccgtcctggtgctgccctttgtagttacttcgtctatccggagggaatggatctttggtgtggtttggtgcaacttttctgctcttttgtacctgctgatttcttctgcttcgatgttaactctcggcgtgatagctatcgatagatattatgcggtgctgtaccctatggtgtatcctatgaagatcaccggcaaccgtgcggtcatggccctggtgtatatatggttgcactccctcattgggtgcctaccccctttgtttggctggagtagtgtggagtttgacgagttcaagtggatgtgcgtcgccgcatggcacagagaaccaggttatacagctttctggcagatctggtgtgccttattcccttttctggtgatgctggtatgttatggatttattttccgcgtggccagggttaaggccagaaaagtgcactgtgggactgtggtgatagtcgaagaagatgcacagagaacagggaggaaaaatagcagtacaagtacatcaagttccggcagcaggcgcaacgctttccaaggagtcgtctattccgcaaaccagtgcaaagcgctcataacaattcttgtcgtgttaggcgcttttatggtgacctgggggccttacatggtggtcatcgccagcgaggcactgtggggaaaatcttcagtcagtcctagcctggagacttgggcaacatggctaagtttcgcctccgcagtatgtcatccactcatctacggactttggaataagacagttcgcaaagaactgttaggtatgtgcttcggggaccgatattacagagagccattcgtgcagcgccagcggacgtcaaggctgttctctattagtaaccgcatcacagatcttggcctgagtccgcacctgactgccctcatggcgggtggacagccgctaggacatagtagctccactggtgacaccggcttctcctgctctcaggactctggcactgatatgatgctgcttgaggattacacctccgacgacaatccaccctctcactgtacgtgccccccaaagcggcgatcctctgtgacttttgaggatgaggtcgagcagatcaaagaagccgctaagaacagcattctgcacgtgaaggctgaggtgcacaagtccctggatagctatgcagccagcctggcgaaagctattgaggctgaggccaagattaatttgtttggcgaggaggctctacctggggtgctggttacagcacgaacagtcccgggaggaggcttcgggggtagaagaggaagcagaacgctggtaagccagaggctgcagcttcaatctatagaggagggagacgtcttagccgctgagcagagatag

SEQ ID NO: 297696 - DNA, 1590 bp, Artificial Sequence
  derived and/or modified sequence
atgagcctgaacagcagcctgagctgcagaaaggagctgagcaacctgaccgaggaggagggcggcgagggcggcgtgatcatcacccagttcatcgccatcatcgtgatcaccatcttcgtgtgcctgggcaacctggtgatcgtggtgaccctgtacaagaagagctacctgctgaccctgagcaacaagttcgtgttcagcctgaccctgagcaacttcctgctgagcgtgctggtgctgcccttcgtggtgaccagcagcatcagaagagagtggatcttcggcgtggtgtggtgcaacttcagcgccctgctgtacctgctgatcagcagcgccagcatgctgaccctgggcgtgatcgccatcgacagatactacgccgtgctgtaccccatggtgtaccccatgaagatcaccggcaacagagccgtgatggccctggtgtacatctggctgcacagcctgatcggctgcctgccccccctgttcggctggagcagcgtggagttcgacgagttcaagtggatgtgcgtggccgcctggcacagagagcccggctacaccgccttctggcagatctggtgcgccctgttccccttcctggtgatgctggtgtgctacggcttcatcttcagagtggccagagtgaaggccagaaaggtgcactgcggcaccgtggtgatcgtggaggaggacgcccagagaaccggcagaaagaacagcagcaccagcaccagcagcagcggcagcagaagaaacgccttccagggcgtggtgtacagcgccaaccagtgcaaggccctgatcaccatcctggtggtgctgggcgccttcatggtgacctggggcccctacatggtggtgatcgccagcgaggccctgtggggcaagagcagcgtgagccccagcctggagacctgggccacctggctgagcttcgccagcgccgtgtgccaccccctgatctacggcctgtggaacaagaccgtgagaaaggagctgctgggcatgtgcttcggcgacagatactacagagagcccttcgtgcagagacagagaaccagcagactgttcagcatcagcaacagaatcaccgacctgggcctgagcccccacctgaccgccctgatggccggcggccagcccctgggccacagcagcagcaccggcgacaccggcttcagctgcagccaggacagcggcaccgacatgatgctgctggaggactacaccagcgacgacaacccccccagccactgcacctgcccccccaagagaagaagcagcgtgaccttcgaggacgaggtggagcagatcaaggaggccgccaagaacagcatcctgcacgtgaaggccgaggtgcacaagagcctggacagctacgccgccagcctggccaaggccatcgaggccgaggccaagatcaacctgttcggcgaggaggccctgcccggcgtgctggtgaccgccagaaccgtgcccggcggcggcttcggcggcagaagaggcagcagaaccctggtgagccagagactgcagctgcagagcatcgaggagggcgacgtgctggccgccgagcagagatag

SEQ ID NO: 297697 - protein, 377 aa, Artificial Sequence
  derived and/or modified sequence
  misc_feature (1)..(1): Xaa can be any naturally occurring amino acid
XDLEELCPVCGDKVSGYHYGLLTCESCKGFFKRTVQNNKRYTCIENQNCQIDKTQRKRCPYCRFQKCLSVGMKLEAVRADRMRGGRNKFGPMYKRDRALKQQKKALIRANGLKLEAMSQVIQAMPSDLTISSAIQNIHSASKGLPLNHAALPPTDYDRSPFVTSPISMTMPPHGSLQGYQTYGHFPSRAIKSEYPDPYTSSPESIMGYSYMDSYQTSSPASIPHLILELLKCEPDEPQVQAKIMAYLQQEQANRSKHEKLSTFGLMCKMADQTLFSIVEWARSSIFFRELKGLTLSPSLECSGTILAHGNLHLLHSSDSPASASRVAGITGVHHNTHLIFVFLVEMGFCHVGQAGLKTPDLRVICLPRPPKVLGLWA

SEQ ID NO: 297698 - protein, 219 aa, Artificial Sequence
  derived and/or modified sequence
MAARSVDDISIKLLHEKGPATDHGVNVLPSTVPGREEGMTDRKHWFSFGTQPNVPGLQEPLDYRAANQAWQAVLAEVPRGGPGCAALRDLGRCGGPDVSTRRQWRPLPFSCPLSHTTQPPLGGHCRGSSAGRFHGRDQTSPGTVQQLPSAHVLKPGCTQHGDLSPGQASPPPAAALGPSPKAWTHTLGRPQLWAGLGSHRFGVPGPGTRNTLAACCVQE

SEQ ID NO: 297699 - DNA, 702 bp, Artificial Sequence
  derived and/or modified sequence
atgaaagaccctttggccaaggacgagcggatctacgtgaccaattactattacgggaatactctcgtagagtttcggaacctggagaactttaagcagggacgatggagtaatagttataagctgccctacagctggattggcacagggcatgtcgtatacaatggcgcattctattataatcgggcttttacaaggaatatcatcaaatatgacctcaagcagcggtacgttgccgcttgggccatgctgcatgacgtagcctatgaagaggctacaccttggcgatggcaaggccactccgacgtggactttgctgtagatgaaaacggcttgtggctgatctatccagccttagacgatgaaggattcagtcaggaggttatcgttttatcaaagcttaacgcagcagacttatccacacagaaggaaactacttggcgtacaggcctccgccgaaacttctacggcaactgcttcgttatatgcggcgtgctgtacgctgtggattcttacaaccagaggaatgccaatatctcttatgctttcgatacacacaccaacactcaaattgtacctaggctgctctttgagaacgagtattcatacactacacagatcgactacaacccaaaggaccgtttgttatatgcatgggataacggacaccaagtcacctatcacgtgatttttgcctactag

SEQ ID NO: 297700 - DNA, 702 bp, Artificial Sequence
  derived and/or modified sequence
atgaaggaccccctcgctaaggatgaacgaatttatgtgacaaactattattacggtaatactcttgtagaattccggaatctcgagaacttcaagcagggtagatggagcaattcatacaaactcccttattcatggatcggcacaggccatgtggtctacaatggcgctttctattacaatagagccttcacaagaaatattattaaatacgatctgaaacaaagatatgtggctgcttgggctatgttacatgacgtcgcctatgaggaggccacgccatggcgttggcagggacactccgacgttgacttcgcggtggacgagaatggcctatggctcatatatcccgccctcgacgatgagggatttagccaggaagtgatagtgctgagcaaattaaatgccgccgatctgagcacacaaaaagagacaacttggaggaccggactccgtcgcaacttttatggcaattgcttcgttatttgcggcgtgctttacgctgtggatagttataaccaaaggaacgccaacattagctatgctttcgacacccacactaatacccaaatcgtgccgcgcttgctcttcgaaaacgaatattcttacaccacacagatcgactataaccccaaggataggcttctgtacgcctgggataacggccaccaggtaacctatcacgttatcttcgcttattag

SEQ ID NO: 297701 - DNA, 702 bp, Artificial Sequence
  derived and/or modified sequence
atgaaagatccactggcaaaagacgaacgcatttacgtcacaaactactattacgggaatacactggttgagtttcggaatctggagaattttaaacagggtaggtggtcaaactcgtacaagttaccttacagctggattggaaccgggcacgtggtttacaacggggccttctactacaaccgcgccttcacacgaaacataattaaatacgacttaaagcagcgctatgttgccgcatgggctatgctccatgatgtggcctacgaggaagcgacaccctggcgttggcaggggcacagcgacgtggattttgctgttgacgaaaatggactctggctaatttacccagcactggacgacgaaggattcagccaagaggtaattgtgctgagcaaattaaacgctgctgacctatctacacagaaggagaccacatggaggactggcttgcgtagaaatttctatgggaattgcttcgtgatttgcggtgtcctgtatgccgtagattcttataaccagcgaaacgctaatatttcttatgcattcgatacacatacaaacactcagattgtcccccgcctgctgtttgagaacgagtatagctataccacacaaatcgactataatccaaaagacagactattgtacgcctgggataacggccaccaagtcacataccatgtcatctttgcatattag

SEQ ID NO: 297702 - DNA, 702 bp, Artificial Sequence
  derived and/or modified sequence
atgaaggaccccctggccaaggacgagagaatctacgtgaccaactactactacggcaacaccctggtggagttcagaaacctggagaacttcaagcagggcagatggagcaacagctacaagctgccctacagctggatcggcaccggccacgtggtgtacaacggcgccttctactacaacagagccttcaccagaaacatcatcaagtacgacctgaagcagagatacgtggccgcctgggccatgctgcacgacgtggcctacgaggaggccaccccctggagatggcagggccacagcgacgtggacttcgccgtggacgagaacggcctgtggctgatctaccccgccctggacgacgagggcttcagccaggaggtgatcgtgctgagcaagctgaacgccgccgacctgagcacccagaaggagaccacctggagaaccggcctgagaagaaacttctacggcaactgcttcgtgatctgcggcgtgctgtacgccgtggacagctacaaccagagaaacgccaacatcagctacgccttcgacacccacaccaacacccagatcgtgcccagactgctgttcgagaacgagtacagctacaccacccagatcgactacaaccccaaggacagactgctgtacgcctgggacaacggccaccaggtgacctaccacgtgatcttcgcctactag

SEQ ID NO: 297703 - DNA, 702 bp, Artificial Sequence
  derived and/or modified sequence
atgaaagaccctcttgcaaaagacgagaggatctacgtcactaactattattatgggaacacactcgtcgaatttcgtaatctcgagaatttcaaacagggccgatggagcaactcctacaagttaccgtactcttggattggaacaggacacgtcgtgtataatggcgcattttactacaatagggctttcacccgcaacattattaaatatgatctaaagcagcggtacgtggccgcttgggccatgcttcacgacgtggcctacgaagaggcaactccatggagatggcaggggcattctgacgtggatttcgccgtcgacgagaacggactctggttgatttatccagcactagacgacgaaggctttagccaagaagtgatcgtcctgtcaaaactgaatgcagctgatctcagcacacagaaggagaccacatggagaaccgggctgcggagaaatttctacgggaattgttttgtcatttgcggagtgctgtatgcggtggactcctataaccagagaaacgctaacatttcctatgcctttgatacgcacaccaatacccagatcgtccctcgtctgctgttcgaaaatgaatatagttacactacccagatcgactataatcccaaagaccgcttactttatgcgtgggacaacgggcaccaagtaacctatcacgtgatcttcgcctattag

SEQ ID NO: 297704 - DNA, 1153 bp, Artificial Sequence
  derived and/or modified sequence
agaacaggagcaaagcatagtggtgtgaaagttgccaaagatgggcatggtggaggctcaagtgtagggtcaagtgtagggtggatcaggggagtagcaggagatggtgtggaaaaatgtttggggtcaggttatacagggctgttaaagcctgccgaggagtccagactctaaatggatgaacagcaaaggtttaaggggtgaggcatcactagatcagcccaaaacctccatccacctcttctccaccaggaaggtgcaaggacactctctccacaatcacggggccgaccacccagaacacatatgggcggaatgaaggggcctggatgaaggaccccctggccaaggatgagcggatttacgtaaccaactattactacggcaacaccctggtagagttccggaacctggagaacttcaaacaaggtcgctggagcaattcctacaagctcccgtacagctggatcggcacaggccacgtggtatacaatggcgccttctactacaatcgcgccttcacccgcaacatcatcaagtacgacctgaagcagcgctacgtggctgcctgggccatgctgcatgacgtggcctacgaggaggccaccccctggcgatggcagggccactcagacgtggactttgctgtggacgagaatggcctatggctcatctacccggccctggacgatgagggcttcagccaggaggtcattgtcctgagcaagctcaatgccgcggacctgagcacacagaaggagaccacatggcgcacggggctccggaggaatttctacggcaactgcttcgtcatctgtggggtgctgtatgccgtggatagctacaaccagcggaatgccaacatctcctacgctttcgacacccacaccaacacacagatcgtccccaggctgctgttcgagaatgagtattcctatacgacccagatagactacaaccccaaggaccgcctgctctatgcctgggacaatggccaccaggtcacttaccatgtcatctttgcctactgacacccttgtccccacaagcagaagcacagaggggtcactagcaccttgtgtgtatgtgtgtgcgcgcacgtgtgtgtaggtgggtatgtgttgtttaaaaatatatattattttgtataata

SEQ ID NO: 297705 - DNA, 702 bp, Artificial Sequence
  derived and/or modified sequence
atgaaggaccccctggccaaggatgagcgcatctacgtgaccaactactactacggcaacaccctggtggagttcaggaacctggagaacttcaagcagggccgctggagcaacagctacaagctgccctacagctggattggaactggacatgtggtgtacaatggagccttctactacaacagagccttcaccaggaacatcatcaagtatgacctgaagcagagatatgtggccgcctgggccatgctgcatgatgtggcctatgaggaggccaccccctggcgctggcagggccacagtgatgtggactttgctgtggatgaaaatggcctgtggctgatctacccagccctggatgatgagggcttcagccaggaggtgattgtgctgagcaagctgaatgctgctgacctgagcacccagaaggagaccacctggaggacaggcctgcggaggaacttctacggcaactgcttcgtcatctgtggggtgctgtatgctgtggacagctacaaccagagaaatgccaacatctcctatgcctttgacacccacaccaacacccagatcgtgccccggctgctgtttgaaaatgagtacagctacaccacccagattgactacaaccccaaggaccggctgctgtatgcctgggacaatggccaccaggtgacctaccacgtgatctttgcctactag

SEQ ID NO: 297706 - DNA, 702 bp, Artificial Sequence
  derived and/or modified sequence
atgaaggaccccctggccaaggacgagcggatctacgtgaccaactactattacggtaacacgctcgtagagtttcgcaacctcgaaaatttcaagcaggggcgatggtctaacagctataaattgccatactcatggatcggcacgggacacgtcgtgtataacggagcattttattataatcgagcattcactaggaatatcatcaagtacgatctgaagcagcgatacgtggccgcctgggccatgttgcacgacgttgcctacgaggaggcgacgccctggcgctggcaggggcattcagacgttgattttgccgtggatgaaaacggtctatggctcatatatccagccctcgacgacgaaggcttctctcaggaagttattgtgctgtccaaactgaacgccgctgacctgagcactcagaaggaaacaacttggagaaccgggctgcgacgaaacttctatggcaattgcttcgtgatttgtggtgtcctgtacgccgtcgacagttataaccagagaaacgcaaacatctcatacgcctttgacactcacacgaacacccagatcgttcctcgcttactctttgaaaacgaatattcctatacgacccaaatcgactacaatccaaaagataggctgctctacgcatgggataatggacatcaggtgacctatcatgtaatcttcgcctattag

SEQ ID NO: 297707 - RNA, 702 nt, Artificial Sequence
  derived and/or modified sequence
augaaggacccccucgcuaaggaugaacgaauuuaugugacaaacuauuauuacgguaauacucuuguagaauuccggaaucucgagaacuucaagcaggguagauggagcaauucauacaaacucccuuauucauggaucggcacaggccauguggucuacaauggcgcuuucuauuacaauagagccuucacaagaaauauuauuaaauacgaucugaaacaaagauauguggcugcuugggcuauguuacaugacgucgccuaugaggaggccacgccauggcguuggcagggacacuccgacguugacuucgcgguggacgagaauggccuauggcucauauaucccgcccucgacgaugagggauuuagccaggaagugauagugcugagcaaauuaaaugccgccgaucugagcacacaaaaagagacaacuuggaggaccggacuccgucgcaacuuuuauggcaauugcuucguuauuugcggcgugcuuuacgcuguggauaguuauaaccaaaggaacgccaacauuagcuaugcuuucgacacccacacuaauacccaaaucgugccgcgcuugcucuucgaaaacgaauauucuuacaccacacagaucgacuauaaccccaaggauaggcuucuguacgccugggauaacggccaccagguaaccuaucacguuaucuucgcuuauuag

SEQ ID NO: 297708 - RNA, 702 nt, Artificial Sequence
  derived and/or modified sequence
augaaagauccacuggcaaaagacgaacgcauuuacgucacaaacuacuauuacgggaauacacugguugaguuucggaaucuggagaauuuuaaacaggguagguggucaaacucguacaaguuaccuuacagcuggauuggaaccgggcacgugguuuacaacggggccuucuacuacaaccgcgccuucacacgaaacauaauuaaauacgacuuaaagcagcgcuauguugccgcaugggcuaugcuccaugauguggccuacgaggaagcgacacccuggcguuggcaggggcacagcgacguggauuuugcuguugacgaaaauggacucuggcuaauuuacccagcacuggacgacgaaggauucagccaagagguaauugugcugagcaaauuaaacgcugcugaccuaucuacacagaaggagaccacauggaggacuggcuugcguagaaauuucuaugggaauugcuucgugauuugcgguguccuguaugccguagauucuuauaaccagcgaaacgcuaauauuucuuaugcauucgauacacauacaaacacucagauugucccccgccugcuguuugagaacgaguauagcuauaccacacaaaucgacuauaauccaaaagacagacuauuguacgccugggauaacggccaccaagucacauaccaugucaucuuugcauauuag

SEQ ID NO: 297709 - protein, 232 aa, Artificial Sequence
  derived and/or modified sequence
MVAANTRAPEDTRAPAGPKPSSCEWAVCWAPARCRISATACGNSWDRPAGRTQLLWTPAAPTAMAEVGPGHTPAHPSQGAVPPSRAAAEPHLKPSPSELQTAGPAATIPARLCTRKPRLVYTQCWYVKEPKHPEIVTPWGTAARHSWRQHQMLSASERRCLPRDVEQKLGPEHTGPCLDEQGREAELARSGPSAAGPVRLKPGLVPGLFLLSCTTSPSTCLPVGQEGERGML

SEQ ID NO: 297710 - DNA, 2622 bp, Artificial Sequence
  derived and/or modified sequence
atgggcaacagagagatggaggagctgatccccctggtgaacagactgcaggacgccttcagcgccctgggccagagctgcctgctggagctgccccagatcgccgtggtgggcggccagagcgccggcaagagcagcgtgctggagaacttcgtgggcagagacttcctgcccagaggcagcggcatcgtgaccagaagacccctggtgctgcagctggtgaccagcaaggccgagtacgccgagttcctgcactgcaagggcaagaagttcaccgacttcgacgaggtgagactggagatcgaggccgagaccgacagagtgaccggcatgaacaagggcatcagcagcatccccatcaacctgagagtgtacagcccccacgtgctgaacctgaccctgatcgacctgcccggcatcaccaaggtgcccgtgggcgaccagccccccgacatcgagtaccagatcagagagatgatcatgcagttcatcaccagagagaactgcctgatcctggccgtgacccccgccaacaccgacctggccaacagcgacgccctgaagctggccaaggaggtggacccccagggcctgagaaccatcggcgtgatcaccaagctggacctgatggacgagggcaccgacgccagagacgtgctggagaacaagctgctgcccctgagaagaggctacgtgggcgtggtgaacagaagccagaaggacatcgacggcaagaaggacatcaaggccgccatgctggccgagagaaagttcttcctgagccaccccgcctacagacacatcgccgacagaatgggcaccccccacctgcagaaggtgctgaaccagcagctgaccaaccacatcagagacaccctgcccaacttcagaaacaagctgcagggccagctgctgagcatcgagcacgaggtggaggcctacaagaacttcaagcccgaggaccccaccagaaagaccaaggccctgctgcagatggtgcagcagttcgccgtggacttcgagaagagaatcgagggcagcggcgaccaggtggacaccctggagctgagcggcggcgccaagatcaacagaatcttccacgagagattccccttcgagatcgtgaagatggagttcaacgagaaggagctgagaagagagatcagctacgccatcaagaacatccacggcatcagaaccggcctgttcacccccgacatggccttcgaggccatcgtgaagaagcagatcgtgaagctgaagggccccagcctgaagagcgtggacctggtgatccaggagctgatcaacaccgtgaagaagtgcaccaagaagctggccaacttccccagactgtgcgaggagaccgagagaatcgtggccaaccacatcagagagagagagggcaagaccaaggaccaggtgctgctgctgatcgacatccaggtgagctacatcaacaccaaccacgaggacttcatcggcttcgccaacgcccagcagagaagcagccaggtgcacaagaagaccaccgtgggcaaccagggcaccaacctgccccccagcagacagatcgtgatcagaaagggctggctgaccatcagcaacatcggcatcatgaagggcggcagcaagggctactggttcgtgctgaccgccgagagcctgagctggtacaaggacgacgaggagaaggagaagaagtacatgctgcccctggacaacctgaaggtgagagacgtggagaagagcttcatgagcagcaagcacatcttcgccctgttcaacaccgagcagagaaacgtgtacaaggactacagattcctggagctggcctgcgacagccaggaggacgtggacagctggaaggccagcctgctgagagccggcgtgtaccccgacaagagcgtgatgaacaagaaggccgagaacgacgagaacggccaggccgagaacttcagcatggacccccagctggagagacaggtggagaccatcagaaacctggtggacagctacatgagcatcatcaacaagtgcatcagagacctgatccccaagaccatcatgcacctgatgatcaacaacgtgaaggacttcatcaacagcgagctgctggcccagctgtacagcagcgaggaccagaacaccctgatggaggagagcgccgagcaggcccagagaagagacgagatgctgagaatgtaccaggccctgaaggaggccctgggcatcatcggcgacatcagcaccgccaccgtgagcacccccgcccccccccccgtggacgacagctggatccagcacagcagaagaagccccccccccagccccaccacccagagaagacccaccctgagcgcccccctggccagacccaccagcggcagaggccccgcccccgccatccccagccccggcccccacagcggcgccccccccgtgcccttcagacccggccccctgccccccttccccagcagcagcgacagcttcggcgcccccccccaggtgcccagcagacccaccagagccccccccagcgtgcccagcagaagacccccccccagccccaccagacccaccatcatcagacccctggagagcagcctgctggactag

SEQ ID NO: 297711 - DNA, 7673 bp, Artificial Sequence
  derived and/or modified sequence
gcgggtcgttagctgtcagagccaagcggcgggctggcggcgggctccgacgtctgcgccaggacctggctggctgagcccggcgcagcagcagcagccagggcagcgcggcccctactccctgtcaggtcgtagaggcgagcagggaccagctggtcgccggcccctcgggcaagatggggaaccgggagatggaggagctgatcccgctggtgaaccgtctgcaggacgcgttttcggcgctgggacagagctgcctgctggagctgccgcagatcgccgtggtgggcggccagagcgccggcaagagctcggtgctcgagaacttcgtgggcagggactttctccctcgagggtcgggcattgtaacaagacgacctcttgtgctgcagcttgttacttctaaagcagaatatgccgagtttctacattgcaaaggaaagaaatttacagattttgatgaagttcgccttgagattgaagcagaaacagatcgcgtgactggaatgaataaaggcatttcctccatacccattaatttacgagtctattccccacacgtgttaaatctaacccttattgatctacctggaataactaaagtgcctgtgggagatcagccaccagatatcgagtatcagatcagagaaatgattatgcagttcatcacgagggagaactgtctgattttagctgttactccagccaacactgatcttgcaaactcagatgcgctgaagctagctaaagaagttgatcctcaaggtctgagaaccattggagttatcaccaaactggaccttatggatgaaggaacggatgccagggatgttctagagaacaaactgttgcctcttcgcaggggttacgtgggggtggtaaacagaagccagaaggacatagatgggaagaaggacataaaggcagccatgctggcagagaggaagtttttcctttcccacccggcttacagacatatcgctgaccgaatgggaaccccacacctgcagaaggtccttaatcagcaacttaccaaccacattcgggataccctaccaaacttcaggaacaaactacagggacagttgctctccatagaacatgaagtagaagcctacaaaaatttcaaaccagaagacccaacaaggaagaccaaagcattgctgcagatggttcagcaatttgctgtggactttgagaagagaattgaagggtcaggggatcaagtagataccctggaactctcaggtggtgctaaaatcaatcgtatttttcatgaacgctttccttttgagatagtaaagatggagttcaatgagaaagaattgcgaagagaaataagctatgcaatcaaaaacatacatggtatcaggacagggttgtttactccagacatggcatttgaagcgatagtcaagaaacagattgtaaagttgaaagggccttccttgaagagtgtggatctggtaatacaagaattaatcaacactgtgaagaagtgtaccaaaaaactggcaaacttccccagactctgcgaggaaacggaaaggattgttgctaaccacattcgtgagcgagaagggaagacaaaggaccaggtattgctattgattgacattcaagtctcttacatcaacaccaaccatgaagacttcattggcttcgcaaatgctcagcagaggagcagtcaggttcacaagaaaaccacagttggaaatcagggaaccaatcttccgccttcaaggcaaattgtgattcgcaaggggtggctcaccatcagcaacattggcatcatgaaaggcggctcgaagggatactggttcgtccttactgcggaaagcttgtcctggtataaagatgatgaggaaaaagaaaagaagtacatgcttcccttggacaacctgaaagttcgggatgtggaaaagagctttatgtctagcaagcacatctttgcactctttaatacagagcaaaggaatgtatacaaagactatcgcttccttgagctggcatgtgattcccaggaggatgtcgacagctggaaggcatctctactaagagctggggtctatcctgacaaatctgtaatgaacaaaaaagctgaaaatgatgagaatggacaagcagaaaacttttccatggacccacaattggagaggcaagtggagaccattcgcaacctcgtagactcctacatgtccattatcaacaaatgtatccgagatctaattccaaaaacaataatgcaccttatgatcaataacgttaaagatttcataaattccgagctcctagcacagttgtattcttcagaggaccaaaataccctgatggaggaatctgctgagcaggctcagcgccgggatgagatgcttcgaatgtatcaagcactgaaagaagcccttgggataattggggacatcagcacagccaccgtgtccactccggcaccccctccagtggatgactcctggatacagcactctcgcaggtcacctcctccaagccccacaacccaaaggaggccaacactaagtgctcccctcgcaaggcccacatccggccgaggaccagctcctgccattccctctcctggcccccactctggggctcctccagtcccattccgtccaggcccattacctcctttccccagcagcagtgactccttcggagcccctccacaagttccatctaggcctacgagggccccgcccagtgtcccaagccggagaccacccccatcaccaactcgtcccactataatccgcccactagaatcctccctgttagactaaacgaagtgtctggcatggcaattaatcactaatgaattatgcgaaagcaacatatttgataaccgttgcagtaaatcatgagtagtcgcatgtgtggacatcagtaggcaagtaaccagttttactaatgcattcatcgctcatcttcattgctcatggtatgtcaaacctttggggtttgactcagaaactgctaaccttttagaggctttatatgttgtactgaccaaggtaggtttgtatagcagccctatactttggggatcatttgcctaccatggcatatatttgaaattgctttggacaagttttctaggctatctaccaggtagctcattaaacgtaattcttcagatatgagatagtgggcttagacctaagccatacatatttcttttcccacattctgtttaggatgacagtaattctgttgtctaccattaatgctactacctactccataattgcctatttagctcctcttttcttcctttttatttcataagactgctaggaagtgattttttaaaattaggactccttaagaataaacttttccagaagcacgaggtagtttgcaaaggaaaagtctgcactgtttgctctaaagagcttctcctcattccaatgtgttttgcttcatgctagaagcatatgcaacagtgaataaaagcttctttttttgttaatcagtcaataaatttggctaattagtttcagagttcaaggaagaagcaaaatatcacatctctagaagtgttgggaaaaatataatttctttctttacttatattcacctcatggtaggttatattgaaggctgacatggagaatgtttacttttctatttggcatagctaactacactttgatactaactccagttttactattattattttggttggaaaaaaaattcactctttacgtgctaatttgtaatcttgttttgtaagaatttatcctacccttgaaacaggctcagtgtaactgtatatccattctaggctttcttaataaatcttgaggctatgggataatcacatttaaagaatggttcctgaaatgaagtcagtagaaatggcatgggataagagcagagctcacacttttacagttgcagtatttcaaagtccctatccaggtcactccagaaaagggtattgaaacgttgaaatctaaagcaaatttgcaatttcttaagatttctaaaatttaccagaacagtttagcctgggggttaatagttaagtcttgaggctaagttttggactaccaaggaccagatgattcacatgtaggaaacagccagaagccaactggaattttgtgtgctaactgttcccagacagcagagcaagtattcactgagtaggggtgtcccatgacactatttcatattctacagaagtaaatcaggtttcaccaactgaaatgtctccctttgaaagtagcaaacatgatttgtatgttaacttaactttaatttcctgtgtagtttacacccagagcagatactcataaagtataaagtaaaaacttttaaccattattaaacagagaacttgccatgttgagtgccattgtattgaacttattctaaaggcttatgctaacccatttataattggtaaaaatcagaaaatacaagatttacataaaggtcatttcaacttttaaggttaccagtgattgtataaaaacatcacaatcctaaatcctctcgtatctcaccccaaaccccaaactgggggaaaaaaagttaactctttgtgaatggaaccaatgtgcaagatacatactgcatttttaaaatagtgtctcagctaaatggaaaactgttaagcaaacatccatagtaaaacaaataatcttcagtgagatctttttataaaacttcttgtttttaggattccctttgcttcttcctttgaattctctaaaataggcagctaacggattatatacttcagggtttggctttgtgctaaatgtggttttgtgttttgctgtatttcaaaattttccttctgttaaaggaaaatattgtgaataaccactggtgtgttcttagatcagcacaaaccatgtcaaaaaaaattggagatttttttccaattttccttccactgatcttaggcagtaataaacaatggcatttgtcatctttggcacttgcttttagattatagtcccacagttgcactgccccaattgtctacctttgtgggtacatttttgttctttactcctaagttatttctcatagaacccagcctactctagaatttcagcagtgacattggagaatatttttaatttgctgcagtactatgtcatattattagtatgaatctcatttcccaaagggtttgtattctgctaaaaggagatgccaatgttgaatgaagtctgaaactctagtatgtgcatagtttgacgtgcagcatgcacaccaggccttaagatgggaatgtagcttaatgattttctgtttcccataccatttctaatcttttgtgtaattttctcttaactgattgctctgatattgtaaacacaatagatgtagctctatcatgtctagcataatttaaaaaatcagtgtttttaggatttgggaaaataaactgtaaatgtttatttgataggtaaatatagttttattgtcacatgctaaatattgcatgcatattgactaattggaataaccatttactcaattatggacagcttattgaaatagtattgatttagaaaaagtatattgcatttctaaaaaacatctaccaaggttactcgtctgaatattgcttttagccgtgttttataacatagacgagcagtagggtctgtttattagcaaatttcctatttgttccaatacaaactcactttattctaaagtatattaatgaaaccagttcctgtgatgtaactgtaagccttctcgacttagacttaaaaagtggtcacatagattaattttgtgactttttagtatagactgtagccataattctcaaatatgaaatgggacctaataccagtatgtgataaatgttgatgttttctgtgtacaaacacattttctatgcatgtgtctctgtgtatatggcatatacctagtaagtatgtttctgtaagtatgtgtattttatgtccatttgagtaggtaggtaggttttaaaaatactagttaaaatgccacaagcatgagtgtgattgtatgtgcactgtgtgtatatatataaatatatgtatatgtatggttgtaaatatctatgtatacatgtacttagtatgtgtggtatcaggatattttttaaactgtgataatacaacagatagctttgaatgatctgccataacatgtggtaacaatagttcatttctcataacatatatgaggtatacaaaattttctaactccagattgtagtcattttgagaggtacaaagctcataattaccatgacaacatggtaatgtccatagacatttgtatctgaatccacaagaagatctgaatctaagaaggaattacctttgacaatatttttcggtaagaagtaaaacctctggagacctatctttaagatctctaattggaattataaattatttttggattgctgagctgaatcttaaaaagccaagttgatatacatagtcatttttcctctatggtagaagtaaaaaaaaaaaaaaaggacatagcaacattaaagtagtggatttttctgagtaaatttgctgaaaatataagagagaagctatctaataccttggaggtaggtcatccactttttcaggtaaacatttttcatttggcaaatggcataattatttgaaagtgacaggaatctcctcagaatgaagaataaagcctactaggtctctaactgttgaactcatgaaagaagatagtgtatgagacttaagccatgagttttgtatcatttcaattagaagactactagctgtgagctcagagtttaatgtaaatgaatctagatgattttgaagaaatgattattcgttcaccagatcactcattgtacattctaaaaagctcaaatgagtcttctagatactcttactcatcctgtctggttgctatgtttaaaattatgtggtgctgtgtaggtgaaactttaagaatatttttgaagcatatgtaatatatgcactgctatttgtgtgtgtgtgtgtgtctttgtatatatgtaagaatgtgtgtatgtgtgagagcaagagagaggaaactcaaagaggagtgtttgtcttaagacctgttcatactggtatattggtgagacttctcacttctggttggaggtttcacatatggctcaactcaagtcattaatctctttttaatttttactcttgaattccttaaacttcgctcattatgaaatgttttaaaattatgacaaaaattactctgtctaaccacttgccttgtctgctaccagtttgttaaaaattattccccccaaccagtaattccaccagtactacttgatttgtgttatatttcctatgtacatgtacagcctttgttttgcttgcttgtctatttttactttcccttttttgggtcaaatttttcttttgctttgtttgaagaaggaatatacagaagtaaaatcttgtcttctctgctgattctttaattaatatgagccggatactttccactgtcttcttggcactttcaggatttcttaatgctgatatatggactcttagaatggaatttttgaagaaaaatctcaaagcctgtatcgttcttgaaggtcacatgtacctattgtgaaaatgtgaagctgtatttctgaagctgaaataaattataacatttgaagg

SEQ ID NO: 297712 - DNA, 2622 bp, Artificial Sequence
  derived and/or modified sequence
atgggtaatagagaaatggaagagctgatccctctggtgaacagactccaagacgcctttagcgccctcgggcagtcttgcctgcttgagctaccccagatcgcggtcgtcggcgggcagagtgctggaaagagtagcgtgttagagaatttcgttgggagggattttctcccccggggtagcggtatagttaccagaaggcctctggttctgcaacttgtgacctccaaggccgagtacgctgagttcctgcactgtaagggcaaaaagttcacagatttcgacgaggtgagattggagatcgaagcagaaaccgatcgcgtgaccggtatgaacaagggcatctcctcgatcccaattaaccttcgggtttacagtccacacgtgctcaacctaacactgattgatctcccaggaataacaaaggtgcccgtgggtgatcaacctccagacatcgaatatcagatacgggaaatgatcatgcaattcattactcgagagaattgccttatattagctgttacacccgcgaatacagacctcgcaaatagcgatgctttgaaattagccaaagaggtagacccacaaggcctacgaactattggagttattactaaactggacctgatggatgaaggcacggatgcccgggacgtccttgagaataaactgttgcctctgaggcgggggtatgtaggcgtagtcaaccgctcacaaaaagacatcgatggtaagaaggatataaaggccgctatgttggctgaacgtaagttcttcctgtcccatcctgcatatagacatatcgcggaccggatgggcacaccccacctgcagaaggtcttaaaccagcagctgacgaaccacatacgagacaccttacccaacttcagaaacaaactgcagggccagctactctctatcgagcatgaggtggaggcatacaagaatttcaagcctgaggacccaacaaggaagaccaaagcattactgcagatggtccaacagtttgccgtggatttcgaaaaaagaatcgaaggttcaggagaccaggtggataccctggaactgtccggcggggccaaaattaatagaatttttcatgagagattcccctttgagatcgtcaagatggagttcaatgagaaggagctgaggcgagagatctcttacgccattaagaacattcacggtattcggactgggctgtttacacctgacatggcgtttgaggccatagtgaaaaagcaaatcgttaagttgaagggaccgagcctgaagagtgtggacttagtgatccaggagttaattaacacagtcaagaaatgcacgaaaaagttagctaactttcctcggctatgcgaagaaaccgaacgcattgttgccaaccacattcgggaacgggagggaaaaacgaaagatcaggtgcttttacttatcgatattcaggtgtcatacattaataccaatcacgaggactttatcgggtttgctaatgcacagcagcgtagttcccaagtgcacaaaaagactactgtagggaaccagggcactaacctccccccttctcgacagatagttattagaaagggatggctcaccatcagcaacattggaattatgaagggtggctctaagggctactggtttgtgcttacagccgaaagcctgtcctggtacaaggacgatgaggaaaaggagaagaaatacatgctaccactcgacaatctgaaagttagggacgtagagaagtcattcatgtcctccaagcacatcttcgccctgttcaataccgaacagaggaacgtctataaggattatagatttctggagttggcatgcgactctcaggaagatgtggactcctggaaagccagcttgctgagggccggcgtctatccggacaagtccgttatgaacaaaaaggccgaaaacgacgaaaacggtcaagctgagaatttcagcatggatccccagctggagcgacaggtcgagaccataagaaatctggtggacagctatatgtcgattataaacaaatgcatcagagatctgatccccaagaccattatgcatcttatgatcaataatgtgaaagacttcattaattccgaactgctagctcagctgtactccagtgaagaccagaatactttgatggaggagagcgcggaacaagctcagcggagggatgagatgctgaggatgtaccaggccctgaaagaagctctcgggattattggcgatatctcaactgccaccgtgtcgaccccagcccctccacccgtcgatgatagctggatacagcacagtagaaggagccctcccccaagccccaccacacaaaggaggcccactctgagcgcccctctggcaaggccaacaagtggccgcggacctgcaccggccatcccaagccctgggccccactctggggctccccccgttcctttccggcccgggccactgcctcctttcccctcgagttccgacagctttggcgccccgccgcaagtgccctctcgaccaactagggcccctccaagcgtgccttccagacggccacccccctcgcccacacgtcccacgataatccgacctcttgagtcatccctactagattag

SEQ ID NO: 297713 - DNA, 2622 bp, Artificial Sequence
  derived and/or modified sequence
atgggcaaccgggagatggaggagctgatccccctggtgaaccggctgcaggatgccttcagcgccctgggccagagctgcctgctggagctgccccagattgctgtggtgggcggccagagcgctgggaagagctctgtgctggagaactttgtgggccgggacttcctgccccggggcagcggcatcgtgacccggcggcccctggtgctgcagctggtgaccagcaaggccgagtatgcagagttcctgcactgcaagggcaagaagttcacagactttgatgaggtgcggctggagattgaagctgagacagacagagtgacaggcatgaacaagggcatcagcagcatccccatcaacctgcgggtgtacagcccccacgtgctgaacctgaccctgattgacctgcccggcatcaccaaggtgcctgtgggggaccagcccccagacatcgagtaccagatccgggagatgatcatgcagttcatcacccgggagaactgcctgatcctggccgtgaccccagccaacacagacctggccaacagtgatgccctgaagctggccaaggaggtggacccccagggcctgcggaccatcggggtcatcaccaagctggacctgatggatgagggcacagatgccagagatgtgctggagaacaagctgctgcccctgcggcggggctacgtgggcgtggtgaacagaagccagaaggacattgatggcaagaaggacatcaaggccgccatgctggccgagaggaagttcttcctgagccacccagcctaccgccacatcgctgacaggatgggcaccccccacctgcagaaggtgctgaaccagcagctgaccaaccacatccgggacaccctgcccaacttcaggaacaagctgcagggccagctgctgagcattgaacatgaggtggaggcctacaagaacttcaagccagaggaccccaccaggaagaccaaggccctgctgcagatggtgcagcagtttgctgtggactttgagaagagaattgagggcagcggggaccaggtggacaccctggagctgtctggaggagccaagatcaaccgcatcttccacgagcgcttcccctttgagatcgtgaagatggagttcaatgagaaggagctgcggcgggagatctcctatgccatcaagaacatccacggcatcagaacaggcctcttcaccccagacatggcctttgaggccatcgtgaagaagcagatcgtgaagctgaagggccccagcctgaagtctgtggacctggtgatccaggagctgatcaacacagtgaagaagtgcaccaagaagctggccaacttcccccggctgtgtgaggagacagaaagaattgtggccaaccacatccgggagcgggagggcaagaccaaggaccaggtgctgctgctgattgacatccaggtgtcctacatcaacaccaaccacgaggacttcatcggctttgccaatgcccagcagaggagcagccaggtgcacaagaagaccaccgtgggcaaccagggcaccaacctgccccccagccggcagatcgtcatcaggaagggctggctgaccatcagcaacatcggcatcatgaagggcggcagcaagggctactggtttgtgctgacagctgagagcctgtcctggtacaaggatgatgaggagaaggagaagaagtacatgctgcccctggacaacctgaaggtgagagatgtggagaagagcttcatgagcagcaagcacatctttgccctcttcaacacagagcagagaaatgtgtacaaggactaccgcttcctggagctggcctgtgacagccaggaggatgtggacagctggaaggccagcctgctgcgggccggcgtgtacccagacaagtctgtgatgaacaagaaggcagaaaatgatgaaaatggccaggccgagaacttctccatggacccccagctggagcggcaggtggagaccatccggaacctggtggacagctacatgagcatcatcaacaagtgcatccgggacctgatccccaagaccatcatgcacctgatgatcaacaacgtgaaggacttcatcaacagcgagctgctggcccagctgtacagcagcgaggaccagaacaccctgatggaggagagcgctgagcaggcccagaggagagatgagatgctgaggatgtaccaggccctgaaggaggccctgggcatcatcggggacatcagcacagccaccgtgtccaccccagcccctcctcctgtggatgacagctggatccagcacagcagaagaagccccccacccagccccaccacccagaggcggcccaccctgagcgcccccctggcccggcccaccagcggccggggccctgccccagccatccccagccctggcccccacagcggggcccctcctgtgcccttccggcccggccccctgccccccttccccagcagcagtgacagctttggagccccaccccaggtgcccagccggcccacccgggccccacccagcgtgcccagccggcggcccccacccagccccacccggcccaccatcatccggcccctggagagcagcctgctggactag

SEQ ID NO: 297714 - DNA, 2622 bp, Artificial Sequence
  derived and/or modified sequence
atgggcaaccgggagatggaggagctgatccccctggtgaaccggttgcaggacgctttctctgccttgggacagagttgtctccttgagttaccgcagatcgctgttgtgggcggacagtccgctgggaagtccagcgttttggaaaatttcgtggggagggattttcttccacggggttctggaatcgtcacacgccgccccctcgtgctgcagctggtgacctcaaaggccgagtatgccgagttcctgcactgtaagggaaaaaagtttacagatttcgacgaagttcgcctcgaaatagaggctgagacagatcgggtcacaggcatgaacaagggaataagttcaatcccaataaatttacgcgtgtatagtccccacgtgctaaacctgacattgattgacctccctggaattactaaggtcccagtgggcgatcagccccccgatatagagtatcaaatccgcgaaatgatcatgcagtttattactagggagaactgcctgatactagctgtcacccccgcaaacaccgatctggccaactccgatgcgttgaaactagccaaggaagttgatccccaaggactacgtacaatcggcgtgatcacgaaactcgatctcatggatgaggggactgacgccagggatgtattggaaaataaactcctgcccctgcggagaggctatgttggtgtggtaaacaggtcgcagaaagacatcgacggaaaaaaggacatcaaagctgccatgctcgctgagagaaaattcttcctaagccacccagcataccggcacatcgccgatcggatggggacccctcacctgcagaaggtgctaaatcagcagttgactaatcatatccgcgataccttacccaatttcagaaataaactccagggtcagcttttgtccattgagcatgaggtcgaggcttacaagaactttaagcccgaagatcctacgagaaagactaaggcccttctgcagatggtgcagcaatttgcagtggactttgagaagagaatcgaggggtcgggagatcaggtcgacacgttggagctgtctggcggggcaaaaattaatagaattttccatgaaaggtttccctttgagatcgtgaagatggagttcaatgagaaagaactgagaagagaaatctcttatgctattaaaaatatccatggcattcggacaggcttatttacgcctgacatggccttcgaagccatagtcaagaagcaaatagttaaactaaaaggaccaagcctaaaaagcgtcgacttggtgatacaggagctcatcaatacggtcaaaaaatgtactaagaagttagccaattttcctcggttgtgcgaggagactgagcggatcgtcgcaaaccacatcagggagagagaaggtaaaaccaaagaccaggtgctgctgctgatcgacatacaggtgtcatacatcaacaccaaccatgaggattttatcggattcgccaacgctcagcagcgcagctctcaggtgcacaagaagaccaccgttggcaaccaaggaaccaacctgcctcctagtcgacagatcgtgatcaggaaaggttggttaacaatctctaacatcggaatcatgaagggcggaagtaagggatattggtttgtcctgactgccgagtccttgagttggtataaagatgacgaggagaaagagaagaaatacatgctgccactggataatctgaaggtacgggatgtcgaaaagtcctttatgtccagtaagcacatcttcgcattgttcaacacagaacagcgaaacgtgtataaggactataggttcctggaactggcctgtgactcacaggaagacgtggactcctggaaagcatccctactgagggctggtgtgtaccccgataagagcgtgatgaataaaaaggccgagaacgacgaaaacgggcaggctgaaaatttcagcatggaccctcaactggagcggcaggtggaaacaattcggaatctggttgactcctacatgtctatcatcaacaagtgcattcgcgatctcattcccaaaacgatcatgcaccttatgatcaacaacgttaaagattttatcaattcagagctcttggcgcagctgtattcttccgaggatcagaacactttgatggaggaatcagcagagcaggctcagaggagggatgaaatgctcagaatgtaccaagccctgaaagaagcactcgggatcataggggacatctctaccgcaaccgtttcaacgccagcacctcctcctgtggacgacagttggattcagcatagccgccgatctccacccccctcaccaacgacccagaggcggccgaccctcagcgcacccttggcaaggccgaccagtgggagagggcctgcccctgcaattccgtcaccaggtccccattctggagccccacccgtgcccttccggccagggcctctgcccccgttcccctcgtcctcagactccttcggcgccccaccgcaggtaccgtcccgacctacgcgagcccctccgtccgtcccttcccgccgcccacctcctagtcctacgcggcccaccataatccgaccactcgagtcatccctgctggactag

SEQ ID NO: 297715 - DNA, 2622 bp, Artificial Sequence
  derived and/or modified sequence
atgggaaatagagaaatggaggagctgatccctctggtcaatagactccaggatgctttctccgcactgggccagtcatgtctgctcgaactgccccagattgctgttgtgggaggtcagagtgctggcaaatcttccgtcctcgagaactttgtgggcagagactttctgccaaggggatccggcattgtgaccagaagaccattagtactccagctagtcacatcaaaagccgaatacgcggaatttctccactgcaagggcaagaagttcacagattttgatgaggtcagactggagatcgaagcagaaaccgaccgcgtaaccggaatgaacaaaggaattagctctattccaatcaaccttcgggtgtactctccccatgtcctaaacctgacactcattgatttgcctggtatcaccaaggtcccagtaggagaccagccaccagatatcgaatatcagattcgtgaaatgatcatgcaatttatcacacgcgaaaattgtcttattctggcggtaactcccgcaaacactgacctcgccaacagtgacgctcttaaacttgccaaggaggtggatcctcagggcctccgaacaatcggcgtcattacaaaactcgatctgatggacgaaggcaccgatgcaagagacgtgcttgagaacaagctcctgcccttgcggagaggttacgtgggggtcgtgaaccgctctcagaaggatatagacggtaagaaagacatcaaagccgctatgttagccgagcggaagttctttttatcccacccagcttatagacacatcgcggaccggatgggcaccccgcatctgcagaaggtgctcaaccagcagctgaccaatcacatccgggataccctgcctaattttaggaataagttgcagggtcaacttctgagcatcgagcacgaggtcgaagcctacaagaacttcaagccagaagatcccaccaggaagacaaaggcactgttgcagatggtgcaacagtttgcagtcgatttcgaaaagcgcattgagggcagcggtgaccaagtggatacactagagctctctggaggagcaaaaataaaccgcatctttcacgagaggtttccatttgaaattgtgaaaatggagttcaacgagaaagaactgaggagagagatttcgtatgctattaagaacatacacggcattcgtaccgggctgttcacccctgacatggctttcgaagccatcgtgaagaaacagattgtgaaactgaagggcccttccctcaagtcagtggatttggtgatccaggaactcataaataccgtgaagaaatgcactaaaaagctggctaattttccgagactctgtgaggagacagagcgcatcgtcgcaaaccacatccgtgaacgcgagggtaaaaccaaggaccaggtcctgctactgatagacattcaagtgtcctacatcaacaccaaccacgaagactttattggctttgcaaacgcccagcagaggtcttcgcaggtgcacaagaagaccaccgttggtaatcaggggaccaacctcccccctagccggcaaatagtgattcggaagggctggctcactatatccaatatcggcattatgaaagggggatctaagggttattggttcgtcctaaccgctgagtccttgagttggtacaaggacgatgaggaaaaggaaaagaagtacatgttacccctggacaatcttaaagtgagagatgtcgaaaagtcattcatgagctcaaagcatatctttgcccttttcaataccgagcagcgcaatgtgtataaagattaccggtttctggagttagcatgtgattcacaagaggacgtcgattcatggaaggcttctctcctgagggccggtgtgtacccagacaagtccgtgatgaacaagaaggccgaaaacgacgagaacgggcaggccgagaacttctcaatggatccccaactggaacgccaagtagagacaattcgaaatcttgttgactcctacatgagtatcattaataagtgcatcagggacctaattccaaaaacaattatgcacctgatgatcaacaatgtgaaggattttatcaacagcgaactgctggcccaattgtactccagcgaggaccaaaacaccctcatggaagaaagcgccgagcaggctcagcggagagatgagatgcttaggatgtaccaggctctaaaagaggctctcggaattatcggagacatttctactgccaccgtctcaacccctgcccctcctcccgtggatgatagctggattcagcattcaagaaggtctccacccccaagtcctacaactcagcgtagaccaaccctgagcgcgccactcgctcgtccaacatccggcagagggcctgctcccgctattccctccccaggccctcatagtggagcaccacctgtgccctttcgccctgggcctttaccgccttttccgtcatctagcgactcgtttggggcaccgcctcaggtgccaagtagaccaacacgggctccgccttctgtcccgtctcgtagacctccgccaagtccaacaagaccgaccattatacggcctctagagagttcattgctggactag

SEQ ID NO: 297716 - protein, 378 aa, Artificial Sequence
  derived and/or modified sequence
MAGDGRRAEAVREGWGVYVTPRAPIREGRGRLAPQNGGSSDAPAYRTPPSRQGRREVRFSDEPPEVYGDFEPLVAKERSPVGKRTRLEEFRSDSAKEEVRESAYYLRSRQRRQPRPQETEEMKTRRTTRLQQQHSEQPPLQPSPVMTRRGLRDSHSSEEDEASSQTDLSQTISKKTVRSIQEAPVSEDLVIRLRRPPLRYPRYEATSVQQKVNFSEEGETEEDDQDSSHSSVTTVKARSRDSDESGDKTTRSSSQYIESFWQSSQSQNFTAHDKQPSVLSKGSTLIFYKYCDHENAAFKDVALVLTVLLEEETLGTSLGLKEVEEKVRDFLKVKFTNSNTPNSYNHMDPDKLNGLWSRISHLVLPVQPENALKRGICL

SEQ ID NO: 297717 - protein, 332 aa, Artificial Sequence
  derived and/or modified sequence
MRLLAFLSLLALVLQETGTASLPRKERKRREEQMPREGDSFEVLPLRNDVLNPDNYGEVIDLSNYEELTDYGDQLPEVKVTSLAPATSISPAKSTTAPGTPSSNPTMTRPTTAGLLLSSQPNHGLPTCLVCVCLGSSVYCDDIDLEDIPPLPRRTAYLYARFNRISRIRAEDFKGLTKLKRIDLSNNLISSIDNDAFRLLHALQDLILPENQLEALPVLPSGIEFLDVRLNRLQSSGIQPAAFRAMEKLQFLYLSDNLLDSIPGPLPLSLRSVHLQNNLIETMQRDVFCDPEEHKHTRRQLEDIRLDGNPINLSLFPSAYFCLPRLPIGRFT

SEQ ID NO: 297718 - protein, 174 aa, Artificial Sequence
  derived and/or modified sequence
MRLLAFLSLLALVLQETGTASLPRKERKRREEQMPREGDSFEVLPLRNDVLNPDNYGEVIDLSNYEELTDYGDQLPEVKVTSLAPATSISPAKSTTAPGTPSSNPTMTRPTTAGLLLSSQPNHEDIPPLPRRTAYLYARFNRISRIRAEDFKGLTKLKRIDLSNNLISSIDNDA

SEQ ID NO: 297719 - DNA, 999 bp, Artificial Sequence
  derived and/or modified sequence
atgagattgctggcgttcctcagcctccttgccctcgttctgcaggaaacaggaacagcctctctccccaggaaagagaggaaaagacgggaagagcagatgcctcgtgaaggagactccttcgaggttttgcccctgaggaacgacgtactaaacccagacaactacggtgaagtcatcgatttatctaattatgaagagctcacagactatggagaccagctgcccgaagtcaaagttacttcgctggctcctgctactagcataagccctgccaagagtactacagctcccggaactccgtcaagtaaccccacaatgacgcggcctacaacagctggcctgctactgtctagccagcctaaccacgggctccccacctgtcttgtgtgcgtgtgcctcggatctagtgtctactgtgacgatattgaccttgaagacatcccaccattacccagacgaacggcctacctgtacgcccgattcaacagaatctccagaattcgtgccgaagatttcaagggtctgactaaactgaaacgcatagaccttagcaacaacctgatcagtagtatcgataatgacgcgtttcggttactgcacgctctgcaggatttgatactgcctgaaaatcaactcgaagcacttcctgtgctcccatccgggatcgaattcctggacgtccgtttgaaccggcttcagagcagcggcattcagcccgcagcgttcagggcaatggagaagctccaattcttatacctgtcggataacctcctggattccatcccaggcccactcccattgtccttgaggagcgttcacctccagaacaatttgatagagacaatgcagagggacgtgttctgtgatccagaggagcacaagcacacacgccgacagctggaggacatcagacttgacggcaaccccatcaatctaagtctgttcccttccgcttacttttgcctgcccagactgcccatcggccgattcacctag

SEQ ID NO: 297720 - DNA, 525 bp, Artificial Sequence
  derived and/or modified sequence
atgcggctcctcgccttcctctcactcctcgccctcgttcttcaggagaccgggaccgcatctcttcccaggaaagagcggaaacgacgcgaggagcagatgcctcgagagggggattcttttgaggtgctgccgttgagaaatgatgtgttgaacccggataattacggtgaagttattgatctcagtaattatgaggaactgactgattatggagatcagctgcccgaagtgaaggtgacttctcttgcaccagcaacctcaatcagccccgctaagagcactactgccccaggaacccctagctccaatcccacgatgacacgccctacaaccgctgggttgttactgagctcccagccgaatcatgaagatataccccctctccccaggcgaactgcctatctctatgcccgttttaacaggatcagtcggattagggcagaagactttaaaggccttactaaactgaagcgcattgacctttccaacaacctaatcagctctattgacaatgacgcatag

SEQ ID NO: 297721 - DNA, 999 bp, Artificial Sequence
  derived and/or modified sequence
atgaggctcctggcatttctgtccctgttagctttagtccttcaggaaacaggaaccgcatctcttccccggaaagaaagaaagcggagggaagagcagatgcctcgcgaaggcgacagcttcgaggtgctaccactgcgcaacgacgtgctaaacccagacaattacggcgaggtgattgacctcagcaattacgaagaattaaccgactatggcgatcagctgcccgaagtgaaagtcacaagccttgctccagccacctcaatttcacccgccaagtcaactactgctccaggcaccccctctagtaaccctacgatgactcgccctactacagctggcctcctgttatcctcacaacctaaccatggcttaccaacttgcttggtgtgtgtttgtctgggctcatccgtgtactgcgacgacatcgatctagaggacatcccccctttaccccgtagaaccgcctatctgtacgctcggttcaaccgcatttcccgtatcagagcagaagattttaagggcttgaccaagttgaaacggatcgatctctcaaataatcttatcagttctatcgacaatgacgcttttcggttgctccacgccctgcaggatctaattctcccagaaaatcaactcgaagcccttccagtcctgcctagtggcattgagttcctggacgtgagactgaaccgtctgcagtcaagcggaatccagccagccgcatttagggcaatggagaaactgcagtttctttatctatcagataatttgcttgatagtatcccaggcccccttcccctctctcttagatctgtgcatctgcagaacaatctcattgaaactatgcaacgagacgtgttctgtgatcctgaagaacataagcatacacggcggcagttggaagacataaggcttgacggcaatccgatcaatttgtctttattcccatcagcctacttctgtttgccacggctgcccatcggcagatttacatag

SEQ ID NO: 297722 - DNA, 525 bp, Artificial Sequence
  derived and/or modified sequence
atgagactcctcgcgtttctgtctctccttgccctggtgctccaggaaaccgggactgcgagccttccgagaaaagaacgaaagagaagagaagaacagatgccaagagagggagactcgtttgaagtgctgcctttacggaatgacgtcctgaaccctgacaattatggtgaagtaattgacctttccaattatgaggagctcacagactatggcgaccaattgcccgaggtgaaggtaacctccctggcaccggccaccagcatctcgcctgctaaatcgaccacagctcctggaactccaagtagcaacccaaccatgacaaggcccaccacagcgggattgttactatccagccagcctaatcacgaagatatcccccctctgccaagacggaccgcatacctctatgcaaggtttaatcgtatttctcgaatccgcgcagaggattttaagggactgacaaagctcaaacgtatagatttatctaacaacttgatttcgtctattgataacgacgcctag

SEQ ID NO: 297723 - DNA, 560 bp, Artificial Sequence
  derived and/or modified sequence
gccgctgaagggattctcagtcccatctgactccccatgaggctcctggctttcctgagtctgctggccttggtgctgcaggagacagggacagcttctctcccaaggaaggagaggaagaggagagaggagcagatgcccagggaaggcgattcctttgaagttctgcctctgcggaatgatgtcctgaacccagacaactatggtgaagtcattgacctgagcaactatgaggagctcacagattatggggaccaactccccgaggttaaggtgactagcctcgctcctgcaaccagcatcagtcccgccaagagcactacggctccagggacaccctcgtcaaaccccacgatgaccagacctactacagcagggctgctactgagttcccagcccaaccatgaggacattcctcctcttcctcggaggactgcctacctgtatgcacgcttcaaccgcatcagccgtatcagggccgaagacttcaaagggctgacaaagttgaagaggattgacctctccaacaacctcatttcctccatcgataatgatgcctt

SEQ ID NO: 297724 - DNA, 999 bp, Artificial Sequence
  derived and/or modified sequence
atgcggctgctcgcctttttatcactactggcacttgttttacaggagacgggaaccgcctcactgcccaggaaagaaaggaaacgccgggaggaacagatgcctagggagggtgattcattcgaggtactgccgctccgtaacgatgttctgaaccctgataattacggagaagtgattgacttaagcaattatgaagaactcacagactatggggaccagctcccggaagtcaaagtgacgagcctcgcacctgcaacatctatcagtccagcgaaatcgaccacagcccccggtactccaagctcaaaccctacaatgacccgccctaccactgcaggtttactcctgagcagccaacccaatcacggcctccctacttgtctcgtctgcgtctgcttgggatcgagtgtgtactgcgacgacattgacttagaagatatccctcccctgccccgtcggacggcctatctctacgccaggtttaacaggatatcccgcatcagagcagaagatttcaaaggacttaccaagttgaaacgcattgatctgtccaacaatctcatctcttccatcgacaatgatgctttccggcttctccacgctctgcaggaccttattcttcccgaaaatcagctggaagccttgcccgtattaccgagtggcattgagttcttggatgtaagactcaatcggttacaatcttcaggaatccaacccgccgccttcagggccatggagaaacttcaatttttgtacctcagtgacaatctgctagattccattcccggtcctctccccctttctttgcggagcgtacacctccaaaacaatctcatcgagacaatgcaacgcgatgtcttttgtgaccccgaagagcataagcataccagacggcagcttgaagatatccgtctcgacggtaacccaataaatttaagccttttcccctcggcctacttctgcctgcctagattacctatcggaaggtttacttag

SEQ ID NO: 297725 - DNA, 525 bp, Artificial Sequence
  derived and/or modified sequence
atgagactcctcgcgtttctgtctctccttgccctggtgctccaggaaaccgggactgcgagccttccgagaaaagaacgaaagagaagagaagaacagatgccaagagagggagactcgtttgaagtgctgcctttacggaatgacgtcctgaaccctgacaattatggtgaagtaattgacctttccaattatgaggagctcacagactatggcgaccaattgcccgaggtgaaggtaacctccctggcaccggccaccagcatctcgcctgctaaatcgaccacagctcctggaactccctcaagcaaccctaccatgacccgccccacgactgcaggcctgttactgagctctcaacctaaccacgaggatattccgccactgccaaggcgcaccgcatacctgtacgccagatttaacagaatttctaggatccgcgccgaagattttaaaggccttacaaagctgaaaagaattgacttgtccaacaacctcatctcctcaattgataacgacgcctag

SEQ ID NO: 297726 - DNA, 999 bp, Artificial Sequence
  derived and/or modified sequence
atgagactgctggccttcctgagcctgctggccctggtgctgcaggagaccggcaccgccagcctgcccagaaaggagagaaagagaagagaggagcagatgcccagagagggcgacagcttcgaggtgctgcccctgagaaacgacgtgctgaaccccgacaactacggcgaggtgatcgacctgagcaactacgaggagctgaccgactacggcgaccagctgcccgaggtgaaggtgaccagcctggcccccgccaccagcatcagccccgccaagagcaccaccgcccccggcacccccagcagcaaccccaccatgaccagacccaccaccgccggcctgctgctgagcagccagcccaaccacggcctgcccacctgcctggtgtgcgtgtgcctgggcagcagcgtgtactgcgacgacatcgacctggaggacatcccccccctgcccagaagaaccgcctacctgtacgccagattcaacagaatcagcagaatcagagccgaggacttcaagggcctgaccaagctgaagagaatcgacctgagcaacaacctgatcagcagcatcgacaacgacgccttcagactgctgcacgccctgcaggacctgatcctgcccgagaaccagctggaggccctgcccgtgctgcccagcggcatcgagttcctggacgtgagactgaacagactgcagagcagcggcatccagcccgccgccttcagagccatggagaagctgcagttcctgtacctgagcgacaacctgctggacagcatccccggccccctgcccctgagcctgagaagcgtgcacctgcagaacaacctgatcgagaccatgcagagagacgtgttctgcgaccccgaggagcacaagcacaccagaagacagctggaggacatcagactggacggcaaccccatcaacctgagcctgttccccagcgcctacttctgcctgcccagactgcccatcggcagattcacctag

SEQ ID NO: 297727 - DNA, 525 bp, Artificial Sequence
  derived and/or modified sequence
atgagactgctggccttcctgagcctgctggccctggtgctgcaggagaccggcaccgccagcctgcccagaaaggagagaaagagaagagaggagcagatgcccagagagggcgacagcttcgaggtgctgcccctgagaaacgacgtgctgaaccccgacaactacggcgaggtgatcgacctgagcaactacgaggagctgaccgactacggcgaccagctgcccgaggtgaaggtgaccagcctggcccccgccaccagcatcagccccgccaagagcaccaccgcccccggcacccccagcagcaaccccaccatgaccagacccaccaccgccggcctgctgctgagcagccagcccaaccacgaggacatcccccccctgcccagaagaaccgcctacctgtacgccagattcaacagaatcagcagaatcagagccgaggacttcaagggcctgaccaagctgaagagaatcgacctgagcaacaacctgatcagcagcatcgacaacgacgcctag

SEQ ID NO: 297728 - DNA, 999 bp, Artificial Sequence
  derived and/or modified sequence
atgagactcctggcatttctgtctctactggctctggtgctccaggaaacagggaccgcatccttgccacggaaggaaagaaaacgacgcgaggagcagatgccccgcgaaggcgattcatttgaagtcctccccctccgtaacgacgtactcaacccggataactatggagaagtaatcgacctgtcaaactatgaagaactgacagactacggggaccagctgcccgaagtcaaagtgacttcgcttgctcctgcaaccagtattagtccggctaagtccactacggcaccgggtactccatctagtaatcccacaatgacaagacccacgacagcgggactcctgctgtcttcccaaccaaatcacggcctccctacttgtttggtctgcgtctgtttggggagctcagtctactgtgatgatatcgatctggaggacatcccacctttgcccaggcgaacagcgtatctctacgctcggtttaaccgcatttcccggatccgcgctgaggattttaagggcctgactaagctcaagcggatcgacctgtcaaataatttaatatcgtccatcgacaatgatgcgttccggcttctccatgcactgcaggacctgatcctgcccgagaaccagctagaggctctgccagtgctaccatcagggatcgagttcctggacgttcggctgaacagactgcaatcatctggtattcagcctgccgccttccgggctatggaaaagcttcagttcctgtacctcagtgataacctgctggattccattccaggccccctaccattaagtcttcggagcgttcatctgcagaataatctgatcgagacaatgcagagagatgtattttgcgatcctgaggagcacaaacacactaggcgtcagctagaggacataaggctggacggaaacccaattaacctttcactattcccaagtgcctacttctgcctacctaggttaccaatcggtagattcacttag

SEQ ID NO: 297729 - DNA, 525 bp, Artificial Sequence
  derived and/or modified sequence
atgcgcttactggcctttctttctttgctggcgctggtgctccaggagacggggacagcaagcctccctcgaaaggagcgcaaacgccgtgaggagcaaatgccccgcgagggggacagtttcgaggtcctgccgctccgaaacgacgtccttaaccctgataattacggcgaggttattgatctgagcaattatgaggaactgaccgactatggagaccaactgccagaagtgaaggtgacaagtttggctcccgccaccagcatcagcccagccaaatccacgaccgccccagggacacccagctcaaacccgacaatgaccagacctacaaccgccggactgttactgtcctcacagcctaatcacgaagacatccctcctctgccgcgccggacagcgtatctttatgccagattcaaccgcatctctcggattagagctgaggacttcaagggtttaactaaactgaagcgcatagatctcagtaataatctgattagctccatcgacaatgatgcctag

SEQ ID NO: 297730 - DNA, 1359 bp, Artificial Sequence
  derived and/or modified sequence
gacagcctccaccagagtccccacctttctggaagctgcagggctctccatccaggatccagaagcattgaaggggaccagccgctgaagggattctcagtcccatctgactccccatgaggctcctggctttcctgagtctgctggccttggtgctgcaggagacagggacagcttctctcccaaggaaggagaggaagaggagagaggagcagatgcccagggaaggcgattcctttgaagttctgcctctgcggaatgatgtcctgaacccagacaactatggtgaagtcattgacctgagcaactatgaggagctcacagattatggggaccaactccccgaggttaaggtgactagcctcgctcctgcaaccagcatcagtcccgccaagagcactacggctccagggacaccctcgtcaaaccccacgatgaccagacctactacagcagggctgctactgagttcccagcccaaccatggtctgcccacctgcctggtctgcgtgtgcctcggttcctctgtgtattgcgatgacattgacctagaggacattcctcctcttcctcggaggactgcctacctgtatgcacgcttcaaccgcatcagccgtatcagggccgaagacttcaaagggctgacaaagttgaagaggattgacctctccaacaacctcatttcctccatcgataatgatgccttccgcctgctacatgccctccaggacctcatcctcccagagaaccagttggaagctctgcccgtgctgcccagtggcattgagttcctggatgtccgcctaaatcggctccagagctcggggatacagcctgcagccttcagggcaatggagaagctgcagttcctttacctgtcagacaacctgctggattctatcccggggcctttgcccctgagcctgcgctctgtacacctgcagaataacctgatagagaccatgcagagagacgtcttctgtgaccccgaggagcacaaacacacccgcaggcagctggaagacatccgcctggatggcaaccccatcaacctcagcctcttccccagcgcctacttctgcctgcctcggctccccatcggccgcttcacgtagctcggagcccttccactcctcccaggtcatctcttggaccagcgggcatcacattctccagcagccgccatctcacacgcctccctcctgtggccgccggcagcatggacaaaggtctccatgcagggggaggaggcctgcttctttccccacagctctcacgtctcccttctccctgcgggtgacaaagaagcccaaggaccacctccttcctgcctcattgtaataaaattccccacactga

SEQ ID NO: 297731 - DNA, 999 bp, Artificial Sequence
  derived and/or modified sequence
atgaggctgctggccttcctgagcctgctggccctggtgctgcaggagactggaacagccagcctgcccaggaaggagaggaagagaagagaggagcagatgccccgggagggggacagctttgaggtgctgcccctgagaaatgatgtgctgaacccagacaactacggggaggtgattgacctgagcaactatgaggagctgacagattatggagaccagctgcctgaggtgaaggtgaccagcctggccccagccaccagcatcagccctgccaagagcaccacagcccctggcacccccagcagcaaccccaccatgacccggcccaccacagctggcctgctgctgagcagccagcccaaccacggcctgcccacctgcctggtgtgtgtgtgcctgggcagctctgtgtactgtgatgacatcgacctggaggacatcccccccctgcccaggagaacagcctacctgtatgcccgcttcaaccgcatcagccgcatccgggcagaggacttcaagggcctgaccaagctgaagagaattgacctgagcaacaacctgatcagcagcattgacaatgatgccttccggctgctgcacgccctgcaggacctgatcctgcctgagaaccagctggaggccctgcctgtgctgcccagcggcatcgagttcctggatgtgcggctgaaccggctgcagagcagcggcatccagcctgctgccttccgggccatggagaagctgcagttcctgtacctgagtgacaacctgctggacagcatccctggccccctgcccctgagcctgcggtctgtgcacctgcagaacaacctgattgagaccatgcagagagatgtgttctgtgaccctgaggagcacaagcacacccggcggcagctggaggacatccggctggatggcaaccccatcaacctgagcctcttccccagcgcctacttctgcctgccccggctgcccatcggccgcttcacctag

SEQ ID NO: 297732 - DNA, 525 bp, Artificial Sequence
  derived and/or modified sequence
atgaggctgctggccttcctgagcctgctggccctggtgctgcaggagactggaacagccagcctgcccaggaaggagaggaagagaagagaggagcagatgccccgggagggggacagctttgaggtgctgcccctgagaaatgatgtgctgaacccagacaactacggggaggtgattgacctgagcaactatgaggagctgacagattatggagaccagctgcctgaggtgaaggtgaccagcctggccccagccaccagcatcagccctgccaagagcaccacagcccctggcacccccagcagcaaccccaccatgacccggcccaccacagctggcctgctgctgagcagccagcccaaccacgaggacatcccccccctgcccaggagaacagcctacctgtatgcccgcttcaaccgcatcagccgcatccgggcagaggacttcaagggcctgaccaagctgaagagaattgacctgagcaacaacctgatcagcagcattgacaatgatgcctag

SEQ ID NO: 297733 - DNA, 999 bp, Artificial Sequence
  derived and/or modified sequence
atgcggctgctggccttcctgagcctgctggccctggtgctgcaggagaccggcacagcaagtctgccccggaaggaaagaaagcgcagagaagaacagatgccacgcgagggggatagctttgaggtccttccactgcgcaatgacgtgctgaatcccgataactacggcgaggtgatagacttgagtaactatgaggagttaactgactacggggatcagctgcccgaagtgaaagtgacttcgctcgctcctgccacctccatatccccagccaaatccacaaccgcccctggaaccccctcgtcgaaccccacaatgacccgacccacaactgcaggccttttactatcgagccaaccgaaccacgggctgcctacgtgtttggtttgcgtttgcctgggctctagtgtatattgtgatgatattgatctggaagacataccacctctgccgaggaggacagcatacttgtacgcacgttttaataggattagtcgtattcgtgccgaggatttcaagggtctgaccaagctgaagcggatagacttgtcgaacaatctgatctccagcattgacaacgacgcatttagattgctgcacgccctgcaggatttaatccttcccgagaatcagctggaggctctccctgttctcccgtctggcatcgaatttcttgatgtccgccttaaccggctacaatcgtccggcatccagccagctgcctttcgcgccatggaaaagctgcagttcttgtacctttctgataacctactggatagtataccggggccactgcccctctcgctccgaagtgtccatttgcagaacaacctgatagagaccatgcagcgcgatgtcttttgcgatccagaggagcacaagcacacgagacgtcaactggaggacatccggctggatggcaatcctatcaatctcagcctgttcccgagtgcctatttctgtctcccgagactccccatcggccgtttcacatag

SEQ ID NO: 297734 - DNA, 525 bp, Artificial Sequence
  derived and/or modified sequence
atgcggctgctggccttcctgagcctgctggccctggtgctgcaggagacaggaaccgctagtctgcccaggaaagaacgtaagaggagggaggaacagatgccgagggagggcgacagttttgaggttctgcccctgagaaatgacgtgctgaatccggacaactatggtgaggtcatcgacctgagtaattatgaggagctgaccgactatggtgaccaacttcctgaagtgaaggttacctctctagcccccgcaacctccatttcccctgccaagagtacaaccgcccccggtaccccaagtagcaacccaactatgacgaggcctacgaccgctggacttcttctgtcatcacaacctaatcacgaggacatcccacctttgccccgccgtaccgcatacctgtacgcgagattcaaccgcataagccggataagagccgaagattttaaggggttgaccaagctgaagagaatcgacttatctaacaacctgatatcatccatcgataatgatgcttag

SEQ ID NO: 297735 - RNA, 999 nt, Artificial Sequence
  derived and/or modified sequence
augaggcuccuggcauuucugucccuguuagcuuuaguccuucaggaaacaggaaccgcaucucuuccccggaaagaaagaaagcggagggaagagcagaugccucgcgaaggcgacagcuucgaggugcuaccacugcgcaacgacgugcuaaacccagacaauuacggcgaggugauugaccucagcaauuacgaagaauuaaccgacuauggcgaucagcugcccgaagugaaagucacaagccuugcuccagccaccucaauuucacccgccaagucaacuacugcuccaggcacccccucuaguaacccuacgaugacucgcccuacuacagcuggccuccuguuauccucacaaccuaaccauggcuuaccaacuugcuugguguguguuugucugggcucauccguguacugcgacgacaucgaucuagaggacauccccccuuuaccccguagaaccgccuaucuguacgcucgguucaaccgcauuucccguaucagagcagaagauuuuaagggcuugaccaaguugaaacggaucgaucucucaaauaaucuuaucaguucuaucgacaaugacgcuuuucgguugcuccacgcccugcaggaucuaauucucccagaaaaucaacucgaagcccuuccaguccugccuaguggcauugaguuccuggacgugagacugaaccgucugcagucaagcggaauccagccagccgcauuuagggcaauggagaaacugcaguuucuuuaucuaucagauaauuugcuugauaguaucccaggcccccuuccccucucucuuagaucugugcaucugcagaacaaucucauugaaacuaugcaacgagacguguucugugauccugaagaacauaagcauacacggcggcaguuggaagacauaaggcuugacggcaauccgaucaauuugucuuuauucccaucagccuacuucuguuugccacggcugcccaucggcagauuuacauag

SEQ ID NO: 297736 - RNA, 525 nt, Artificial Sequence
  derived and/or modified sequence
augagacuccucgcguuucugucucuccuugcccuggugcuccaggaaaccgggacugcgagccuuccgagaaaagaacgaaagagaagagaagaacagaugccaagagagggagacucguuugaagugcugccuuuacggaaugacguccugaacccugacaauuauggugaaguaauugaccuuuccaauuaugaggagcucacagacuauggcgaccaauugcccgaggugaagguaaccucccuggcaccggccaccagcaucucgccugcuaaaucgaccacagcuccuggaacuccaaguagcaacccaaccaugacaaggcccaccacagcgggauuguuacuauccagccagccuaaucacgaagauauccccccucugccaagacggaccgcauaccucuaugcaagguuuaaucguauuucucgaauccgcgcagaggauuuuaagggacugacaaagcucaaacguauagauuuaucuaacaacuugauuucgucuauugauaacgacgccuag

SEQ ID NO: 297737 - RNA, 999 nt, Artificial Sequence
  derived and/or modified sequence
augcggcugcucgccuuuuuaucacuacuggcacuuguuuuacaggagacgggaaccgccucacugcccaggaaagaaaggaaacgccgggaggaacagaugccuagggagggugauucauucgagguacugccgcuccguaacgauguucugaacccugauaauuacggagaagugauugacuuaagcaauuaugaagaacucacagacuauggggaccagcucccggaagucaaagugacgagccucgcaccugcaacaucuaucaguccagcgaaaucgaccacagcccccgguacuccaagcucaaacccuacaaugacccgcccuaccacugcagguuuacuccugagcagccaacccaaucacggccucccuacuugucucgucugcgucugcuugggaucgaguguguacugcgacgacauugacuuagaagauaucccuccccugccccgucggacggccuaucucuacgccagguuuaacaggauaucccgcaucagagcagaagauuucaaaggacuuaccaaguugaaacgcauugaucuguccaacaaucucaucucuuccaucgacaaugaugcuuuccggcuucuccacgcucugcaggaccuuauucuucccgaaaaucagcuggaagccuugcccguauuaccgaguggcauugaguucuuggauguaagacucaaucgguuacaaucuucaggaauccaacccgccgccuucagggccauggagaaacuucaauuuuuguaccucagugacaaucugcuagauuccauucccgguccucucccccuuucuuugcggagcguacaccuccaaaacaaucucaucgagacaaugcaacgcgaugucuuuugugaccccgaagagcauaagcauaccagacggcagcuugaagauauccgucucgacgguaacccaauaaauuuaagccuuuuccccucggccuacuucugccugccuagauuaccuaucggaagguuuacuuag

SEQ ID NO: 297738 - RNA, 525 nt, Artificial Sequence
  derived and/or modified sequence
augagacuccucgcguuucugucucuccuugcccuggugcuccaggaaaccgggacugcgagccuuccgagaaaagaacgaaagagaagagaagaacagaugccaagagagggagacucguuugaagugcugccuuuacggaaugacguccugaacccugacaauuauggugaaguaauugaccuuuccaauuaugaggagcucacagacuauggcgaccaauugcccgaggugaagguaaccucccuggcaccggccaccagcaucucgccugcuaaaucgaccacagcuccuggaacucccucaagcaacccuaccaugacccgccccacgacugcaggccuguuacugagcucucaaccuaaccacgaggauauuccgccacugccaaggcgcaccgcauaccuguacgccagauuuaacagaauuucuaggauccgcgccgaagauuuuaaaggccuuacaaagcugaaaagaauugacuuguccaacaaccucaucuccucaauugauaacgacgccuag

SEQ ID NO: 297739 - protein, 536 aa, Artificial Sequence
  derived and/or modified sequence
MEFSSPSREECPKPLSRVSIMAGSLTGLLLLQAVSWASGARPCIPKSFGYSSVVCVCNATYCDSFDPPTFPALGTFSRYESTRSGRRMELSMGPIQANHTGTGLLLTLQPEQKFQKVKGFGGAMTDAAALNILALSPPAQNLLLKSYFSEEGIGYNIIRVPMASCDFSIRTYTYADTPDDFQLHNFSLPEEDTKLKIPLIHRALQLAQRPVSLLASPWTSPTWLKTNGAVNGKGSLKGQPGDIYHQTWARYFVKFLDAYAEHKLQFWAVTAENEPSAGLLSGYPFQCLGFTPEHQRDFIARDLGPTLANSTHHNVRLLMLDDQRLLLPHWAKVVLTDPEAAKYVHGIAVHWYLDFLAPAKATLGETHRLFPNTMLFASEACVGSKFWEQSVRLGSWDRGMQYSHSIITNLLYHVVGWTDWNLALNPEGGPNWVRNFVDSPIIVDITKDTFYKQPMFYHLGHFSKFIPEGSQRVGLVASQKNDLDAVALMHPDGSAVVVVLNRSSKDVPLTIKDPAVGFLETISPGYSIHTYLWRRQ

SEQ ID NO: 297740 - protein, 521 aa, Artificial Sequence
  derived and/or modified sequence
MEFSSPSREECPKPLSRVSIMAGSLTGLLLLQAVSWASGARPCIPKSFGYSSVVCVCNATYCDSFDPPTFPALGTFSRYESTRSGRRMELSMGPIQANHTGTGLLLTLQPDAAALNILALSPPAQNLLLKSYFSEEGIGYNIIRVPMASCDFSIRTYTYADTPDDFQLHNFSLPEEDTKLKIPLIHRALQLAQRPVSLLASPWTSPTWLKTNGAVNGKGSLKGQPGDIYHQTWARYFVKFLDAYAEHKLQFWAVTAENEPSAGLLSGYPFQCLGFTPEHQRDFIARDLGPTLANSTHHNVRLLMLDDQRLLLPHWAKVVLTDPEAAKYVHGIAVHWYLDFLAPAKATLGETHRLFPNTMLFASEACVGSKFWEQSVRLGSWDRGMQYSHSIITNLLYHVVGWTDWNLALNPEGGPNWVRNFVDSPIIVDITKDTFYKQPMFYHLGHFSKFIPEGSQRVGLVASQKNDLDAVALMHPDGSAVVVVLNRSSKDVPLTIKDPAVGFLETISPGYSIHTYLWRRQ

SEQ ID NO: 297741 - protein, 449 aa, Artificial Sequence
  derived and/or modified sequence
MELSMGPIQANHTGTGLLLTLQPEQKFQKVKGFGGAMTDAAALNILALSPPAQNLLLKSYFSEEGIGYNIIRVPMASCDFSIRTYTYADTPDDFQLHNFSLPEEDTKLKIPLIHRALQLAQRPVSLLASPWTSPTWLKTNGAVNGKGSLKGQPGDIYHQTWARYFVKFLDAYAEHKLQFWAVTAENEPSAGLLSGYPFQCLGFTPEHQRDFIARDLGPTLANSTHHNVRLLMLDDQRLLLPHWAKVVLTDPEAAKYVHGIAVHWYLDFLAPAKATLGETHRLFPNTMLFASEACVGSKFWEQSVRLGSWDRGMQYSHSIITNLLYHVVGWTDWNLALNPEGGPNWVRNFVDSPIIVDITKDTFYKQPMFYHLGHFSKFIPEGSQRVGLVASQKNDLDAVALMHPDGSAVVVVLNRSSKDVPLTIKDPAVGFLETISPGYSIHTYLWRRQ

SEQ ID NO: 297742 - protein, 493 aa, Artificial Sequence
  derived and/or modified sequence
MTLRGWSFQVLPESNATYCDSFDPPTFPALGTFSRYESTRSGRRMELSMGPIQANHTGTGLLLTLQPEQKFQKVKGFGGAMTDAAALNILALSPPAQNLLLKSYFSEEGIGYNIIRVPMASCDFSIRTYTYADTPDDFQLHNFSLPEEDTKLKIPLIHRALQLAQRPVSLLASPWTSPTWLKTNGAVNGKGSLKGQPGDIYHQTWARYFVKFLDAYAEHKLQFWAVTAENEPSAGLLSGYPFQCLGFTPEHQRDFIARDLGPTLANSTHHNVRLLMLDDQRLLLPHWAKVVLTDPEAAKYVHGIAVHWYLDFLAPAKATLGETHRLFPNTMLFASEACVGSKFWEQSVRLGSWDRGMQYSHSIITNLLYHVVGWTDWNLALNPEGGPNWVRNFVDSPIIVDITKDTFYKQPMFYHLGHFSKFIPEGSQRVGLVASQKNDLDAVALMHPDGSAVVVVLNRSSKDVPLTIKDPAVGFLETISPGYSIHTYLWRRQ

SEQ ID NO: 297743 - protein, 423 aa, Artificial Sequence
  derived and/or modified sequence
MEFSSPSREECPKPLSRVSIMAGSLTGLLLLQAVSWASGIGYNIIRVPMASCDFSIRTYTYADTPDDFQLHNFSLPEEDTKLKIPLIHRALQLAQRPVSLLASPWTSPTWLKTNGAVNGKGSLKGQPGDIYHQTWARYFVKFLDAYAEHKLQFWAVTAENEPSAGLLSGYPFQCLGFTPEHQRDFIARDLGPTLANSTHHNVRLLMLDDQRLLLPHWAKVVLTDPEAAKYVHGIAVHWYLDFLAPAKATLGETHRLFPNTMLFASEACVGSKFWEQSVRLGSWDRGMQYSHSIITNLLYHVVGWTDWNLALNPEGGPNWVRNFVDSPIIVDITKDTFYKQPMFYHLGHFSKFIPEGSQRVGLVASQKNDLDAVALMHPDGSAVVVVLNRSSKDVPLTIKDPAVGFLETISPGYSIHTYLWRRQ

SEQ ID NO: 297744 - DNA, 1754 bp, Artificial Sequence
  derived and/or modified sequence
gggaaataagagagaaaagaagagtaagaagaaatataagagccaccatggagttctcatccccctcgcgggaggaatgtcctaagccgttgtcccgggtgtcgattatggcagggagcctgaccggattgttgttgctgcaagcggtgtcgtgggcctcgggcgcacgaccctgcatccccaagtcctttgggtacagctcagtggtctgtgtgtgcaacgcgacctattgtgactcctttgatcccccgacttttccggccctgggtacattctcaagatatgagtcaaccagaagcggtcgccgcatggaactttcaatggggcccattcaggccaatcacactgggactggtctgctcttgactcttcagcctgagcagaagttccagaaggtcaagggtttcggcggtgcgatgacagacgcggctgcattgaatattctcgcgctgagcccgcctgcgcagaacctgcttctcaagtcgtacttctcggaggaaggtatcgggtataacattatccgagtaccaatggcgtcatgcgatttttcgattcgcacctacacgtacgctgacacgcctgacgatttccagttgcacaacttctcgctgccagaggaggacacgaaactgaaaattcccctcatccatagagcactgcagctcgcacaacggcccgtctcccttcttgcgagcccgtggacatcacccacctggttgaaaacgaacggcgcagtgaacgggaaaggaagccttaaggggcagcctggtgatatctaccaccagacatgggcacgatactttgtaaagttcttggacgcgtacgcagagcacaaacttcagttctgggcggtcactgccgaaaatgagccctcggcgggacttctgtcgggatatccgtttcagtgcttgggattcacgccggagcaccagagggatttcatcgctcgggatttgggtcccacactggcgaatagcacacaccataacgtacggcttttgatgctcgacgatcagcgactgctgctccctcactgggccaaagtggtactgaccgaccccgaggccgccaaatatgtgcatggaattgccgtgcactggtatctcgactttttggcaccggcgaaagcgactttgggcgaaacgcatcgcctcttcccgaatacgatgttgttcgcctcggaagcgtgtgtgggatcgaagttttgggaacaatccgtcaggttggggagctgggatcgggggatgcaatactcgcattcaatcatcaccaatcttttgtatcatgtggtaggatggacggactggaatctggcgcttaacccggaaggaggacctaattgggtgaggaatttcgtagactcgccgatcatcgtcgacatcacgaaggacacgttttacaaacagccgatgttttaccatcttggacacttttccaagtttatcccggaagggagccagagggtcggactcgtggcctcccaaaagaacgacctcgatgccgtcgcgctgatgcacccagatgggtccgctgtcgtggtcgtgcttaacagatcgtcaaaagatgtgcccctcactatcaaagatcccgcggtaggcttcttggaaacaatctcgccaggatactcaattcatacatatctgtggcgcaggcagtgataagctgccttctgcggggcttgccttctggccatgcccttcttctctcccttgcacctgtacctcttggtctttgaataaagcctgagtaggaag

SEQ ID NO: 297745 - DNA, 1611 bp, Artificial Sequence
  derived and/or modified sequence
atggagttcagcagccccagcagagaggagtgccccaagcccctgagcagagtgagcatcatggccggcagcctgaccggcctgctgctgctgcaggccgtgagctgggccagcggcgccagaccctgcatccccaagagcttcggctacagcagcgtggtgtgcgtgtgcaacgccacctactgcgacagcttcgacccccccaccttccccgccctgggcaccttcagcagatacgagagcaccagaagcggcagaagaatggagctgagcatgggccccatccaggccaaccacaccggcaccggcctgctgctgaccctgcagcccgagcagaagttccagaaggtgaagggcttcggcggcgccatgaccgacgccgccgccctgaacatcctggccctgagcccccccgcccagaacctgctgctgaagagctacttcagcgaggagggcatcggctacaacatcatcagagtgcccatggccagctgcgacttcagcatcagaacctacacctacgccgacacccccgacgacttccagctgcacaacttcagcctgcccgaggaggacaccaagctgaagatccccctgatccacagagccctgcagctggcccagagacccgtgagcctgctggccagcccctggaccagccccacctggctgaagaccaacggcgccgtgaacggcaagggcagcctgaagggccagcccggcgacatctaccaccagacctgggccagatacttcgtgaagttcctggacgcctacgccgagcacaagctgcagttctgggccgtgaccgccgagaacgagcccagcgccggcctgctgagcggctaccccttccagtgcctgggcttcacccccgagcaccagagagacttcatcgccagagacctgggccccaccctggccaacagcacccaccacaacgtgagactgctgatgctggacgaccagagactgctgctgccccactgggccaaggtggtgctgaccgaccccgaggccgccaagtacgtgcacggcatcgccgtgcactggtacctggacttcctggcccccgccaaggccaccctgggcgagacccacagactgttccccaacaccatgctgttcgccagcgaggcctgcgtgggcagcaagttctgggagcagagcgtgagactgggcagctgggacagaggcatgcagtacagccacagcatcatcaccaacctgctgtaccacgtggtgggctggaccgactggaacctggccctgaaccccgagggcggccccaactgggtgagaaacttcgtggacagccccatcatcgtggacatcaccaaggacaccttctacaagcagcccatgttctaccacctgggccacttcagcaagttcatccccgagggcagccagagagtgggcctggtggccagccagaagaacgacctggacgccgtggccctgatgcaccccgacggcagcgccgtggtggtggtgctgaacagaagcagcaaggacgtgcccctgaccatcaaggaccccgccgtgggcttcctggagaccatcagccccggctacagcatccacacctacctgtggagaagacagtag

SEQ ID NO: 297746 - DNA, 1566 bp, Artificial Sequence
  derived and/or modified sequence
atggagttcagcagccccagcagagaggagtgccccaagcccctgagcagagtgagcatcatggccggcagcctgaccggcctgctgctgctgcaggccgtgagctgggccagcggcgccagaccctgcatccccaagagcttcggctacagcagcgtggtgtgcgtgtgcaacgccacctactgcgacagcttcgacccccccaccttccccgccctgggcaccttcagcagatacgagagcaccagaagcggcagaagaatggagctgagcatgggccccatccaggccaaccacaccggcaccggcctgctgctgaccctgcagcccgacgccgccgccctgaacatcctggccctgagcccccccgcccagaacctgctgctgaagagctacttcagcgaggagggcatcggctacaacatcatcagagtgcccatggccagctgcgacttcagcatcagaacctacacctacgccgacacccccgacgacttccagctgcacaacttcagcctgcccgaggaggacaccaagctgaagatccccctgatccacagagccctgcagctggcccagagacccgtgagcctgctggccagcccctggaccagccccacctggctgaagaccaacggcgccgtgaacggcaagggcagcctgaagggccagcccggcgacatctaccaccagacctgggccagatacttcgtgaagttcctggacgcctacgccgagcacaagctgcagttctgggccgtgaccgccgagaacgagcccagcgccggcctgctgagcggctaccccttccagtgcctgggcttcacccccgagcaccagagagacttcatcgccagagacctgggccccaccctggccaacagcacccaccacaacgtgagactgctgatgctggacgaccagagactgctgctgccccactgggccaaggtggtgctgaccgaccccgaggccgccaagtacgtgcacggcatcgccgtgcactggtacctggacttcctggcccccgccaaggccaccctgggcgagacccacagactgttccccaacaccatgctgttcgccagcgaggcctgcgtgggcagcaagttctgggagcagagcgtgagactgggcagctgggacagaggcatgcagtacagccacagcatcatcaccaacctgctgtaccacgtggtgggctggaccgactggaacctggccctgaaccccgagggcggccccaactgggtgagaaacttcgtggacagccccatcatcgtggacatcaccaaggacaccttctacaagcagcccatgttctaccacctgggccacttcagcaagttcatccccgagggcagccagagagtgggcctggtggccagccagaagaacgacctggacgccgtggccctgatgcaccccgacggcagcgccgtggtggtggtgctgaacagaagcagcaaggacgtgcccctgaccatcaaggaccccgccgtgggcttcctggagaccatcagccccggctacagcatccacacctacctgtggagaagacagtag

SEQ ID NO: 297747 - DNA, 1350 bp, Artificial Sequence
  derived and/or modified sequence
atggagctgagcatgggccccatccaggccaaccacaccggcaccggcctgctgctgaccctgcagcccgagcagaagttccagaaggtgaagggcttcggcggcgccatgaccgacgccgccgccctgaacatcctggccctgagcccccccgcccagaacctgctgctgaagagctacttcagcgaggagggcatcggctacaacatcatcagagtgcccatggccagctgcgacttcagcatcagaacctacacctacgccgacacccccgacgacttccagctgcacaacttcagcctgcccgaggaggacaccaagctgaagatccccctgatccacagagccctgcagctggcccagagacccgtgagcctgctggccagcccctggaccagccccacctggctgaagaccaacggcgccgtgaacggcaagggcagcctgaagggccagcccggcgacatctaccaccagacctgggccagatacttcgtgaagttcctggacgcctacgccgagcacaagctgcagttctgggccgtgaccgccgagaacgagcccagcgccggcctgctgagcggctaccccttccagtgcctgggcttcacccccgagcaccagagagacttcatcgccagagacctgggccccaccctggccaacagcacccaccacaacgtgagactgctgatgctggacgaccagagactgctgctgccccactgggccaaggtggtgctgaccgaccccgaggccgccaagtacgtgcacggcatcgccgtgcactggtacctggacttcctggcccccgccaaggccaccctgggcgagacccacagactgttccccaacaccatgctgttcgccagcgaggcctgcgtgggcagcaagttctgggagcagagcgtgagactgggcagctgggacagaggcatgcagtacagccacagcatcatcaccaacctgctgtaccacgtggtgggctggaccgactggaacctggccctgaaccccgagggcggccccaactgggtgagaaacttcgtggacagccccatcatcgtggacatcaccaaggacaccttctacaagcagcccatgttctaccacctgggccacttcagcaagttcatccccgagggcagccagagagtgggcctggtggccagccagaagaacgacctggacgccgtggccctgatgcaccccgacggcagcgccgtggtggtggtgctgaacagaagcagcaaggacgtgcccctgaccatcaaggaccccgccgtgggcttcctggagaccatcagccccggctacagcatccacacctacctgtggagaagacagtag

SEQ ID NO: 297748 - DNA, 1482 bp, Artificial Sequence
  derived and/or modified sequence
atgaccctgagaggctggagcttccaggtgctgcccgagagcaacgccacctactgcgacagcttcgacccccccaccttccccgccctgggcaccttcagcagatacgagagcaccagaagcggcagaagaatggagctgagcatgggccccatccaggccaaccacaccggcaccggcctgctgctgaccctgcagcccgagcagaagttccagaaggtgaagggcttcggcggcgccatgaccgacgccgccgccctgaacatcctggccctgagcccccccgcccagaacctgctgctgaagagctacttcagcgaggagggcatcggctacaacatcatcagagtgcccatggccagctgcgacttcagcatcagaacctacacctacgccgacacccccgacgacttccagctgcacaacttcagcctgcccgaggaggacaccaagctgaagatccccctgatccacagagccctgcagctggcccagagacccgtgagcctgctggccagcccctggaccagccccacctggctgaagaccaacggcgccgtgaacggcaagggcagcctgaagggccagcccggcgacatctaccaccagacctgggccagatacttcgtgaagttcctggacgcctacgccgagcacaagctgcagttctgggccgtgaccgccgagaacgagcccagcgccggcctgctgagcggctaccccttccagtgcctgggcttcacccccgagcaccagagagacttcatcgccagagacctgggccccaccctggccaacagcacccaccacaacgtgagactgctgatgctggacgaccagagactgctgctgccccactgggccaaggtggtgctgaccgaccccgaggccgccaagtacgtgcacggcatcgccgtgcactggtacctggacttcctggcccccgccaaggccaccctgggcgagacccacagactgttccccaacaccatgctgttcgccagcgaggcctgcgtgggcagcaagttctgggagcagagcgtgagactgggcagctgggacagaggcatgcagtacagccacagcatcatcaccaacctgctgtaccacgtggtgggctggaccgactggaacctggccctgaaccccgagggcggccccaactgggtgagaaacttcgtggacagccccatcatcgtggacatcaccaaggacaccttctacaagcagcccatgttctaccacctgggccacttcagcaagttcatccccgagggcagccagagagtgggcctggtggccagccagaagaacgacctggacgccgtggccctgatgcaccccgacggcagcgccgtggtggtggtgctgaacagaagcagcaaggacgtgcccctgaccatcaaggaccccgccgtgggcttcctggagaccatcagccccggctacagcatccacacctacctgtggagaagacagtag

SEQ ID NO: 297749 - DNA, 1611 bp, Artificial Sequence
  derived and/or modified sequence
atggagttcagctccccttctcgggaagagtgccccaagcccctgagcagggtcagtattatggcagggagccttaccgggctccttctgcttcaggccgttagttgggcctctggcgcgcggccttgcatccccaagagcttcgggtactcctccgtcgtttgtgtctgtaacgctacttactgtgattctttcgaccctccaacctttcccgcgctgggcacattctcccgctacgagagcacacgcagcgggcgccgcatggaattaagtatgggacccatccaagcgaaccacactgggactggcttgctgctcactttgcagcccgagcagaaatttcagaaggtgaagggctttgggggggctatgaccgacgctgccgctctgaacatcctggccctaagtccacccgcccagaatctgctccttaaatcttacttcagcgaggagggtatcggctataacatcatccgtgtacccatggccagctgcgactttagtatccgcacctacacctacgcagacacacctgacgactttcagcttcataactttagcctccctgaagaagatacaaagcttaagattccactcatccacagagccctgcagttggcccagcgtcccgtctcgctcctcgccagtccttggacttcccccacatggctgaagaccaacggtgcagtgaatgggaagggatctctgaagggacaaccgggggatatatatcaccaaacttgggccaggtatttcgtgaaattcctggatgcctatgccgagcacaaactgcaattctgggccgtgaccgccgaaaatgaacccagcgccggtctgctgtcaggctaccccttccagtgcctggggttcactcctgaacaccagagggattttatcgctcgcgacctgggtccgactctcgccaattccactcatcataatgttaggcttctcatgttggacgaccagcggcttttgttacctcactgggcaaaggttgtactcaccgatcctgaagccgcaaaatacgtgcatggaatagcagtgcattggtatttggacttcctggcaccagccaaggcgacactcggcgaaacacatcggctgttccccaacaccatgctcttcgcaagtgaggcctgcgtcggcagcaagttttgggagcaatccgtgcggctgggaagttgggacaggggaatgcagtactcacattccattattactaaccttttatatcacgtagtcggctggacagattggaaccttgcattgaatcccgaggggggtcctaactgggtaagaaactttgttgattcgccaattattgtggacatcacaaaggatacattttataaacaacctatgttttatcatctcggtcatttctcaaagtttattcctgagggcagtcagcgggttggactggttgcgagccaaaagaatgacttagatgcagtcgctctgatgcatccggatgggtccgctgttgtagtggtcctgaaccgcagctcgaaggacgtgccactcaccattaaagatccagccgtcggattcttggaaactatctcgcctggttatagcattcatacctatctgtggagaaggcagtag

SEQ ID NO: 297750 - DNA, 1611 bp, Artificial Sequence
  derived and/or modified sequence
atggagttcagcagcccaagccgggaggagtgccccaagccgctgagtcgggtatccattatggccggctccctgacggggctactactgcttcaggccgtcagctgggccagcggagcgcggccctgtatacctaaatctttcggttactcctctgtggtttgcgtctgcaacgctacatactgcgatagcttcgaccctcctacttttccggctctaggaactttcagtcgctacgagagtactaggtccggacggcgtatggaactgtccatgggcccaattcaggctaaccacactgggactggactgcttttgaccctgcagccagagcagaaatttcaaaaggttaaagggtttggcggggcgatgacggatgctgccgcccttaacattctcgcgcttagtccacccgctcaaaacctgctgctgaagtcctatttcagcgaggaaggaatcggttacaatattatcagggtgcccatggcatcttgtgactttagtataaggacatatacctatgcagatactcctgacgactttcaactccacaacttcagcttgcctgaggaggataccaaactgaagatccctctgatacaccgcgcattacagctcgctcagaggcccgtgtctctgctggcctccccatggacatccccaacatggctgaagacaaacggagcggtgaatggcaagggcagcctcaaagggcaaccgggtgatatctaccaccagacctgggccaggtattttgttaagttcctcgacgcctatgcagaacacaaattgcagttctgggccgttacagccgaaaacgagccaagcgcaggcctgctgagcgggtacccattccagtgcctcggattcactcccgaacaccagcgtgacttcattgctcgggatcttggtcccaccttggctaattctacccaccacaatgtgcggctcctcatgctcgacgaccagcgcctactcctaccgcactgggcaaaggtagtgttgaccgatcctgaggcagccaagtacgtccacggcattgcagtccactggtacctcgatttcctcgcaccagcaaaagcaaccctaggcgagacgcatcgactgttccctaataccatgctgttcgccagtgaagcttgcgtcggaagtaaattctgggaacaaagtgttcggctgggctcctgggataggggtatgcaatacagccatagtataatcacgaaccttctgtaccatgtggtgggatggactgactggaacttagcactcaacccggaaggaggtccaaactgggtgcgcaattttgtggattccccaattatcgtggatattacaaaagacaccttttacaagcaaccgatgttctaccacttgggccactttagcaagttcattccagaggggagccaacgcgtgggactggtcgcatcacagaaaaatgatctggacgctgtcgccctgatgcaccccgacgggagtgccgtcgttgttgttttaaatagaagctccaaagacgtgcctttgaccatcaaggacccggcagtgggtttcctggagaccatatcccctggttactccattcacacttacctgtggagacgtcagtag

SEQ ID NO: 297751 - DNA, 1566 bp, Artificial Sequence
  derived and/or modified sequence
atggagttctcctctccctcacgggaagagtgtccgaaaccgttgtccagagtaagcatcatggctggatctcttacgggcctgttgttgttacaggccgtgtcttgggccagcggagcaaggccttgtattcccaaatctttcgggtactctagtgtagtgtgtgtgtgcaacgctacgtattgcgactcttttgatcctccaaccttccctgccctcggtacattctccaggtacgagtcaacgcgctccggaaggcggatggaactgagcatgggccctatacaagccaatcataccggaactggccttctcttaactctgcaaccagacgccgctgcactgaatatattagcgctgtcgccgccggcacagaatcttctgctgaaatcttatttcagtgaggaaggcatcgggtataacattatacgcgtgcccatggcgagctgcgacttttctattagaacatacacctacgcagatacgcctgacgactttcagctgcataactttagtctccccgaagaagacactaagctaaagatccccttgatccaccgagccctgcaactggcccaacgtcctgtgtccctactggctagcccatggaccagtcctacatggctaaagaccaacggagctgtgaatggtaagggatccctaaaaggacagccaggagatatataccatcagacttgggcgagatacttcgtcaaatttctagatgcctatgctgagcacaagttgcagttctgggccgttacagcagagaatgaaccatccgcagggttgctatcaggttacccatttcagtgcctcggattcaccccggaacatcagcgagatttcatcgcgagggatctgggcccaacactcgcaaacagcactcatcacaacgttaggctgcttatgttggacgatcaacgcctgttactgcctcactgggctaaggtcgtgctcaccgaccctgaagcggccaagtacgttcacggcattgcggtacactggtacttggattttctcgcgcctgctaaagctacactgggcgagactcatcgcctgtttcccaacacaatgctgttcgccagtgaagcctgtgttggctcaaaattttgggagcagagcgtccgactggggagctgggatcggggaatgcagtacagccactcgatcataacaaatcttttataccatgtggtgggctggacagactggaacttggctcttaacccagaagggggacctaactgggtgcgtaactttgtggacagcccaatcattgttgatatcacaaaggatacgttctacaaacagcctatgttttaccacctggggcacttctcgaagtttatacctgaggggagtcagcgtgtgggcctcgtggccagccaaaagaacgatctggacgctgtcgccctgatgcaccctgacggctccgcggttgtggttgtccttaatagatcttcaaaggatgtcccactcactattaaagaccctgccgtcgggttcctggagactatctctccaggctattctattcacacatatctctggcgaaggcagtag

SEQ ID NO: 297752 - DNA, 1350 bp, Artificial Sequence
  derived and/or modified sequence
atggagctgtcaatggggccgattcaggccaatcacaccggaacagggcttctccttaccttgcaacccgagcagaagtttcagaaggtgaaaggctttggtggcgctatgacagatgctgcagccttgaacatcttagccttgagtccacccgcccagaacctcctgttgaaatcctacttttccgaggaaggcattggctataatattatacgtgtgccaatggccagctgcgatttctcgatcagaacgtacacctatgctgatactcccgatgattttcaacttcataacttttctctccccgaagaggacacaaagttgaaaattcccctcattcacagagccctccagctggcacagaggccagtcagtctcctagcctcaccctggacttcccctacttggctgaagacgaatggagccgttaacggtaaaggctccctcaagggacagccaggcgacatttatcaccagacatgggcaaggtatttcgtgaagttcctcgacgcttacgccgagcacaaactgcaattttgggccgtgactgcggagaacgaacctagtgctgggctgctgtccgggtacccttttcaatgcttaggctttacccctgagcatcagcgggactttatcgcgagagatctcggtcctaccttggccaatagtacgcaccataacgtgcgattgctgatgcttgatgaccaacgccttctgttgcctcattgggcaaaggtagtattgaccgatcccgaagcagctaaatacgtgcatgggattgccgtgcattggtacctcgattttcttgctcccgccaaggccactctgggagagacccacaggttgtttccgaatacaatgctgtttgcttctgaagcctgcgttggcagcaagttctgggaacagtcagtgcgtctcgggtcatgggaccgtggcatgcagtatagccactccatcattacaaacctgctgtatcatgtggtaggttggaccgattggaatttggctctgaatcccgaaggcggaccaaactgggtccgaaatttcgtggactcacccatcattgtggacattacgaaagatacgttttacaagcagcccatgttttatcacctgggacacttctccaagttcatccccgagggctcacagagggttggcctcgtagcaagccagaaaaacgatctggatgctgtggctctgatgcaccctgacggttctgcggtcgtggtcgtgttgaacagatcgtctaaggacgttcccctaactatcaaggaccccgcggtaggctttcttgagaccatcagtcccgggtactcgatccacacttacctgtggcgccgccagtag

SEQ ID NO: 297753 - DNA, 1482 bp, Artificial Sequence
  derived and/or modified sequence
atgacacttaggggatggtcattccaggtgttgcccgagtctaacgctacctattgcgatagctttgatccacccactttccctgctctcggaacctttagtagatacgagagcacacggtccgggcgacggatggagttgagtatggggcctatccaagccaaccacaccggaaccggcttgctgctcacccttcagccggagcagaagttccagaaggtcaaagggtttgggggagccatgaccgatgcagctgcactgaacatacttgcccttagtccgcccgcccaaaacttgcttttaaagagctacttttccgaggagggaattggctacaatattatcagagttccgatggcatcctgcgacttctctattagaacatacacatacgcagacacccctgacgattttcagctccacaacttttcacttccagaggaagatacaaagctcaaaattccactaatccaccgggctctacaactggcgcagcgaccggtttcacttctggctagcccctggacctctcccacttggctgaaaactaacggggccgtgaatggtaaaggcagccttaaggggcaacctggagacatctatcaccagacctgggcgcgctatttcgtgaaatttttggatgcatatgccgagcataagctacagttctgggccgtaaccgctgagaatgaacccagcgctggcctgctaagcggataccctttccaatgtcttgggtttactcccgaacaccagagggacttcattgctagggacctaggacctaccttggctaattcaacacatcacaacgtccggcttcttatgctggatgatcagaggctattattaccgcattgggcaaaggtggtcctgaccgatccagaggcagccaagtatgtgcacggcatcgcggtgcactggtaccttgattttttggccccagccaaggcaacattgggagagacccacagactgtttccaaataccatgttgtttgctagtgaagcttgcgtaggcagcaaattttgggagcaatcagtacgtttgggctcctgggatcgcggtatgcaatactcccactccatcatcaccaatctgctgtaccacgtagtgggatggacagattggaacctcgctttaaaccctgaaggcggaccaaactgggtgcgtaactttgtcgatagcccaatcatagtggatatcacaaaggacactttttacaaacagccaatgttttatcacttggggcattttagcaaatttatccctgaaggctctcagagggtcgggctcgtggcttctcagaaaaatgatctggacgccgtagccctaatgcatcccgatggttctgccgttgtggtagtactgaaccgcagcagcaaggacgtccctctgaccatcaaagatcccgccgtgggctttctcgagacgatttctccgggctattctatacacacctatctgtggcggcggcaatag

SEQ ID NO: 297754 - DNA, 1611 bp, Artificial Sequence
  derived and/or modified sequence
atggagttcagcagccccagccgggaggagtgccccaagcccctgagccgggtgtccatcatggccggcagcctgaccggcctgctgctgctgcaggccgtgtcctgggccagcggggcccggccctgcatccccaagagctttggctacagctctgtggtgtgtgtgtgcaatgccacctactgtgacagctttgatcctcccaccttccctgccctgggcaccttcagccgctatgagagcaccaggagcggccgcaggatggagctgtccatgggccccatccaggccaaccacacaggcaccggcctgctgctgaccctgcagcctgagcagaagttccagaaggtgaagggctttggaggagccatgacagatgctgctgccctgaacatcctggccctgagccccccagcccagaacctgctgctgaagagctacttcagcgaggagggcatcggctacaacatcatccgggtgcccatggccagctgtgacttcagcatccgcacctacacctatgctgacaccccagatgacttccagctgcacaacttcagcctgcctgaggaggacaccaagctgaagatccccctcatccaccgggccctgcagctggcccagaggcctgtgtccctgctggccagcccctggaccagccccacctggctgaagaccaatggagctgtgaatggcaagggcagcctgaagggccagcccggggacatctaccaccagacctgggcccgctactttgtgaagttcctggatgcctatgcagagcacaagctgcagttctgggccgtgacagcagaaaatgagcccagcgctggcctgctgagcggctaccccttccagtgcctgggcttcaccccagagcaccagagggacttcatcgcccgggacctgggccccaccctggccaacagcacccaccacaacgtgcggctgctgatgctggatgaccagaggctgctgctgccccactgggccaaggtggtgctgacagatcctgaggccgccaagtatgtgcatggaattgctgtgcactggtacctggacttcctggccccagccaaggccaccctgggggagacccacaggctcttccccaacaccatgctgtttgccagcgaggcctgtgtgggcagcaagttctgggagcagagcgtgcggctgggctcctgggaccggggcatgcagtacagccacagcatcatcaccaacctgctgtaccacgtggtgggctggacagactggaacctggccctgaaccctgagggcggccccaactgggtgaggaactttgtggacagccccatcatcgtggacatcaccaaggacaccttctacaagcagcccatgttctaccacctgggccacttcagcaagttcatccctgagggcagccagagggtgggcctggtggccagccagaagaatgacctggatgctgtggccctgatgcacccagatggcagcgctgtggtggtggtgctgaacagaagcagcaaggatgtgcccctgaccatcaaggaccctgctgtgggcttcctggagaccatcagccctggctacagcatccacacctacctgtggaggcggcagtag

SEQ ID NO: 297755 - DNA, 1566 bp, Artificial Sequence
  derived and/or modified sequence
atggagttcagcagccccagccgggaggagtgccccaagcccctgagccgggtgtccatcatggccggcagcctgaccggcctgctgctgctgcaggccgtgtcctgggccagcggggcccggccctgcatccccaagagctttggctacagctctgtggtgtgtgtgtgcaatgccacctactgtgacagctttgatcctcccaccttccctgccctgggcaccttcagccgctatgagagcaccaggagcggccgcaggatggagctgtccatgggccccatccaggccaaccacacaggcaccggcctgctgctgaccctgcagccagatgctgctgccctgaacatcctggccctgagccccccagcccagaacctgctgctgaagagctacttcagcgaggagggcatcggctacaacatcatccgggtgcccatggccagctgtgacttcagcatccgcacctacacctacgccgacaccccagatgacttccagctgcacaacttcagcctgcctgaggaggacaccaagctgaagatccccctcatccaccgggccctgcagctggcccagaggcctgtgtccctgctggccagcccctggaccagccccacctggctgaagaccaacggggctgtgaatggcaagggcagcctgaagggccagcccggggacatctaccaccagacctgggcccgctactttgtgaagttcctggatgcctatgcagagcacaagctgcagttctgggccgtgacagcagaaaatgagcccagcgctggcctgctgagcggctaccccttccagtgcctgggcttcaccccagagcaccagagggacttcatcgcccgggacctgggccccaccctggccaacagcacccaccacaacgtgcggctgctgatgctggatgaccagaggctgctgctgccccactgggccaaggtggtgctgacagatcctgaggccgccaagtatgtgcacggcattgctgtgcactggtacctggacttcctggccccagccaaggccaccctgggggagacccacaggctcttccccaacaccatgctgtttgccagcgaggcctgtgtgggcagcaagttctgggagcagagcgtgcggctgggctcctgggaccggggcatgcagtacagccacagcatcatcaccaacctgctgtaccacgtggtgggctggacagactggaacctggccctgaaccctgagggcggccccaactgggtgaggaactttgtggacagccccatcatcgtggacatcaccaaggacaccttctacaagcagcccatgttctaccacctgggccacttcagcaagttcatccctgagggcagccagagggtgggcctggtggccagccagaagaatgacctggatgctgtggccctgatgcacccagatggcagcgctgtggtggtggtgctgaacagaagcagcaaggatgtgcccctgaccatcaaggaccctgctgtgggcttcctggagaccatcagccctggctacagcatccacacctacctgtggaggcggcagtag

SEQ ID NO: 297756 - DNA, 1350 bp, Artificial Sequence
  derived and/or modified sequence
atggagctgtccatgggccccatccaggccaaccacactggaacaggcctgctgctgaccctgcagcctgagcagaagttccagaaggtgaagggctttggaggagccatgacagatgctgctgccctgaacatcctggccctgagccccccagcccagaacctgctgctgaagagctacttcagcgaggagggcatcggctacaacatcatccgggtgcccatggccagctgtgacttcagcatccgcacctacacctacgccgacaccccagatgacttccagctgcacaacttcagcctgcctgaggaggacaccaagctgaagatccccctcatccaccgggccctgcagctggcccagaggcctgtgtccctgctggccagcccctggaccagccccacctggctgaagaccaacggggctgtgaatggcaagggcagcctgaagggccagcccggggacatctaccaccagacctgggcccgctactttgtgaagttcctggatgcctatgcagagcacaagctgcagttctgggccgtgacagcagaaaatgagcccagcgctggcctgctgagcggctaccccttccagtgcctgggcttcaccccagagcaccagagggacttcatcgcccgggacctgggccccaccctggccaacagcacccaccacaacgtgcggctgctgatgctggatgaccagaggctgctgctgccccactgggccaaggtggtgctgacagatcctgaggccgccaagtatgtgcacggcattgctgtgcactggtacctggacttcctggccccagccaaggccaccctgggggagacccacaggctcttccccaacaccatgctgtttgccagcgaggcctgtgtgggcagcaagttctgggagcagagcgtgcggctgggctcctgggaccggggcatgcagtacagccacagcatcatcaccaacctgctgtaccacgtggtgggctggacagactggaacctggccctgaaccctgagggcggccccaactgggtgaggaactttgtggacagccccatcatcgtggacatcaccaaggacaccttctacaagcagcccatgttctaccacctgggccacttcagcaagttcatccctgagggcagccagagggtgggcctggtggccagccagaagaatgacctggatgctgtggccctgatgcacccagatggcagcgctgtggtggtggtgctgaacagaagcagcaaggatgtgcccctgaccatcaaggaccctgctgtgggcttcctggagaccatcagccctggctacagcatccacacctacctgtggaggcggcagtag

SEQ ID NO: 297757 - DNA, 1482 bp, Artificial Sequence
  derived and/or modified sequence
atgaccctgcggggctggagcttccaggtgctgcctgagagcaatgccacctactgtgacagctttgacccccccaccttccctgccctgggcaccttcagccgctatgagagcaccaggtctggaagaaggatggagctgtccatgggccccatccaggccaaccacactggaacaggcctgctgctgaccctgcagcctgagcagaagttccagaaggtgaagggctttggaggagccatgacagatgctgctgccctgaacatcctggccctgagccccccagcccagaacctgctgctgaagagctacttcagcgaggagggcatcggctacaacatcatccgggtgcccatggccagctgtgacttcagcatccgcacctacacctacgccgacaccccagatgacttccagctgcacaacttcagcctgcctgaggaggacaccaagctgaagatccccctcatccaccgggccctgcagctggcccagaggcctgtgtccctgctggccagcccctggaccagccccacctggctgaagaccaacggggctgtgaatggcaagggcagcctgaagggccagcccggggacatctaccaccagacctgggcccgctactttgtgaagttcctggatgcctatgcagagcacaagctgcagttctgggccgtgacagcagaaaatgagcccagcgctggcctgctgagcggctaccccttccagtgcctgggcttcaccccagagcaccagagggacttcatcgcccgggacctgggccccaccctggccaacagcacccaccacaacgtgcggctgctgatgctggatgaccagaggctgctgctgccccactgggccaaggtggtgctgacagatcctgaggccgccaagtatgtgcacggcattgctgtgcactggtacctggacttcctggccccagccaaggccaccctgggggagacccacaggctcttccccaacaccatgctgtttgccagcgaggcctgtgtgggcagcaagttctgggagcagagcgtgcggctgggctcctgggaccggggcatgcagtacagccacagcatcatcaccaacctgctgtaccacgtggtgggctggacagactggaacctggccctgaaccctgagggcggccccaactgggtgaggaactttgtggacagccccatcatcgtggacatcaccaaggacaccttctacaagcagcccatgttctaccacctgggccacttcagcaagttcatccctgagggcagccagagggtgggcctggtggccagccagaagaatgacctggatgctgtggccctgatgcacccagatggcagcgctgtggtggtggtgctgaacagaagcagcaaggatgtgcccctgaccatcaaggaccctgctgtgggcttcctggagaccatcagccctggctacagcatccacacctacctgtggaggcggcagtag

SEQ ID NO: 297758 - DNA, 1611 bp, Artificial Sequence
  derived and/or modified sequence
atggagttcagcagccccagccgggaggagtgccccaagcccctgtctcgcgtgagcatcatggcaggcagtctcacgggactgctgctgctgcaagctgtcagctgggctagcggggctagaccatgtatccccaagagttttggctactctagcgtagtgtgtgtatgcaatgcaacttattgcgactcttttgatcctcctacatttcccgcattaggtaccttctcgagatatgaaagcaccagatcgggccggagaatggaactgtcgatggggcctattcaagcgaaccacaccgggactggactgttgcttactctacagcccgaacaaaaattccaaaaggttaagggattcggaggagccatgactgatgctgccgcccttaacattttagccctatctccccctgcgcagaatctgttactgaaatcttacttttccgaggaagggatcggctataacatcatccgcgtgcctatggccagttgtgatttctccattaggacatacacatatgccgatacgcccgatgacttccagctgcataacttttcacttcctgaggaagataccaagctgaagatccctctgattcatcgggccctccagttggcccaaaggcctgtatcactgctggcaagcccctggacctcccctacatggctcaaaacaaacggcgcggtgaatgggaaagggtccctcaagggtcagcctggcgatatctatcaccaaacgtgggcaagatacttcgttaagtttctggacgcttatgccgaacacaaactgcagttctgggctgtgaccgcagagaatgaacccagtgccggtctgctctccggttacccatttcagtgcctgggttttacgcccgagcaccagagagacttcattgccagggatctcggccccactttggcaaactcaactcaccacaacgttaggttactgatgcttgatgatcagcgcttgctcctgccacactgggctaaggtagtcctgacagatcctgaggcagccaaatacgtccacggaatagcggtacactggtatttagacttcctggctcctgctaaagctaccctaggcgagacccatcgcctgtttcccaacactatgctgttcgcctcagaggcctgtgtggggagcaaattctgggaacagtccgtgaggctggggagttgggacagaggcatgcagtactcacatagtatcataaccaacctgttataccacgtcgttggttggaccgattggaacctagcactcaacccggaaggcggtccaaattgggtgaggaacttcgtggattctcccataatcgtcgatattacaaaagatactttttacaaacagccaatgttctaccacttggggcacttctcaaagtttatccccgaaggcagtcaaagagtggggctggtcgctagccagaaaaatgacttggacgctgtagctctaatgcacccagacggatccgcagttgtggttgttctgaaccgctcatctaaggacgtcccactgaccattaaggatcccgcagtaggatttctggagacaatcagccctggatatagtatccacacttacctttggcggagacagtag

SEQ ID NO: 297759 - DNA, 1611 bp, Artificial Sequence
  derived and/or modified sequence
atggagttcagcagccccagccgggaggagtgccccaagcccctgtcgcgggtgagtatcatggctggcagtctgactggccttctgctgctgcaagcagtgtcctgggctagtggagcgaggccatgtatccccaagtctttcggctattcctccgtcgtctgcgtatgtaacgccacctattgcgactcatttgaccctccaacttttcccgcccttggtactttcagccgctacgagagtacacgctcgggtagacgcatggagctcagcatgggtccaatccaagctaaccacacaggaaccggcttgttactcactctacagcccgagcagaagttccagaaggtaaagggcttcggaggtgccatgacagacgcagcggcgttgaatatcctggccctgagtccacctgcacagaatttgttactcaaatcttacttttctgaagagggaattggatataatataatacgtgtgccaatggcgtcttgtgatttctccatcagaacctacacttatgccgatacaccagatgactttcagctgcataacttctccctacctgaggaagatacgaaactcaagattccgttgattcatagagcgttacagcttgcccagcgccctgtgtcgctcttggctagcccatggacaagtcctacctggctcaagaccaatggcgccgtgaatggaaagggtagcctaaagggccagcccggggatatttaccaccagacctgggcacgttatttcgtaaaatttcttgacgcctatgctgagcataaactgcagttctgggccgttaccgctgaaaatgagccatcagccgggctcctctccggctaccctttccagtgcttgggcttcacccccgaacaccagcgagacttcattgcaagggacctgggccctactctcgctaatagcacacatcacaacgtcagactattgatgttagatgatcagcgactgcttctgcctcactgggccaaggtagttttgaccgacccagaggctgcgaaatatgtccatggcattgctgtgcactggtacctggacttcctggcaccagctaaagctaccctgggagagacccaccggctgtttcctaacacgatgttgtttgcttccgaggcatgtgtgggttccaagttctgggagcagtccgttcggctggggtcgtgggaccgaggtatgcagtattcccattctatcatcacgaacttgctgtaccatgtggtcggctggaccgactggaatctggcgttgaacccggaaggtgggcctaactgggtccgtaacttcgtagactcaccgattatcgtcgacatcaccaaagatactttctacaaacagccgatgttttaccatctgggccacttctccaagttcattcccgaggggtcccaacgcgtaggcctggtggcctcacagaagaacgacctggatgccgtcgctctaatgcatcctgatggttcagcagttgttgtggtgttgaaccgcagttctaaagacgtgccactcaccatcaaggacccagccgtgggttttctcgagactatatcccccggttattccatccacacttatctatggcgccgtcagtag

SEQ ID NO: 297760 - DNA, 1566 bp, Artificial Sequence
  derived and/or modified sequence
atggagttcagcagccccagccgggaggagtgccccaagcccctgagccgggtgtccatcatggctggatcactcactggcctcctgttgctgcaggcagtgtcttgggcaagtggggcccgcccctgcattcccaagagctttggctattccagcgtcgtttgcgtctgcaacgctacatattgcgactcctttgatccgccaacattcccagcattagggaccttcagccggtacgagagcactaggagcggacgtagaatggagctgtccatgggtcctatccaggctaaccatactggcactggcctcctcctgactcttcagcccgacgccgctgctcttaatattctggcactttccccacccgctcagaacctcctccttaagtcttacttttctgaagagggcatcggctacaacataattcgggtgccgatggccagctgtgacttcagcatccgcacttacacatacgccgacaccccagatgatttccagctgcacaatttctcactacccgaagaagacactaagctaaaaatccccctgatccaccgcgcgctccaacttgcccaaagacccgtgagcctgctggctagtccctggactagccctacttggctgaaaacaaatggcgcagtgaatgggaagggtagtctgaaggggcagcctggggatatctaccatcagacttgggccagatactttgtcaaatttctcgacgcatatgcagagcacaaactacagttctgggctgtgacagctgagaatgaaccctccgccgggcttcttagcgggtaccctttccaatgtcttggattcacaccagagcatcaaagggatttcatcgctagagatcttggcccgacactggccaactccactcaccacaacgtgcggctactgatgctcgatgatcagcgactgctgcttccccattgggccaaagttgtgctcacagaccccgaagctgccaaatatgtgcatggaatagcggtgcactggtacttggactttcttgcccccgcaaaggccactctgggcgaaacccatagattgttcccgaatacaatgctgttcgcgagcgaagcttgcgtggggtccaaattttgggagcagtcagtacgactaggttcttgggataggggaatgcagtatagccatagtataataaccaatctgctatatcatgtggtgggatggacagattggaacctggccctgaacccagagggggggcctaattgggtacgaaacttcgtcgacagtcctatcatcgttgatattaccaaggacacattttacaagcagccaatgttttaccatctcgggcactttagcaaattcataccagagggctctcagagagtcggcctggttgccagtcaaaagaacgacttagacgccgtggctctgatgcatcccgacgggagcgcagtagtggtggttctgaacagatcgtcaaaggacgtccctttgactatcaaagatccagccgtgggattcctcgagaccatcagtccggggtattccattcacacctatctgtggaggcgccagtag

SEQ ID NO: 297761 - DNA, 1350 bp, Artificial Sequence
  derived and/or modified sequence
atggagctgagcatgggccccatccaggccaaccacaccggcaccggactactgctgacattacagcctgaacagaaattccaaaaggtgaaaggattcgggggcgccatgaccgacgccgcagcgctcaatattcttgcactgtcacctccggcacaaaatctgttactcaaatcctacttttcagaagagggaatcggatataatattattcgcgtgccaatggctagctgcgatttctccatccgcacttatacctacgcagatacgcccgatgacttccagctgcacaacttttctctgcccgaagaagacaccaaactaaaaatacctcttatacaccgtgcactgcagctcgcccaacgccctgttagcctgctggcttctccttggaccagtcccacctggctcaagacaaacggcgctgtgaatggaaaagggagccttaaaggccagcctggtgatatctaccaccaaacgtgggcgcgatactttgtgaagtttctcgatgcatatgcggaacataaactgcagttttgggccgtgaccgcagaaaacgagccaagcgcagggttgcttagcggctacccttttcagtgtctgggctttacccctgaacatcagcgggattttatcgcgcgcgacctgggtcccacattggccaactcaacgcaccataacgtgcgactgctgatgctggatgatcagaggctgctattgccgcattgggcgaaagttgttctgactgatccagaagcggccaagtatgtccatggaatcgcagtacattggtatctcgatttcttagctcctgccaaagctacactgggtgaaactcatagactgtttcctaataccatgctctttgcaagtgaagcctgcgtgggctccaaattctgggagcagtccgttaggttagggagctgggatcgtggtatgcagtacagccattcaattataaccaacctgctttaccatgtcgtgggctggactgactggaacctggcgttgaaccctgagggaggccccaattgggtccgcaactttgttgacagccccataatcgtcgacatcacaaaggataccttttacaagcaaccaatgttttaccacctggggcatttcagcaaattcataccagaaggaagtcaacgcgttgggctggtcgcttcgcagaagaacgatctggatgctgtggcccttatgcatcccgacggctcggccgtcgtcgtggtgctcaaccgtagtagcaaggacgttccattgacgattaaggaccctgctgtggggtttctcgagactatctcccccggatactctattcacacctacctttggagacggcagtag

SEQ ID NO: 297762 - DNA, 1482 bp, Artificial Sequence
  derived and/or modified sequence
atgaccctgcggggctggagcttccaggtgctgcccgagagcaacgctacctactgtgacagctttgacccacccacctttccagcactcggcactttttctcgatatgaatccacccggtctggacggcggatggaactttccatgggcccaattcaagctaatcatactggtactggcttgctgctcactcttcagccagagcagaaattccagaaggtgaagggattcggaggcgccatgaccgacgcggccgcacttaacatactggcgctcagtcccccagcccagaacttgctcctaaagtcttatttcagcgaggaaggcatcgggtataatattataagagtccctatggcgagctgcgacttctccatccgaacctatacatacgctgacacaccagacgatttccagcttcataacttctccctgccagaggaagacaccaaactcaaaatacccctgatccaccgggccttgcagctagcacaacgcccggtgagtctgctcgcatcaccatggacctcgccaacttggctcaaaacaaacggggcggtcaacggaaaggggtcattgaaaggccaacccggggatatctaccaccaaacctgggccagatactttgtgaaattccttgatgcttacgctgaacacaagctgcaattttgggctgtcactgcagagaacgagccttccgctggtctcttatctggttaccctttccagtgccttggatttacgcccgagcatcagagggacttcatcgcgagagatctcggcccaacccttgctaacagcacccaccacaatgtgcgtttgctaatgctggatgatcagaggctccttttgcctcattgggccaaagtagtgctgacagatccagaggccgcgaaatacgtccacggcatcgcagtgcactggtaccttgactttctcgccccagctaaggctactctgggggaaacacatagactctttcctaacacaatgctatttgcatccgaggcctgtgtcggaagcaagttctgggagcaatccgtcagacttggcagctgggaccgggggatgcagtatagccacagcatcatcacaaatctgctgtatcacgtggtgggttggaccgattggaacttggcgcttaatccggaaggaggcccgaattgggtgagaaattttgtggattcaccaatcatagtcgacattaccaaagataccttttataagcagccgatgttttatcacctcggtcacttctcaaagtttatacctgagggctcacagagagtgggtcttgtggcctcacagaaaaacgacctggacgcagtggctctgatgcaccctgatgggtctgcggttgtggtcgttttgaacaggagctccaaggacgtacccctgaccatcaaggaccctgccgtgggtttcctggaaacaatcagtccaggatactccatccacacatacctgtggagacgccagtag

SEQ ID NO: 297763 - DNA, 1611 bp, Artificial Sequence
  derived and/or modified sequence
atggaattctcgtcaccctctcgggaagaatgccccaaacctctctctcgcgtatcgatcatggctggcagtttgacaggcctactgttgctgcaagcagtgagttgggcgtctggcgcacggccttgcattcccaagagcttcggctactctagtgtggtgtgtgtgtgtaacgctacgtattgcgattcattcgaccccccaactttccccgctctggggacgttctcaaggtacgaatccacgagaagcggacgcaggatggagctgtccatgggcccaatccaggcaaaccatacaggcactggcctgctgcttacgctccagccagagcaaaagtttcagaaggtaaaagggtttggtggggctatgacagacgccgcagccctcaatatcctggccttgtccccaccggctcaaaatctgttgctcaagagctacttcagtgaggaagggattggatacaatattattagagtaccgatggcatcatgtgacttttctatcagaacctacacttacgcggacactcctgacgactttcagctccataatttctcactgcccgaggaggacacgaaactaaaaatccctctcatccaccgcgctttacagctggcccagcgtccagtgtccttgctggccagcccgtggacatctcccacttggctgaagactaacggtgcggtcaatgggaagggctctctgaagggccagccaggggatatttatcatcaaacatgggcgcgatactttgttaagttcctggatgcttatgccgagcacaaacttcagttttgggcagtgacggcggagaacgagccctcagccggactgttgagcggataccctttccagtgtctcgggtttactccagagcatcagagagatttcatcgcccgagatctgggaccgaccctggcgaactcaacccatcataacgtgcgtctgctcatgctagatgatcaaaggttactattgccacactgggcaaaggtagttttgacagaccccgaagccgctaaatacgtgcatgggattgctgtgcattggtatctggattttctcgcacctgcaaaggccacactgggagaaacacatcgtctgtttcctaatacgatgctgtttgccagtgaagcatgcgtcggctctaagttctgggagcagagcgtgaggctgggctcttgggacagaggaatgcaatattcacacagcataatcacaaacctgctgtatcacgttgtggggtggaccgattggaatttggctctcaacccagagggagggcctaattgggtgcggaactttgtcgactcccctatcattgttgatattacaaaggacacattctacaaacagccaatgttttaccatctcggccacttcagcaagttcatccccgaggggtcccaacgcgttggcctcgtcgccagtcagaagaacgatcttgatgccgttgctctcatgcaccccgatggcagtgccgtagtggtggtcttgaatagaagctctaaagacgttccacttacaatcaaggatcctgcagtgggcttcctggaaaccatcagccccggatacagcattcacacctatttgtggcgacggcagtag

SEQ ID NO: 297764 - DNA, 1611 bp, Artificial Sequence
  derived and/or modified sequence
atggaattttcctcaccttcgcgggaggagtgccccaaacctctgtctagggtatcgatcatggctggtagtctaaccggacttttgctgctgcaggcagtcagttgggccagtggagctcgtccatgtattcccaaatcctttggctacagctctgtcgtttgcgtgtgcaatgccacttactgcgacagttttgaccctcccaccttccccgctctgggtacgttctcaagatacgagagcacccgtagtgggagaaggatggagctgtccatgggtcccatccaggctaatcacacagggactgggctgctgttgacacttcaaccagaacaaaagttccagaaggtaaaaggattcggtggcgcaatgactgacgccgcagctctgaacattctggcgctttctcctcccgctcaaaatctgcttctcaaatcctatttcagcgaagagggcatagggtataatattatccgggtacctatggcctcgtgcgacttttccataaggacttacacatatgccgatacccccgacgactttcaactgcacaatttcagtttgccggaagaagataccaaacttaaaatccccctcatccacagggcacttcagctggcccaacgacctgtgtctctgttggcttcgccctggacatctcccacctggcttaagactaatggcgctgtcaacggcaaaggatcacttaagggacagccaggcgatatctatcaccagacctgggccaggtatttcgtcaaatttctcgatgcctacgctgaacacaaactgcagttctgggccgtcacagccgaaaatgagcctagcgccggtctgctatctggctatccttttcaatgtttagggtttaccccagaacaccaaagggactttatagcgagggacttaggccctactctggctaattcaactcaccataacgtgcggctgttgatgcttgacgaccaaaggcttctgttaccgcactgggctaaagtggtcctaaccgaccctgaggccgctaagtatgtgcacgggattgctgtacattggtatctcgattttctcgctccagctaaagccacattgggtgagacccaccgactctttccaaacactatgctgttcgcctctgaggcctgtgtcgggagcaagttctgggaacagagtgtgaggctcggatcctgggacagggggatgcaatacagtcatagtatcattaccaatctgctctatcatgtcgtggggtggaccgactggaaccttgcactcaacccagaaggcggtccaaattgggttaggaactttgtggatagccccatcattgtggatatcaccaaagataccttttataaacagccgatgttttatcacttgggccatttctcaaagttcataccagagggctcacaacgggtgggccttgtcgcttcacagaagaatgatctagacgccgtcgctttgatgcatcccgacggcagtgctgttgtcgtagtactcaataggagcagtaaggatgtgccattgacaatcaaggatcctgccgttggtttcctcgagaccatctcgcccggatattcaatccacacatacctttggcgacgacagtag

SEQ ID NO: 297765 - DNA, 1566 bp, Artificial Sequence
  derived and/or modified sequence
atggagttttcaagcccttcgagggaggaatgtcctaagcccctgtcccgggttagcataatggccggttcactgacaggcctcctcctgctgcaagcggtgtcttgggccagtggcgcaaggccatgtattcctaaatcttttgggtacagttctgtagtttgtgtatgcaatgcgacatactgtgatagtttcgaccctccgacatttccagcccttggaacatttagcaggtacgagtctactaggagtggccgtcgcatggagttgagcatgggacctatccaagccaaccatacaggcactggtttactactgactctgcagcccgacgccgctgccttaaacatcttggccctgagtccacccgcacagaaccttctcctcaagtcttacttcagtgaagagggaatcggctataatatcatccgcgtgcccatggcaagctgcgatttttctatcagaacttatacttatgcagatacccccgatgacttccagctacacaactttagtctgcccgaagaggatacgaagctgaaaatcccgctgatccatcgggctctgcagctggcccaacgccctgtttccctcctggcatctccgtggacatcccctacatggttgaaaacgaatggagccgtgaatggaaagggctcacttaaaggccagcccggtgacatatatcatcagacctgggctcgttattttgtcaagttcctggacgcgtacgccgagcacaaattacagttttgggctgttacagctgagaacgagccgtccgcagggctgctaagcggttatccatttcagtgcttaggcttcacccccgagcaccaaagagattttatcgctagagatttgggccctacactagcaaactcaacgcaccacaacgttcgtttgttaatgttagacgaccaaaggctgctgctgccgcactgggctaaagttgtgctgactgatcccgaagccgctaagtatgtacacggaattgccgtccactggtacctggactttctagccccagctaaggctacactcggcgaaactcaccgtctgtttcctaatacaatgctctttgcctccgaggcctgtgtagggtctaagttttgggaacagtcagtgagattggggtcttgggaccgaggcatgcaatatagccattccatcatcaccaacctgctgtatcacgtggtggggtggacggactggaatctggcacttaaccccgaaggaggaccaaattgggtgaggaactttgtcgattcgccaatcatcgtcgacatcacaaaggatactttttacaagcagccaatgttctatcatctggggcatttctccaaatttattcctgaagggtctcagcgcgttgggctggtggcttcccagaaaaatgatctggacgctgttgccttgatgcaccctgacggcagcgcggttgtcgtggtgctgaatcggagcagtaaggatgtgccactgacaattaaggaccctgctgtgggattccttgagaccatatcccctggttatagcatccacacatacctatggagacggcagtag

SEQ ID NO: 297766 - DNA, 1350 bp, Artificial Sequence
  derived and/or modified sequence
atggagctaagcatgggacctattcaggccaatcacacaggcactggtttgctcctgaccctgcagcctgaacagaagtttcaaaaggtcaaagggtttggtggggcaatgaccgacgctgctgcattgaacatactggctctttccccacccgctcagaatctgcttttaaaaagttacttctctgaagagggaatagggtataacatcatccgggtgccaatggcatcttgtgatttcagcataaggacatatacctatgccgatactcccgacgacttccagctgcacaatttctcccttcccgaagaagatacaaagctgaaaattccattgatccaccgcgctctgcaactcgctcagcggccagtgtctttactggcatccccctggacttctccaacctggctaaaaacaaacggcgctgtgaacggcaaaggctctctaaagggacagcctggagacatctatcaccagacatgggcccgttacttcgttaagttcctggatgcttatgcagagcacaagctgcagttttgggccgtgaccgcagagaacgaaccatccgcaggactgctgtcagggtacccttttcagtgcctggggttcaccccagaacaccagcgcgacttcatagccagagacctgggaccaaccctggccaattctacccaccataatgtgcggcttctgatgctggatgaccagagattgctcctgccccactgggccaaggtggtgctgacagatcctgaagccgctaagtatgtgcatggaatcgctgttcactggtacctggattttcttgccccagccaaagcgaccctgggtgagactcatcgcctattcccgaacaccatgctgtttgcttccgaggcatgtgtgggtagtaagttctgggaacagtccgtgagactcgggtcttgggaccgtggtatgcaatattctcatagcatcatcacaaacttactctaccacgtcgttggatggactgattggaatctggctctgaatcctgagggtggacccaactgggttagaaacttcgttgatagtcctattatagtggacattacaaaggacactttttacaagcaaccaatgttttatcacctggggcacttctctaaattcatccctgaggggagtcaaagagttggactggttgcctcccagaaaaatgacttggatgccgtggctctgatgcaccccgacggaagcgcagtggtggtcgtactgaaccggagcagtaaggacgtccccttaaccatcaaggaccctgccgtcggctttttagaaacaattagccctggatactctatccatacatatttatggagacgccagtag

SEQ ID NO: 297767 - DNA, 1482 bp, Artificial Sequence
  derived and/or modified sequence
atgaccttgcgaggatggtcatttcaggtcttgcccgagtctaacgccacatattgtgatagtttcgatccaccgaccttccctgctcttggaacattcagccgctatgagtctactcgcagcggcagacgcatggagttgtctatgggcccaatccaggccaatcacacaggaaccggcctgctgctcacactgcaaccagagcagaagtttcagaaggtgaaggggttcgggggagccatgactgacgccgctgcattgaatatactggctctgagcccacccgctcaaaatctgctgttaaagtcgtacttctcggaggaaggcatcggatacaatatcattcgggtacccatggcatcctgcgacttctctatccgaacctacacctacgccgacaccccagatgacttccagttgcacaatttctcgctccccgaggaagacaccaagttgaagatcccactgatccaccgcgcactgcagctcgcacagcggccagtcagcctgctcgcctctccatggaccagtccaacttggttgaaaaccaatggcgctgtgaatgggaagggcagtctgaagggacagcccggagacatctatcaccaaacatgggcaaggtacttcgttaaatttctggatgcatatgcggagcacaagctgcagttctgggccgtgacagcagagaatgaaccatctgctggactgcttagtggatatcccttccagtgcctgggcttcacccccgagcaccagcgagacttcatagcgagagatctgggaccaacactggctaactccactcatcataatgtcagactgctcatgctggacgaccagaggctgctgctgcctcattgggcgaaagtcgtgctcaccgatcccgaagcagccaagtacgtgcatgggatcgcagtccactggtacctagactttcttgcccctgctaaagctaccctgggggaaacacatcgtctgtttcctaataccatgctgttcgccagcgaggcctgcgtggggagcaaattttgggagcagtccgtaagattaggttcttgggatcgtggaatgcagtactctcacagcattattacaaatttactgtatcacgttgtcggatggacagattggaatctggcgctgaaccctgaaggaggccctaactgggtgcggaacttcgtggactccccaattatcgtagatattacaaaggacaccttctataagcagcctatgttttatcacctgggccacttcagtaaattcattcccgaaggctctcagagggtaggcctcgtagcaagtcagaagaatgacctcgacgccgtcgcgctgatgcatcctgacggctccgccgtcgttgttgtcctgaaccgctcttctaaagacgtgccgctgaccatcaaagaccccgctgtaggattcctggaaaccatttcacccggatacagtattcatacatacttatggcggagacagtag

SEQ ID NO: 297768 - DNA, 1611 bp, Artificial Sequence
  derived and/or modified sequence
atggaattttccagcccgagcagagaggaatgcccaaagccactgtcacgagtaagtatcatggctggtagtttgacaggactgctcctgcttcaagccgtttcctgggcttccggagcaagaccctgcatacccaaaagcttcggctactctagcgtcgtgtgcgtctgtaatgcgacgtactgtgattcgttcgaccctccaacattccccgctctgggcacattttctcggtatgaatcgactcgcagcgggcgccggatggaactgagcatgggcccaattcaagcaaaccatacagggactggactcctcttgaccctccagccagaacagaagtttcagaaggtgaaaggttttggtggggccatgacggatgctgccgcattaaatatactagcgctgagccccccggctcagaatctgctgctcaagtcctacttttcggaggaaggtataggatataacattataagggtccctatggcttcttgtgacttctctattagaacttacacttacgccgataccccagatgactttcagctccacaacttttccttgccagaggaggatacaaagctaaaaatcccactgattcaccgcgctctgcagttggcacaaagacctgtgtcacttctggcctctccttggacctccccgacatggcttaagaccaatggcgctgtgaacggtaagggatctctgaagggtcagccaggagacatctatcaccaaacctgggccagatattttgtgaagttcctggatgcctatgccgaacataaactgcagttttgggccgtaaccgccgaaaatgaaccaagtgcaggactcctgagcggatatccttttcaatgtctaggcttcactccagaacaccagagagactttatagcccgagacctgggtcccacactcgccaactctacacatcacaatgttagattgctcatgttagacgaccagagactgctccttcctcattgggcgaaagtcgtgttaacagatccagaggcggccaaatatgtccacggtattgctgtccactggtacctggacttcttggcccccgccaaagccacactgggggagactcatcggctctttccaaacaccatgctctttgcctctgaggcatgtgtgggctcaaagttctgggaacagtccgtacggctgggcagttgggaccgtgggatgcagtactctcattcgattattacgaacctgctctatcacgttgtggggtggaccgattggaatttggcactcaaccccgaaggaggcccgaactgggtacgcaacttcgttgactccccgattattgtggatattacaaaggacaccttttacaagcaacccatgttttatcacctcggacatttctcaaaattcattcccgagggctcccagagagtaggactggtggcgagtcaaaaaaatgatcttgacgccgtcgctttgatgcatcccgacggatcagccgtggtagtggtccttaacaggtcttcaaaggacgtgcctctcacaattaaagacccagcggtgggcttcctggagacaatcagcccaggttatagtatacacacatacttatggagaagacagtag

SEQ ID NO: 297769 - DNA, 1611 bp, Artificial Sequence
  derived and/or modified sequence
atggaattctcctcccccagccgcgaggaatgccccaagccactcagtcgtgtctcaattatggccggaagccttaccgggttgttacttctacaggccgtttcatgggcaagcggcgccaggccctgcatcccgaaatcctttggatatagttcagtggtgtgtgtttgcaatgctacctattgtgacagttttgatccccctaccttccctgcacttggaacgtttagtcgctacgagtcaacccgatccgggagacggatggaactttccatgggcccaattcaggccaaccataccggtactgggcttctcctcaccttacagccagagcagaaattccagaaggtcaaaggcttcggaggtgccatgactgatgccgcagcattaaacattctggcgcttagtccccccgctcaaaatcttctgctcaaatcatacttctcagaggagggaatcggctacaacatcatacgggtcccaatggctagctgcgacttcagtatcagaacctacacctatgccgatacgccggatgatttccaactgcataatttctccctgcccgaagaagataccaaattgaagattccgctgatccatcgcgctctgcagcttgctcagcggcccgtcagtctcctggcatcaccctggacatcacccacctggctgaaaacgaacggcgcagtgaatgggaagggaagcttgaagggccagcccggtgacatttatcatcagacttgggctcgatacttcgtgaaatttctggatgcttacgctgagcataagttacagttttgggctgttacagccgaaaacgaaccttccgccggtctgctgtcaggttatccgtttcagtgcctaggcttcacgcccgagcatcaaagggacttcattgcaagggacctaggtcctacactggcaaatagtacccaccacaacgtccgactgttaatgcttgatgaccagaggctcctcctaccccactgggctaaagtagtcctgactgatccagaagcagcaaagtatgttcacggcatcgccgtacactggtatttagacttcctggcgccagcaaaagctactctgggagaaacccataggctgtttcctaatactatgctctttgcttctgaggcatgtgtcggaagcaagttctgggaacagagtgtacgcctgggctcttgggaccggggcatgcagtattctcactcaatcattacaaatctgctctatcatgtggtgggatggacggactggaaccttgccctgaatccggagggcggccccaattgggtccgtaattttgttgattcacccatcatcgtcgatattacaaaggacaccttctacaaacagcctatgttttaccaccttgggcattttagtaaattcatcccagaagggagccaacgagtgggattggttgcttctcagaagaacgacctcgatgccgtggccctgatgcaccctgatgggagcgccgtggtagtagtgctgaaccgctcctctaaggatgtgcccctgacgattaaagacccagccgttggcttcctggagactattagcccgggctatagcatacatacctacctgtggcgccgtcagtag

SEQ ID NO: 297770 - DNA, 1566 bp, Artificial Sequence
  derived and/or modified sequence
atggaattctcatccccttcacgggaagagtgccccaagcctctctcaagagtctccatcatggctggttccctgaccggattgctgctacttcaggcagtgagctgggcctctggggctcgaccatgcattcccaaatcttttggctacagcagtgttgtctgcgtgtgcaacgccacctactgtgatagttttgatcctcccaccttcccagcactcgggacgttttcccgctacgaaagcaccagatcaggtcgtagaatggaactgagcatgggaccgatccaagccaaccacactggaacgggcctactcttgaccctccaaccagatgctgcagcactgaacatccttgcactaagcccaccagctcagaacctgctacttaaaagttacttctcagaagaagggatcggatataacatcatccgcgttccaatggcaagctgtgatttttccattcgaacatatacctatgctgatacccccgatgactttcagctgcacaacttttcattgcccgaggaggataccaagctgaaaatccctctgatccaccgggcgctgcaactggcacagcgacccgtttctttgttagcttcaccatggacaagtcccacctggttgaaaaccaatggggcagtcaacggaaaaggatctctgaaaggtcagcctggggacatataccaccagacctgggctagatattttgtcaaattcctggacgcttatgcagaacacaaactgcagttctgggctgtcacggctgaaaatgagcctagcgcgggcctgctctctggttatccattccagtgcttgggctttaccccagagcaccagagagactttatagctcgtgacctgggccctaccctcgccaactcaacacatcacaatgtcagactcttaatgctagatgaccaaaggcttctacttccccactgggccaaggtggttcttaccgacccggaagctgcgaaatacgtgcatggcatcgccgtccactggtatctggatttcctggcaccagctaaagcaacactgggcgagacacaccgtttgtttcccaacaccatgttgttcgcgtccgaggcttgcgttggctctaaattctgggaacagtctgtgaggcttggcagttgggacagaggaatgcagtatagccatagcatcatcacaaacctcctgtatcacgttgtggggtggacagattggaacctcgcattgaatcccgaggggggacctaattgggtaaggaacttcgtggatagtccaattatagttgatataacgaaagatacattctataagcagcctatgttctaccaccttggccacttctctaaattcatccccgagggctcccagcgcgttggcctcgtggcctcgcaaaaaaacgacttggacgctgtcgccctgatgcaccctgacggttctgccgttgtggtggtcttgaaccgatcctcaaaggacgttccccttactatcaaagacccagccgttggctttcttgagacaatatcacctggctattctattcatacatatctctggcgcagacagtag

SEQ ID NO: 297771 - DNA, 1350 bp, Artificial Sequence
  derived and/or modified sequence
atggaactaagcatggggcctatccaggccaaccataccgggacaggactactcctcaccctgcagcctgagcagaaattccagaaggtgaaagggttcggcggcgctatgacagatgcagccgcactgaatattctggctttaagcccaccagctcagaatctgcttctcaaatcctacttctccgaggaggggatcgggtacaatataattcgcgtgcccatggcgtcttgtgacttttccattcggacctacacatacgctgatacacccgatgacttccaacttcacaatttctctctgccagaggaggatactaagcttaaaattcctctgatccacagagctcttcaactggcccaacgtcctgtttctttgctagcatccccttggacaagccccacttggctgaaaacaaatggagcggtgaatggaaaagggtcactgaaaggacagccgggggatatctaccaccagacatgggcccggtattttgttaagttcctcgacgcttacgccgagcacaagctccaattctgggcagttaccgcggagaacgaaccgtcagccggcctactaagcgggtatcctttccaatgtctgggcttcactcctgaacaccagcgcgactttatcgcccgcgacttgggacctactctcgctaactcaacacatcataatgtgaggttacttatgttggatgatcagcgcctgctcctgcctcactgggctaaggttgtgctcaccgatcctgaagccgccaagtatgtccatggaattgccgtccattggtatcttgacttcctagcaccggccaaagccaccctgggagaaacacaccgcttgttccctaataccatgctcttcgcctccgaagcttgtgttggaagtaagttctgggaacagtccgtgaggttaggctcatgggaccgtgggatgcaatactctcatagcatcattactaatttgctgtatcatgtggtaggatggacagattggaatctggcactcaatccagagggcgggcccaattgggtgagaaatttcgtggattcgcctataattgtggacataacaaaagataccttctacaaacagcctatgttttaccacctagggcacttttcaaagttcattccagagggctcacaacgtgtgggattggtggcctctcaaaaaaatgaccttgacgctgttgcacttatgcacccggatgggagcgctgtggtcgtagtactgaaccggagtagtaaagacgtgcccctgacaatcaaagatcctgccgtcggcttcttggagacaatcagtccggggtatagtattcacacatacctctggcgaagacagtag

SEQ ID NO: 297772 - DNA, 1482 bp, Artificial Sequence
  derived and/or modified sequence
atgaccctaaggggttggagtttccaggtgctgccggagtctaatgctacatactgtgactcattcgacccacccacctttccagctctcggaacattctcccgatacgagtcgaccagatcgggtaggcggatggagttgtccatggggccgattcaggccaaccataccgggactgggctccttctgacactgcaacccgagcaaaagttccagaaggtgaaggggttcggaggcgctatgacagacgcggctgccctgaatatcctcgctctgtccccccccgctcaaaatctcctcctcaaatcatactttagcgaagaggggattggctataacattatcagagttcctatggcttcttgcgatttctccattcgcacgtacacttacgccgacacccccgatgatttccaactacacaactttagccttcctgaagaagacacgaagctgaaaatccccctaattcacagagcgctgcagctcgcccagcgtcccgtttctctactggcttctccctggacttcccctacatggctcaagactaacggtgccgttaacggaaaggggtctcttaagggccaaccaggagatatctaccaccagacttgggccagatatttcgtgaagttcctcgacgcatatgccgagcataaattacagttttgggcggtcacagctgagaacgagcccagcgctggactgctttccggatacccctttcaatgcttgggcttcacacccgaacatcagcgagattttatagcaagggatctagggcctacactcgctaattctacacatcataacgttcgactcctcatgcttgacgaccagcggctgctcctccctcattgggctaaagttgttttgactgatccggaggctgccaaatacgtgcacggtatcgccgttcattggtatctcgactttttggccccagcaaaagccacactaggagaaacacacaggctgttcccaaatactatgctcttcgcttccgaggcctgcgtgggctccaaattctgggagcagagcgtgaggctcggcagctgggatagaggcatgcagtactcacacagtattattaccaatctactgtaccacgtcgtcggctggactgattggaatttagctctcaaccctgaggggggtcccaactgggtgcgcaattttgtcgattcccccattattgttgatattacgaaagatacgttctacaaacagcctatgttctaccatctcggacacttttcaaagttcattccagaaggaagccagagggtcgggcttgttgcctctcaaaagaacgatctcgatgccgtagccttgatgcatccagatggatccgcagtggtggttgtgttaaatagatcatcaaaggatgtgccattgactattaaggatccagcagtaggctttcttgaaaccatcagccccggctacagcatacatacctacctctggcgccgccagtag

SEQ ID NO: 297773 - DNA, 1611 bp, Artificial Sequence
  derived and/or modified sequence
atggagttttcatcgccctctcgagaggaatgcccaaaaccgttgtcacgcgtttccattatggcgggttcactcactggactgctgttactgcaggccgtgagttgggcttccggcgctagaccttgcattccaaagagttttggctatagttcggtggtttgcgtgtgtaatgctacgtattgtgattctttcgatccccccacttttccagccctgggtaccttctcacgttatgagtctaccagaagcggcagacgcatggaactttctatggggccaattcaggcaaatcataccggtacaggcctgctgcttacccttcagccagagcagaagttccagaaagttaagggtttcggtggggcaatgacagatgccgcagctctgaatatattggccctctcccctccagctcagaatctcttactcaagtcatacttttcagaagaaggcattggctacaacattatcagagttccaatggcatcctgcgatttttccatccgaacttacacttacgccgatacacccgacgactttcagctccacaacttcagcctcccagaagaagatactaaacttaagattcctttgatccaccgcgctctgcagttggcacaaagacctgtgtcacttctggcctctccttggacctccccgacatggcttaagaccaatggcgctgtgaacggtaagggatctctgaagggtcagccaggagacatctatcaccaaacctgggccagatattttgtgaagttcctggatgcctatgccgaacataaactgcagttttgggccgtaaccgccgaaaatgaaccaagtgcaggactcctgagcggatatccttttcaatgtctaggcttcactccagaacaccagagagactttatagccagggacttagggccaaccctggcaaatagcactcatcataatgtaagattactcatgctcgacgatcagagactcctactgccgcattgggctaaagtggtgttaactgaccccgaagcagccaagtacgttcatggaattgcagtgcattggtatctggatttcctcgcgccagccaaggccaccttaggcgaaacacatcgactctttccaaacactatgctctttgcttccgaggcatgtgtgggcagcaaattttgggaacagagtgttaggttaggctcttgggacaggggcatgcagtatagtcactcgattatcacaaacctgctgtaccacgttgtcggctggacagattggaacttggccttgaatcctgaagggggtcccaattgggttcgtaactttgtcgattctcctatcattgtcgatatcaccaaagacacgttctataaacaacctatgttctaccatctgggccatttctcaaagtttatcccggaaggttcccagagagttgggctcgtcgcttctcaaaagaatgatctcgacgctgtggcattaatgcatccggacggctcagctgttgttgtcgtgctgaatcgctccagtaaggacgtccctctcacaattaaggacccagccgtcggattccttgaaactatttcacccgggtactcaattcacacatatctatggagaagacagtag

SEQ ID NO: 297774 - DNA, 1611 bp, Artificial Sequence
  derived and/or modified sequence
atggagtttagttcccccagtagggaagaatgtcccaagcccctgtcacgagtcagtattatggctggatctctgaccggcctgctgctgttacaagccgtctcttgggcatccggcgcccgtccatgtatacctaagtcctttggctattcttcagtcgtgtgcgtgtgcaatgctacctattgtgattcattcgatcctccaacctttccggctctggggacttttagtaggtacgagtctacccgtagcggtaggcgcatggagctttctatgggaccaattcaggcaaatcatactggcaccggcttactcttgacacttcagccagagcaaaagtttcagaaagtgaagggttttggaggcgctatgaccgatgctgctgccttgaatatcctcgccttgtccccacccgcccaaaatctgttactcaaatcttatttttccgaagaaggtatcggctacaacattatcagagttccgatggcctcatgtgacttttctatccggacttacacatatgcagatacccccgatgacttccagcttcataacttctcactcccagaggaggatacaaaacttaagattcccttgatacatcgcgccttacagctagctcagagacctgtttcactgttggcaagcccctggacatccccaacctggttaaagacaaatggcgccgtgaatggaaaaggtagccttaagggtcaacctggcgacatctatcatcaaacatgggcgaggtactttgtgaagtttctcgatgcgtacgctgagcacaaattacagttctgggccgtgaccgcagagaatgaacccagcgccgggcttctgagtgggtatcccttccagtgcctgggtttcacccccgaacaccagagagacttcattgcgagggatttggggccaacccttgccaactcaacacatcacaacgttcgcctgttgatgctggacgaccagcgcctcctcctcccccattgggccaaggtcgtcctgactgaccccgaagcagccaaatacgtacatggtattgctgtgcactggtaccttgactttctcgctcctgccaaagcaacccttggagagacccacagactgttccctaataccatgctctttgcaagtgaggcatgtgtaggctcgaaattttgggaacaaagcgtccgcctaggctcctgggatcgcggtatgcagtattcacactcaatcataactaatttgctgtaccatgtggttggctggactgattggaaccttgccctaaatcctgaggggggcccgaactgggtgcgtaactttgtggattcaccaattattgtagatattactaaggatactttttataaacagcctatgttttatcacctggggcatttcagtaaatttatacctgaagggtctcagagagtaggtctagtggccagtcaaaagaatgacttagatgctgtagctctgatgcaccccgatgggagcgccgtcgtggttgttctcaatagatcctccaaagatgtgccgctaaccataaaagatcccgccgttggcttcctagagacaatttcccctggatattccatacacacatatctgtggcgcagacagtag

SEQ ID NO: 297775 - DNA, 1566 bp, Artificial Sequence
  derived and/or modified sequence
atggaattctcaagcccttctcgcgaggagtgtcccaaacccctgtctcgagtgtctattatggctggctcactgacaggtctcctgttacttcaggcagtgtcttgggcttcaggagcccggccatgcatccctaagagcttcgggtattcctctgtggtctgtgtgtgcaacgcgacctactgcgactctttcgatccacctacatttcccgccttgggtactttctcacgctacgaaagcacacggtcaggacgccgaatggaactgtctatgggccccattcaagctaaccacaccggaaccgggctgcttttaacccttcaacctgatgccgcagctctgaacattttggctttgagtccccctgctcagaacctgctgctcaaatcatattttagcgaagaggggataggctacaacataatccgagtccccatggcctcctgcgacttttcaataaggacttacacgtacgccgacacacctgatgatttccaactccacaatttctcactgcccgaagaagacactaagttgaagataccactgatacaccgggccctgcagctcgcacaaagaccggtgagtctgctcgcctctccctggacatctcccacatggctcaaaaccaatggcgcggtcaatggaaagggaagtcttaaaggccaacctggggatatctatcaccagacatgggcacgttatttcgtgaaatttctagacgcttatgctgaacacaagctgcaattttgggccgtgacagctgaaaatgagccatccgccggtctactttcgggttatccgtttcagtgcttagggttcactcccgagcatcagcgcgacttcattgctagagatctaggacccacacttgcgaactctacacaccacaatgtgaggctattgatgctagatgatcagcggttactactaccacactgggctaaagtggtgctcacggatcctgaagccgcaaagtatgtccacgggattgctgttcattggtacttggattttctggcaccagcaaaagccactctcggcgaaacccatcggctctttcccaacaccatgctgttcgctagcgaggcctgtgttggtagcaagttctgggagcaatccgtgagattaggatcttgggacagaggcatgcagtattcacactctataattaccaaccttctctaccacgtggtgggatggaccgactggaatttagccttaaatcctgaagggggccccaattgggtaagaaatttcgtggactccccaattatcgtcgacattacaaaggacacattctataaacagccaatgttctatcacctggggcacttctctaagtttatcccagaaggaagccagcgagtggggctggtcgcctcccagaaaaacgacttggatgccgttgctctaatgcacccagatggaagcgcagtcgtggtggtgttgaatcggagctcaaaggacgtccccctgaccattaaagaccctgccgttggctttcttgagacaatatcacctggctattctattcatacatatctctggcgcagacagtag

SEQ ID NO: 297776 - DNA, 1350 bp, Artificial Sequence
  derived and/or modified sequence
atggagctatcaatgggaccaattcaggccaatcatactgggacagggcttctgctgaccttgcagcctgaacaaaaatttcaaaaagttaagggatttggaggcgccatgacggatgccgccgcactgaatattctggcactatctccccccgcacaaaacctgttgctgaaatcatacttttcggaggagggtatcggatataatatcattcgggtgcccatggcatcatgcgacttttctatcagaacctatacctacgctgatacacctgacgattttcaacttcacaattttagcctgcccgaagaagatacaaagttaaaaatcccactaattcacagagccctccagctagctcagaggccagttagcctattggccagcccatggacctcacccacctggctgaagactaacggggccgtcaatggaaaaggctctttgaaagggcagcccggagatatttatcatcagacttgggctagatacttcgtaaaatttctggatgcgtacgccgagcacaagctccaattttgggctgttaccgccgagaatgagccctccgccggtctcctgtcaggttatccattccaatgcctgggctttacacctgaacaccagcgtgactttatcgcacgtgatctaggccctactttggccaatagcacccaccacaatgtacgactactgatgctagatgatcagcggctcctgttaccccactgggctaaggtggttctgactgaccctgaggccgccaagtacgtgcacggcattgcggtccattggtaccttgacttcctagcacccgccaaggctaccctcggagaaacccataggctcttccctaacaccatgctgtttgcttcagaagcgtgcgttggttccaagttctgggaacagagcgttagacttggcagctgggacaggggtatgcaatattcacatagcatcatcactaatctgctataccatgtagtgggatggacggactggaacttggctctgaaccccgaagggggtcccaattgggtgaggaattttgttgattcaccaatcattgttgacattactaaggatactttctacaagcaacctatgttctatcacctaggacatttttccaaattcattccagagggttcccaacgtgtgggactagtagcttcacagaagaacgatctcgatgcggtcgcactgatgcatcccgacggctcagctgtggtcgtcgtactgaatcgctcttctaaagacgtaccactgaccattaaagaccccgcagtgggcttccttgaaacaatctctcctggctactccattcacacctacctatggcgacgacagtag

SEQ ID NO: 297777 - DNA, 1482 bp, Artificial Sequence
  derived and/or modified sequence
atgacacttcgagggtggtcctttcaagttcttcccgagagtaacgcaacttactgtgattcctttgatcccccgaccttcccagcccttggtacattcagtagatacgaatccactagatctgggcgcagaatggaactcagtatgggaccaatccaggcgaaccatacgggaactggacttctgctaacgctgcagcccgaacaaaaattccagaaagttaaagggtttggaggcgctatgactgatgctgctgccctcaatatcctggccctcagcccacccgcgcagaaccttctgctcaaatcatactttagcgaagaggggattggctataacattatcagagttcctatggcttcttgcgatttctccattcgcacgtacacttacgccgacacccccgatgatttccaactacacaactttagccttcctgaagaagacacgaagctgaaaatccccctaattcacagagcgctgcagctcgcccagcgtcccgtttctctactggcttctccctggacttcccctacatggctcaagactaacggtgccgttaacggaaaggggtctcttaagggccaaccaggagatatctaccaccagacttgggccagatatttcgtgaagttcctcgacgcatatgccgagcataaattacagttttgggcggtcacagctgagaacgagcccagcgctggactgctttccggatacccctttcaatgcttgggcttcacacccgaacatcagcgagattttatagcaagggatctagggcctacactcgctaattctacacatcataacgttcgactcctcatgcttgacgaccagcggctgctcctccctcattgggctaaagttgttttgactgatccggaggctgccaaatacgttcatggaattgcggttcattggtaccttgacttcctggcgccagcgaaggccaccctgggggaaacacaccgcctctttccaaacaccatgctttttgctagtgaggcctgtgtaggatctaaattctgggaacagtctgtgagactcggttcatgggacagggggatgcaatatagccattccattatcactaacttactgtaccatgtggtcggatggaccgactggaacctagctctgaatcctgaaggtggaccaaactgggtgagaaattttgttgactccccaataattgttgacatcactaaggacaccttctacaagcaacccatgttttaccatctcggacatttctcaaaatttatccctgaaggctcccagagagtaggcctagtggctagccaaaaaaatgacctggatgcagtggctctcatgcatccggacggtagtgctgtcgtggttgtccttaaccgtagtagcaaagacgttcctctgactatcaaagaccccgctgtgggcttcctggaaacaatctctcctgggtattctattcacacatatctgtggcgaaggcaatag

SEQ ID NO: 297778 - RNA, 1754 nt, Artificial Sequence
  derived and/or modified sequence
gggaaauaagagagaaaagaagaguaagaagaaauauaagagccaccauggaguucucaucccccucgcgggaggaauguccuaagccguugucccgggugucgauuauggcagggagccugaccggauuguuguugcugcaagcggugucgugggccucgggcgcacgacccugcauccccaaguccuuuggguacagcucaguggucugugugugcaacgcgaccuauugugacuccuuugaucccccgacuuuuccggcccuggguacauucucaagauaugagucaaccagaagcggucgccgcauggaacuuucaauggggcccauucaggccaaucacacugggacuggucugcucuugacucuucagccugagcagaaguuccagaaggucaaggguuucggcggugcgaugacagacgcggcugcauugaauauucucgcgcugagcccgccugcgcagaaccugcuucucaagucguacuucucggaggaagguaucggguauaacauuauccgaguaccaauggcgucaugcgauuuuucgauucgcaccuacacguacgcugacacgccugacgauuuccaguugcacaacuucucgcugccagaggaggacacgaaacugaaaauuccccucauccauagagcacugcagcucgcacaacggcccgucucccuucuugcgagcccguggacaucacccaccugguugaaaacgaacggcgcagugaacgggaaaggaagccuuaaggggcagccuggugauaucuaccaccagacaugggcacgauacuuuguaaaguucuuggacgcguacgcagagcacaaacuucaguucugggcggucacugccgaaaaugagcccucggcgggacuucugucgggauauccguuucagugcuugggauucacgccggagcaccagagggauuucaucgcucgggauuugggucccacacuggcgaauagcacacaccauaacguacggcuuuugaugcucgacgaucagcgacugcugcucccucacugggccaaagugguacugaccgaccccgaggccgccaaauaugugcauggaauugccgugcacugguaucucgacuuuuuggcaccggcgaaagcgacuuugggcgaaacgcaucgccucuucccgaauacgauguuguucgccucggaagcgugugugggaucgaaguuuugggaacaauccgucagguuggggagcugggaucgggggaugcaauacucgcauucaaucaucaccaaucuuuuguaucaugugguaggauggacggacuggaaucuggcgcuuaacccggaaggaggaccuaauugggugaggaauuucguagacucgccgaucaucgucgacaucacgaaggacacguuuuacaaacagccgauguuuuaccaucuuggacacuuuuccaaguuuaucccggaagggagccagagggucggacucguggccucccaaaagaacgaccucgaugccgucgcgcugaugcacccagauggguccgcugucguggucgugcuuaacagaucgucaaaagaugugccccucacuaucaaagaucccgcgguaggcuucuuggaaacaaucucgccaggauacucaauucauacauaucuguggcgcaggcagugauaagcugccuucugcggggcuugccuucuggccaugcccuucuucucucccuugcaccuguaccucuuggucuuugaauaaagccugaguaggaag

SEQ ID NO: 297779 - RNA, 1611 nt, Artificial Sequence
  derived and/or modified sequence
auggaauuuuccagcccgagcagagaggaaugcccaaagccacugucacgaguaaguaucauggcugguaguuugacaggacugcuccugcuucaagccguuuccugggcuuccggagcaagacccugcauacccaaaagcuucggcuacucuagcgucgugugcgucuguaaugcgacguacugugauucguucgacccuccaacauuccccgcucugggcacauuuucucgguaugaaucgacucgcagcgggcgccggauggaacugagcaugggcccaauucaagcaaaccauacagggacuggacuccucuugacccuccagccagaacagaaguuucagaaggugaaagguuuugguggggccaugacggaugcugccgcauuaaauauacuagcgcugagccccccggcucagaaucugcugcucaaguccuacuuuucggaggaagguauaggauauaacauuauaagggucccuauggcuucuugugacuucucuauuagaacuuacacuuacgccgauaccccagaugacuuucagcuccacaacuuuuccuugccagaggaggauacaaagcuaaaaaucccacugauucaccgcgcucugcaguuggcacaaagaccugugucacuucuggccucuccuuggaccuccccgacauggcuuaagaccaauggcgcugugaacgguaagggaucucugaagggucagccaggagacaucuaucaccaaaccugggccagauauuuugugaaguuccuggaugccuaugccgaacauaaacugcaguuuugggccguaaccgccgaaaaugaaccaagugcaggacuccugagcggauauccuuuucaaugucuaggcuucacuccagaacaccagagagacuuuauagcccgagaccugggucccacacucgccaacucuacacaucacaauguuagauugcucauguuagacgaccagagacugcuccuuccucauugggcgaaagucguguuaacagauccagaggcggccaaauauguccacgguauugcuguccacugguaccuggacuucuuggcccccgccaaagccacacugggggagacucaucggcucuuuccaaacaccaugcucuuugccucugaggcaugugugggcucaaaguucugggaacaguccguacggcugggcaguugggaccgugggaugcaguacucucauucgauuauuacgaaccugcucuaucacguugugggguggaccgauuggaauuuggcacucaaccccgaaggaggcccgaacuggguacgcaacuucguugacuccccgauuauuguggauauuacaaaggacaccuuuuacaagcaacccauguuuuaucaccucggacauuucucaaaauucauucccgagggcucccagagaguaggacugguggcgagucaaaaaaaugaucuugacgccgucgcuuugaugcaucccgacggaucagccgugguagugguccuuaacaggucuucaaaggacgugccucucacaauuaaagacccagcggugggcuuccuggagacaaucagcccagguuauaguauacacacauacuuauggagaagacaguag

SEQ ID NO: 297780 - RNA, 1611 nt, Artificial Sequence
  derived and/or modified sequence
auggaauucuccucccccagccgcgaggaaugccccaagccacucagucgugucucaauuauggccggaagccuuaccggguuguuacuucuacaggccguuucaugggcaagcggcgccaggcccugcaucccgaaauccuuuggauauaguucagugguguguguuugcaaugcuaccuauugugacaguuuugaucccccuaccuucccugcacuuggaacguuuagucgcuacgagucaacccgauccgggagacggauggaacuuuccaugggcccaauucaggccaaccauaccgguacugggcuucuccucaccuuacagccagagcagaaauuccagaaggucaaaggcuucggaggugccaugacugaugccgcagcauuaaacauucuggcgcuuaguccccccgcucaaaaucuucugcucaaaucauacuucucagaggagggaaucggcuacaacaucauacgggucccaauggcuagcugcgacuucaguaucagaaccuacaccuaugccgauacgccggaugauuuccaacugcauaauuucucccugcccgaagaagauaccaaauugaagauuccgcugauccaucgcgcucugcagcuugcucagcggcccgucagucuccuggcaucacccuggacaucacccaccuggcugaaaacgaacggcgcagugaaugggaagggaagcuugaagggccagcccggugacauuuaucaucagacuugggcucgauacuucgugaaauuucuggaugcuuacgcugagcauaaguuacaguuuugggcuguuacagccgaaaacgaaccuuccgccggucugcugucagguuauccguuucagugccuaggcuucacgcccgagcaucaaagggacuucauugcaagggaccuagguccuacacuggcaaauaguacccaccacaacguccgacuguuaaugcuugaugaccagaggcuccuccuaccccacugggcuaaaguaguccugacugauccagaagcagcaaaguauguucacggcaucgccguacacugguauuuagacuuccuggcgccagcaaaagcuacucugggagaaacccauaggcuguuuccuaauacuaugcucuuugcuucugaggcaugugucggaagcaaguucugggaacagaguguacgccugggcucuugggaccggggcaugcaguauucucacucaaucauuacaaaucugcucuaucauguggugggauggacggacuggaaccuugcccugaauccggagggcggccccaauuggguccguaauuuuguugauucacccaucaucgucgauauuacaaaggacaccuucuacaaacagccuauguuuuaccaccuugggcauuuuaguaaauucaucccagaagggagccaacgagugggauugguugcuucucagaagaacgaccucgaugccguggcccugaugcacccugaugggagcgccgugguaguagugcugaaccgcuccucuaaggaugugccccugacgauuaaagacccagccguuggcuuccuggagacuauuagcccgggcuauagcauacauaccuaccuguggcgccgucaguag

SEQ ID NO: 297781 - RNA, 1566 nt, Artificial Sequence
  derived and/or modified sequence
auggaauucucauccccuucacgggaagagugccccaagccucucucaagagucuccaucauggcugguucccugaccggauugcugcuacuucaggcagugagcugggccucuggggcucgaccaugcauucccaaaucuuuuggcuacagcaguguugucugcgugugcaacgccaccuacugugauaguuuugauccucccaccuucccagcacucgggacguuuucccgcuacgaaagcaccagaucaggucguagaauggaacugagcaugggaccgauccaagccaaccacacuggaacgggccuacucuugacccuccaaccagaugcugcagcacugaacauccuugcacuaagcccaccagcucagaaccugcuacuuaaaaguuacuucucagaagaagggaucggauauaacaucauccgcguuccaauggcaagcugugauuuuuccauucgaacauauaccuaugcugauacccccgaugacuuucagcugcacaacuuuucauugcccgaggaggauaccaagcugaaaaucccucugauccaccgggcgcugcaacuggcacagcgacccguuucuuuguuagcuucaccauggacaagucccaccugguugaaaaccaauggggcagucaacggaaaaggaucucugaaaggucagccuggggacauauaccaccagaccugggcuagauauuuugucaaauuccuggacgcuuaugcagaacacaaacugcaguucugggcugucacggcugaaaaugagccuagcgcgggccugcucucugguuauccauuccagugcuugggcuuuaccccagagcaccagagagacuuuauagcucgugaccugggcccuacccucgccaacucaacacaucacaaugucagacucuuaaugcuagaugaccaaaggcuucuacuuccccacugggccaaggugguucuuaccgacccggaagcugcgaaauacgugcauggcaucgccguccacugguaucuggauuuccuggcaccagcuaaagcaacacugggcgagacacaccguuuguuucccaacaccauguuguucgcguccgaggcuugcguuggcucuaaauucugggaacagucugugaggcuuggcaguugggacagaggaaugcaguauagccauagcaucaucacaaaccuccuguaucacguugugggguggacagauuggaaccucgcauugaaucccgaggggggaccuaauuggguaaggaacuucguggauaguccaauuauaguugauauaacgaaagauacauucuauaagcagccuauguucuaccaccuuggccacuucucuaaauucauccccgagggcucccagcgcguuggccucguggccucgcaaaaaaacgacuuggacgcugucgcccugaugcacccugacgguucugccguugugguggucuugaaccgauccucaaaggacguuccccuuacuaucaaagacccagccguuggcuuucuugagacaauaucaccuggcuauucuauucauacauaucucuggcgcagacaguag

SEQ ID NO: 297782 - RNA, 1350 nt, Artificial Sequence
  derived and/or modified sequence
auggaacuaagcauggggccuauccaggccaaccauaccgggacaggacuacuccucacccugcagccugagcagaaauuccagaaggugaaaggguucggcggcgcuaugacagaugcagccgcacugaauauucuggcuuuaagcccaccagcucagaaucugcuucucaaauccuacuucuccgaggaggggaucggguacaauauaauucgcgugcccauggcgucuugugacuuuuccauucggaccuacacauacgcugauacacccgaugacuuccaacuucacaauuucucucugccagaggaggauacuaagcuuaaaauuccucugauccacagagcucuucaacuggcccaacguccuguuucuuugcuagcauccccuuggacaagccccacuuggcugaaaacaaauggagcggugaauggaaaagggucacugaaaggacagccgggggauaucuaccaccagacaugggcccgguauuuuguuaaguuccucgacgcuuacgccgagcacaagcuccaauucugggcaguuaccgcggagaacgaaccgucagccggccuacuaagcggguauccuuuccaaugucugggcuucacuccugaacaccagcgcgacuuuaucgcccgcgacuugggaccuacucucgcuaacucaacacaucauaaugugagguuacuuauguuggaugaucagcgccugcuccugccucacugggcuaagguugugcucaccgauccugaagccgccaaguauguccauggaauugccguccauugguaucuugacuuccuagcaccggccaaagccacccugggagaaacacaccgcuuguucccuaauaccaugcucuucgccuccgaagcuuguguuggaaguaaguucugggaacaguccgugagguuaggcucaugggaccgugggaugcaauacucucauagcaucauuacuaauuugcuguaucaugugguaggauggacagauuggaaucuggcacucaauccagagggcgggcccaauugggugagaaauuucguggauucgccuauaauuguggacauaacaaaagauaccuucuacaaacagccuauguuuuaccaccuagggcacuuuucaaaguucauuccagagggcucacaacgugugggauugguggccucucaaaaaaaugaccuugacgcuguugcacuuaugcacccggaugggagcgcuguggucguaguacugaaccggaguaguaaagacgugccccugacaaucaaagauccugccgucggcuucuuggagacaaucaguccgggguauaguauucacacauaccucuggcgaagacaguag

SEQ ID NO: 297783 - RNA, 1482 nt, Artificial Sequence
  derived and/or modified sequence
augacccuaagggguuggaguuuccaggugcugccggagucuaaugcuacauacugugacucauucgacccacccaccuuuccagcucucggaacauucucccgauacgagucgaccagaucggguaggcggauggaguuguccauggggccgauucaggccaaccauaccgggacugggcuccuucugacacugcaacccgagcaaaaguuccagaaggugaagggguucggaggcgcuaugacagacgcggcugcccugaauauccucgcucuguccccccccgcucaaaaucuccuccucaaaucauacuuuagcgaagaggggauuggcuauaacauuaucagaguuccuauggcuucuugcgauuucuccauucgcacguacacuuacgccgacacccccgaugauuuccaacuacacaacuuuagccuuccugaagaagacacgaagcugaaaaucccccuaauucacagagcgcugcagcucgcccagcgucccguuucucuacuggcuucucccuggacuuccccuacauggcucaagacuaacggugccguuaacggaaaggggucucuuaagggccaaccaggagauaucuaccaccagacuugggccagauauuucgugaaguuccucgacgcauaugccgagcauaaauuacaguuuugggcggucacagcugagaacgagcccagcgcuggacugcuuuccggauaccccuuucaaugcuugggcuucacacccgaacaucagcgagauuuuauagcaagggaucuagggccuacacucgcuaauucuacacaucauaacguucgacuccucaugcuugacgaccagcggcugcuccucccucauugggcuaaaguuguuuugacugauccggaggcugccaaauacgugcacgguaucgccguucauugguaucucgacuuuuuggccccagcaaaagccacacuaggagaaacacacaggcuguucccaaauacuaugcucuucgcuuccgaggccugcgugggcuccaaauucugggagcagagcgugaggcucggcagcugggauagaggcaugcaguacucacacaguauuauuaccaaucuacuguaccacgucgucggcuggacugauuggaauuuagcucucaacccugaggggggucccaacugggugcgcaauuuugucgauucccccauuauuguugauauuacgaaagauacguucuacaaacagccuauguucuaccaucucggacacuuuucaaaguucauuccagaaggaagccagagggucgggcuuguugccucucaaaagaacgaucucgaugccguagccuugaugcauccagauggauccgcaguggugguuguguuaaauagaucaucaaaggaugugccauugacuauuaaggauccagcaguaggcuuucuugaaaccaucagccccggcuacagcauacauaccuaccucuggcgccgccaguag

SEQ ID NO: 297784 - RNA, 1611 nt, Artificial Sequence
  derived and/or modified sequence
auggaguuuucaucgcccucucgagaggaaugcccaaaaccguugucacgcguuuccauuauggcggguucacucacuggacugcuguuacugcaggccgugaguugggcuuccggcgcuagaccuugcauuccaaagaguuuuggcuauaguucggugguuugcguguguaaugcuacguauugugauucuuucgauccccccacuuuuccagcccuggguaccuucucacguuaugagucuaccagaagcggcagacgcauggaacuuucuauggggccaauucaggcaaaucauaccgguacaggccugcugcuuacccuucagccagagcagaaguuccagaaaguuaaggguuucgguggggcaaugacagaugccgcagcucugaauauauuggcccucuccccuccagcucagaaucucuuacucaagucauacuuuucagaagaaggcauuggcuacaacauuaucagaguuccaauggcauccugcgauuuuuccauccgaacuuacacuuacgccgauacacccgacgacuuucagcuccacaacuucagccucccagaagaagauacuaaacuuaagauuccuuugauccaccgcgcucugcaguuggcacaaagaccugugucacuucuggccucuccuuggaccuccccgacauggcuuaagaccaauggcgcugugaacgguaagggaucucugaagggucagccaggagacaucuaucaccaaaccugggccagauauuuugugaaguuccuggaugccuaugccgaacauaaacugcaguuuugggccguaaccgccgaaaaugaaccaagugcaggacuccugagcggauauccuuuucaaugucuaggcuucacuccagaacaccagagagacuuuauagccagggacuuagggccaacccuggcaaauagcacucaucauaauguaagauuacucaugcucgacgaucagagacuccuacugccgcauugggcuaaagugguguuaacugaccccgaagcagccaaguacguucauggaauugcagugcauugguaucuggauuuccucgcgccagccaaggccaccuuaggcgaaacacaucgacucuuuccaaacacuaugcucuuugcuuccgaggcaugugugggcagcaaauuuugggaacagaguguuagguuaggcucuugggacaggggcaugcaguauagucacucgauuaucacaaaccugcuguaccacguugucggcuggacagauuggaacuuggccuugaauccugaagggggucccaauuggguucguaacuuugucgauucuccuaucauugucgauaucaccaaagacacguucuauaaacaaccuauguucuaccaucugggccauuucucaaaguuuaucccggaagguucccagagaguugggcucgucgcuucucaaaagaaugaucucgacgcuguggcauuaaugcauccggacggcucagcuguuguugucgugcugaaucgcuccaguaaggacgucccucucacaauuaaggacccagccgucggauuccuugaaacuauuucacccggguacucaauucacacauaucuauggagaagacaguag

SEQ ID NO: 297785 - RNA, 1611 nt, Artificial Sequence
  derived and/or modified sequence
auggaguuuaguucccccaguagggaagaaugucccaagccccugucacgagucaguauuauggcuggaucucugaccggccugcugcuguuacaagccgucucuugggcauccggcgcccguccauguauaccuaaguccuuuggcuauucuucagucgugugcgugugcaaugcuaccuauugugauucauucgauccuccaaccuuuccggcucuggggacuuuuaguagguacgagucuacccguagcgguaggcgcauggagcuuucuaugggaccaauucaggcaaaucauacuggcaccggcuuacucuugacacuucagccagagcaaaaguuucagaaagugaaggguuuuggaggcgcuaugaccgaugcugcugccuugaauauccucgccuuguccccacccgcccaaaaucuguuacucaaaucuuauuuuuccgaagaagguaucggcuacaacauuaucagaguuccgauggccucaugugacuuuucuauccggacuuacacauaugcagauacccccgaugacuuccagcuucauaacuucucacucccagaggaggauacaaaacuuaagauucccuugauacaucgcgccuuacagcuagcucagagaccuguuucacuguuggcaagccccuggacauccccaaccugguuaaagacaaauggcgccgugaauggaaaagguagccuuaagggucaaccuggcgacaucuaucaucaaacaugggcgagguacuuugugaaguuucucgaugcguacgcugagcacaaauuacaguucugggccgugaccgcagagaaugaacccagcgccgggcuucugaguggguaucccuuccagugccuggguuucacccccgaacaccagagagacuucauugcgagggauuuggggccaacccuugccaacucaacacaucacaacguucgccuguugaugcuggacgaccagcgccuccuccucccccauugggccaaggucguccugacugaccccgaagcagccaaauacguacaugguauugcugugcacugguaccuugacuuucucgcuccugccaaagcaacccuuggagagacccacagacuguucccuaauaccaugcucuuugcaagugaggcauguguaggcucgaaauuuugggaacaaagcguccgccuaggcuccugggaucgcgguaugcaguauucacacucaaucauaacuaauuugcuguaccaugugguuggcuggacugauuggaaccuugcccuaaauccugaggggggcccgaacugggugcguaacuuuguggauucaccaauuauuguagauauuacuaaggauacuuuuuauaaacagccuauguuuuaucaccuggggcauuucaguaaauuuauaccugaagggucucagagaguaggucuaguggccagucaaaagaaugacuuagaugcuguagcucugaugcaccccgaugggagcgccgucgugguuguucucaauagauccuccaaagaugugccgcuaaccauaaaagaucccgccguuggcuuccuagagacaauuuccccuggauauuccauacacacauaucuguggcgcagacaguag

SEQ ID NO: 297786 - RNA, 1566 nt, Artificial Sequence
  derived and/or modified sequence
auggaauucucaagcccuucucgcgaggagugucccaaaccccugucucgagugucuauuauggcuggcucacugacaggucuccuguuacuucaggcagugucuugggcuucaggagcccggccaugcaucccuaagagcuucggguauuccucuguggucugugugugcaacgcgaccuacugcgacucuuucgauccaccuacauuucccgccuuggguacuuucucacgcuacgaaagcacacggucaggacgccgaauggaacugucuaugggccccauucaagcuaaccacaccggaaccgggcugcuuuuaacccuucaaccugaugccgcagcucugaacauuuuggcuuugagucccccugcucagaaccugcugcucaaaucauauuuuagcgaagaggggauaggcuacaacauaauccgaguccccauggccuccugcgacuuuucaauaaggacuuacacguacgccgacacaccugaugauuuccaacuccacaauuucucacugcccgaagaagacacuaaguugaagauaccacugauacaccgggcccugcagcucgcacaaagaccggugagucugcucgccucucccuggacaucucccacauggcucaaaaccaauggcgcggucaauggaaagggaagucuuaaaggccaaccuggggauaucuaucaccagacaugggcacguuauuucgugaaauuucuagacgcuuaugcugaacacaagcugcaauuuugggccgugacagcugaaaaugagccauccgccggucuacuuucggguuauccguuucagugcuuaggguucacucccgagcaucagcgcgacuucauugcuagagaucuaggacccacacuugcgaacucuacacaccacaaugugaggcuauugaugcuagaugaucagcgguuacuacuaccacacugggcuaaaguggugcucacggauccugaagccgcaaaguauguccacgggauugcuguucauugguacuuggauuuucuggcaccagcaaaagccacucucggcgaaacccaucggcucuuucccaacaccaugcuguucgcuagcgaggccuguguugguagcaaguucugggagcaauccgugagauuaggaucuugggacagaggcaugcaguauucacacucuauaauuaccaaccuucucuaccacguggugggauggaccgacuggaauuuagccuuaaauccugaagggggccccaauuggguaagaaauuucguggacuccccaauuaucgucgacauuacaaaggacacauucuauaaacagccaauguucuaucaccuggggcacuucucuaaguuuaucccagaaggaagccagcgaguggggcuggucgccucccagaaaaacgacuuggaugccguugcucuaaugcacccagauggaagcgcagucguggugguguugaaucggagcucaaaggacgucccccugaccauuaaagacccugccguuggcuuucuugagacaauaucaccuggcuauucuauucauacauaucucuggcgcagacaguag

SEQ ID NO: 297787 - RNA, 1350 nt, Artificial Sequence
  derived and/or modified sequence
auggagcuaucaaugggaccaauucaggccaaucauacugggacagggcuucugcugaccuugcagccugaacaaaaauuucaaaaaguuaagggauuuggaggcgccaugacggaugccgccgcacugaauauucuggcacuaucuccccccgcacaaaaccuguugcugaaaucauacuuuucggaggaggguaucggauauaauaucauucgggugcccauggcaucaugcgacuuuucuaucagaaccuauaccuacgcugauacaccugacgauuuucaacuucacaauuuuagccugcccgaagaagauacaaaguuaaaaaucccacuaauucacagagcccuccagcuagcucagaggccaguuagccuauuggccagcccauggaccucacccaccuggcugaagacuaacggggccgucaauggaaaaggcucuuugaaagggcagcccggagauauuuaucaucagacuugggcuagauacuucguaaaauuucuggaugcguacgccgagcacaagcuccaauuuugggcuguuaccgccgagaaugagcccuccgccggucuccugucagguuauccauuccaaugccugggcuuuacaccugaacaccagcgugacuuuaucgcacgugaucuaggcccuacuuuggccaauagcacccaccacaauguacgacuacugaugcuagaugaucagcggcuccuguuaccccacugggcuaaggugguucugacugacccugaggccgccaaguacgugcacggcauugcgguccauugguaccuugacuuccuagcacccgccaaggcuacccucggagaaacccauaggcucuucccuaacaccaugcuguuugcuucagaagcgugcguugguuccaaguucugggaacagagcguuagacuuggcagcugggacagggguaugcaauauucacauagcaucaucacuaaucugcuauaccauguagugggauggacggacuggaacuuggcucugaaccccgaagggggucccaauugggugaggaauuuuguugauucaccaaucauuguugacauuacuaaggauacuuucuacaagcaaccuauguucuaucaccuaggacauuuuuccaaauucauuccagaggguucccaacgugugggacuaguagcuucacagaagaacgaucucgaugcggucgcacugaugcaucccgacggcucagcuguggucgucguacugaaucgcucuucuaaagacguaccacugaccauuaaagaccccgcagugggcuuccuugaaacaaucucuccuggcuacuccauucacaccuaccuauggcgacgacaguag

SEQ ID NO: 297788 - RNA, 1482 nt, Artificial Sequence
  derived and/or modified sequence
augacacuucgagggugguccuuucaaguucuucccgagaguaacgcaacuuacugugauuccuuugaucccccgaccuucccagcccuugguacauucaguagauacgaauccacuagaucugggcgcagaauggaacucaguaugggaccaauccaggcgaaccauacgggaacuggacuucugcuaacgcugcagcccgaacaaaaauuccagaaaguuaaaggguuuggaggcgcuaugacugaugcugcugcccucaauauccuggcccucagcccacccgcgcagaaccuucugcucaaaucauacuuuagcgaagaggggauuggcuauaacauuaucagaguuccuauggcuucuugcgauuucuccauucgcacguacacuuacgccgacacccccgaugauuuccaacuacacaacuuuagccuuccugaagaagacacgaagcugaaaaucccccuaauucacagagcgcugcagcucgcccagcgucccguuucucuacuggcuucucccuggacuuccccuacauggcucaagacuaacggugccguuaacggaaaggggucucuuaagggccaaccaggagauaucuaccaccagacuugggccagauauuucgugaaguuccucgacgcauaugccgagcauaaauuacaguuuugggcggucacagcugagaacgagcccagcgcuggacugcuuuccggauaccccuuucaaugcuugggcuucacacccgaacaucagcgagauuuuauagcaagggaucuagggccuacacucgcuaauucuacacaucauaacguucgacuccucaugcuugacgaccagcggcugcuccucccucauugggcuaaaguuguuuugacugauccggaggcugccaaauacguucauggaauugcgguucauugguaccuugacuuccuggcgccagcgaaggccacccugggggaaacacaccgccucuuuccaaacaccaugcuuuuugcuagugaggccuguguaggaucuaaauucugggaacagucugugagacucgguucaugggacagggggaugcaauauagccauuccauuaucacuaacuuacuguaccauguggucggauggaccgacuggaaccuagcucugaauccugaagguggaccaaacugggugagaaauuuuguugacuccccaauaauuguugacaucacuaaggacaccuucuacaagcaacccauguuuuaccaucucggacauuucucaaaauuuaucccugaaggcucccagagaguaggccuaguggcuagccaaaaaaaugaccuggaugcaguggcucucaugcauccggacgguagugcugucgugguuguccuuaaccguaguagcaaagacguuccucugacuaucaaagaccccgcugugggcuuccuggaaacaaucucuccuggguauucuauucacacauaucuguggcgaaggcaauag

SEQ ID NO: 297789 - DNA, 1302 bp, Artificial Sequence
  derived and/or modified sequence
atgggcgactggagcttcctgggcaacatcctggaggaggtgaacgagcacagcaccgtgatcggcagagtgtggctgaccgtgctgttcatcttcagaatcctgatcctgggcaccgccgccgagttcgtgtggggcgacgagcagagcgacttcgtgtgcaacacccagcagcccggctgcgagaacgtgtgctacgacgaggccttccccatcagccacatcagactgtgggtgctgcagatcatcttcgtgagcacccccagcctgatgtacgtgggccacgccgtgcactacgtgagaatggaggagaagagaaagagcagagaggccgaggagctgggccagcaggccggcaccaacggcggccccgaccagggcagcgtgaagaagagcagcggcagcaagggcaccaagaagttcagactggagggcaccctgctgagaacctacatctgccacatcatcttcaagaccctgttcgaggtgggcttcatcgtgggccactacttcctgtacggcttcagaatcctgcccctgtacagatgcagcagatggccctgccccaacgtggtggactgcttcgtgagcagacccaccgagaagaccatcttcatcctgttcatgctgagcgtggccagcgtgagcctgttcctgaacgtgatggagctgggccacctgggcctgaagggcatcagaagcgccctgaagagacccgtggagcagcccctgggcgagatccccgagaagagcctgcacagcatcgccgtgagcagcatccagaaggccaagggctaccagctgctggaggaggagaagatcgtgagccactacttccccctgaccgaggtgggcatggtggagaccagccccctgcccgccaagcccttcaaccagttcgaggagaagatcagcaccggccccctgggcgacctgagcagaggctaccaggagaccctgcccagctacgcccaggtgggcgcccaggaggtggagggcgagggcccccccgccgaggagggcgccgagcccgaggtgggcgagaagaaggaggaggccgagagactgaccaccgaggagcaggagaaggtggccgtgcccgagggcgagaaggtggagacccccggcgtggacaaggagggcgagaaggaggagccccagagcgagaaggtgagcaagcagggcctgcccgccgagaagacccccagcctgtgccccgagctgaccaccgacgacgccagacccctgagcagactgagcaaggccagcagcagagccagaagcgacgacctgaccgtgtag

SEQ ID NO: 297790 - DNA, 1302 bp, Artificial Sequence
  derived and/or modified sequence
atgggcgattggtcctttctgggcaatattttggaggaggttaatgaacatagcactgtgatcggcagagtttggctgactgtgctgtttatctttcggattttaatcctcgggacagccgctgagttcgtgtggggagacgaacaaagtgactttgtctgtaacacccagcagccaggctgtgagaatgtgtgctatgatgaggcgtttccaatcagccatataagactctgggtgctgcagataatcttcgtaagcacccccagcctcatgtacgttggccacgcagtgcattatgttagaatggaggagaagcggaaatcaagggaagctgaggaactgggtcaacaagcaggtaccaatggtggccctgatcaaggaagcgtaaaaaaaagcagtggaagtaagggaactaaaaaatttcgattggaaggtacgctcctacgaacatacatttgtcatattattttcaagactttgtttgaagttggattcatcgtcggccactattttctgtacgggtttagaatcctcccattgtatcgttgctccagatggccctgcccaaacgtcgtcgactgtttcgtcagccgcccaaccgagaagactatatttatacttttcatgcttagcgtggcttcggtgagcttgttcctcaatgtgatggaattgggccacctgggcctgaaggggatacgtagcgccctcaaacgccctgtggagcaaccacttggtgaaattcccgaaaagtcattgcattcaattgcagtgtcttccatacagaaggcaaaaggttatcagctccttgaagaagagaagatcgtgtctcattactttcctctgaccgaggtaggaatggtggagacgagcccactccctgctaaaccttttaaccagtttgaagagaaaattagtacagggcccttgggagatttaagcagaggctatcaggagactctcccttcatacgcacaggtaggcgcccaggaggtggagggcgaagggccccccgcagaagagggagctgaacctgaggtgggagagaaaaaggaagaggcggagcgtctgacaacggaggagcaggaaaaggtggctgtgcccgaaggggagaaggtcgagactcctggtgtcgataaagagggagagaaagaggagccacagtcagagaaggtctctaagcagggcctgccagctgagaagacaccctccctgtgtcctgagttgacaacggatgacgcaagacccctgagtcgcttgagtaaggctagctcccgggcacgcagcgacgatcttacagtgtag

SEQ ID NO: 297791 - DNA, 1302 bp, Artificial Sequence
  derived and/or modified sequence
atgggagactggagcttcctgggcaacatcctggaggaggtgaatgagcacagcacagtgattggccgggtgtggctgactgtgctcttcatcttccgcatcctgatcctgggcacagctgctgagtttgtgtggggagatgagcagagcgactttgtgtgcaacacccagcagcccggctgtgaaaatgtgtgctatgatgaggccttccccatcagccacatccggctgtgggtgctgcagatcatctttgtgtccacccccagcctgatgtatgtgggccatgctgtgcactacgtgaggatggaggagaagaggaagagccgggaggccgaggagctgggccagcaggccggcaccaatggaggccctgaccagggctctgtgaagaagagcagcggcagcaagggcaccaagaagttccggctggagggcaccctgctgcggacctacatctgccacatcatcttcaagaccctgtttgaggtgggcttcatcgtgggccactacttcctgtatggcttccgcatcctgcccctgtaccgctgcagccgctggccctgccccaacgtggtggactgctttgtgtcccggcccacagagaagaccatcttcatcctcttcatgctgtctgtggcctctgtgtccctcttcctgaatgtgatggagctgggccacctgggcctgaagggcatccgcagcgccctgaagaggcctgtggagcagcccctgggggagatccctgagaagagcctgcacagcattgctgtgagcagcatccagaaggccaagggctaccagctgctggaggaggagaagatcgtgagccactacttccccctgacagaggtgggcatggtggagaccagccccctgcctgccaagcccttcaaccagtttgaggagaagatcagcacaggccccctgggggacctgagccggggctaccaggagaccctgcccagctatgcccaggtgggcgcccaggaggtggagggggagggccccccagctgaggagggcgctgagcctgaggtgggggagaagaaggaggaggccgagcggctgaccacagaggagcaggagaaggtggccgtgcctgagggggagaaggtggagaccccaggagtggacaaggagggggagaaggaggagccccagagcgagaaggtgtccaagcagggcctgcctgctgagaagacccccagcctgtgcccagagctgaccacagatgatgcccggcccctgagccggctgagcaaggccagcagccgggcccggagtgatgacctgactgtgtag

SEQ ID NO: 297792 - DNA, 1364 bp, Artificial Sequence
  derived and/or modified sequence
gagaaagagcacatatttctccgtgggacactccttgtattggtgggtgagaaatgggcgactggagtttcctggggaacatcttggaggaggtgaatgagcactccaccgtcatcggcagagtctggctcaccgtgcttttcatcttccggatcctcatccttggcacggccgcagagttcgtgtggggggatgagcaatccgacttcgtgtgcaacacccagcagcctggctgcgagaacgtctgctacgacgaggcctttcccatctcccacattcgcctctgggtgctgcagatcatcttcgtctccaccccgtccctgatgtacgtggggcacgcggtgcactacgtccgcatggaggagaagcgcaaaagccgcgaggcggaggagctgggccagcaggcggggactaacggcggcccggaccagggcagcgtcaagaagagcagcggcagcaaaggcactaagaagttccggctggaggggaccctgctgaggacctacatctgccacatcatcttcaagaccctctttgaagtgggcttcatcgtgggccactacttcctgtacgggttccggatcctgcctctgtaccgctgcagccggtggccctgccccaatgtggtggactgcttcgtgtcccggcccacggagaaaaccatcttcatcctgttcatgttgtctgtggcctctgtgtccctattcctcaacgtgatggagttgggccacctgggcctgaaggggatccggtctgccttgaagaggcctgtagagcagcccctgggggagattcctgagaaatccctccactccattgctgtctcctccatccagaaagccaagggctatcagctcctagaagaagagaaaatcgtttcccactatttccccttgaccgaggttgggatggtggagaccagcccactgcctgccaagcctttcaatcagttcgaggagaagatcagcacaggacccctgggggacttgtcccggggctaccaagagacactgccttcctacgctcaggtgggggcacaagaagtggagggcgaggggccgcctgcagaggagggagccgaacccgaggtgggagagaagaaggaggaagcagagaggctgaccacggaggagcaggagaaggtggccgtgccagagggggagaaagtagagacccccggagtggataaggagggtgaaaaagaagagccgcagtcggagaaggtgtcaaagcaagggctgccagctgagaagacaccttcactctgtccagagctgacaacagatgatgccagacccctgagcaggctaagcaaagccagcagccgagccaggtcagacgatctaaccgtatgaagtgacgcc

SEQ ID NO: 297793 - DNA, 1302 bp, Artificial Sequence
  derived and/or modified sequence
atgggcgactggagcttcctgggcaacatcctggaggaggtgaacgaacatagcactgttatcgggagggtctggctcacagtgctgttcatctttagaatcctgatcctgggtactgctgccgagttcgtttggggggacgagcagtcagatttcgtctgcaatacccagcaacccggatgtgaaaatgtatgttatgacgaggcctttccgatctctcatataagactctgggtgctccagatcatcttcgtttccactccaagcctgatgtacgtgggtcatgctgtgcactatgtccgtatggaggaaaagcgtaagagccgcgaagcagaggagctgggccagcaggctgggacaaatgggggcccagaccagggatcggtgaaaaagtcttcggggtcaaaggggaccaagaagttccggcttgaaggaacgttactgagaacctatatctgccacattatctttaagacgttatttgaagttggtttcatcgtgggccactacttcctttacggatttcggatcctccctttatataggtgttccaggtggccctgccccaacgtcgttgactgttttgtcagtagaccaactgagaagactatatttatccttttcatgctttctgtcgctagtgtgtccctattcctgaatgtgatggaattgggccatttgggtctgaaggggattaggtccgcactgaaaaggccggttgagcaacctttaggagaaatccctgagaaatcattgcactccatagccgtgtcttctatccagaaggccaagggataccagttgctggaggaggagaaaatagtgtctcactacttccctttgacagaagtgggcatggttgagacttcccccctgcccgccaagccatttaaccagttcgaagagaagattagcacgggcccactgggagacctatcccgcggctatcaggagaccctcccatcatacgcccaggtcggagcccaggaggtagaaggggagggtccacctgcagaggagggagcagagccagaagttggagagaagaaggaggaagcagagcgcttaactacagaagaacaggagaaggttgcggtaccagagggagaaaaggtggagacccctggagtcgataaagagggggagaaagaggagcctcagtccgagaaggtgtctaaacaaggattacccgccgagaaaacaccttccttatgtccagaactgaccacagacgatgcacgtcccctgagtcggctatcaaaggctagcagccgggccagaagcgatgacctgacggtttag

SEQ ID NO: 297794 - DNA, 1302 bp, Artificial Sequence
  derived and/or modified sequence
atgggtgattggtcctttctgggcaatatcttggaagaggtcaacgagcattccaccgttatcggacgcgtgtggctaaccgtgctattcatctttagaatcctgattctgggcacagcggctgaattcgtctggggagacgagcaatccgatttcgtctgtaacacccagcaacccggatgcgagaatgtgtgttacgatgaggcattcccaatttcacatataaggctgtgggtcctccagattatttttgttagtactccatcgctgatgtacgtaggccacgccgtgcactacgtgaggatggaagagaaaaggaaatccagagaggccgaggagcttggccagcaggccggtacaaacggcggtcccgatcaagggtcagttaaaaagagtagcggctccaagggaacaaaaaagtttcggctggaaggcaccttgctgagaacctacatttgtcatattatctttaaaacactcttcgaagtgggattcattgtcgggcactacttcttgtacggctttagaatccttcctctctataggtgcagccgatggccatgtcccaacgtggtggattgcttcgtgagtcgaccaacagaaaagaccatctttatcctcttcatgctctccgttgcaagcgtgagcctttttctcaacgtaatggaactggggcacctgggacttaagggcattcgatcagctcttaagcgcccagttgaacagcctctgggcgaaatccccgaaaaatccctgcactccattgcagtgtcgtccatccaaaaagctaagggctatcagctgctggaagaagagaagattgtaagtcactatttcccactaaccgaagtcgggatggttgagacatctcccctcccagcaaaacccttcaatcagttcgaggagaagatttcaacgggcccactgggagatttgagtaggggttatcaagagacactccccagttacgcacaggtgggagcgcaggaggtggaaggcgagggcccacccgcagaagagggcgctgaaccagaggtcggcgaaaagaaggaggaagccgagcggctcacgacggaggaacaggagaaggtagctgttccagagggcgagaaggtggaaactccaggagttgacaaagagggggaaaaggaggaacctcaatctgaaaaagtttccaaacagggactgcccgctgagaagaccccttccttatgtcctgaattgaccacagacgatgcaagaccactgagcagacttagcaaagcgtcttccagagctcggagcgacgacctgacagtgtag

SEQ ID NO: 297795 - DNA, 1302 bp, Artificial Sequence
  derived and/or modified sequence
atgggcgactggagctttcttggcaatatcctggaagaagtaaatgaacatagtactgtcataggacgcgtttggcttacggtgctgttcatctttcggatactcattcttggtaccgcagcagaatttgtgtggggtgatgagcaatctgatttcgtgtgtaatacgcagcagcccgggtgcgaaaacgtctgctatgacgaggccttccccatttcccatatccgcctatgggtactccagatcatatttgtgagcaccccgagcctgatgtacgtcggccacgccgtgcattacgttcgaatggaagagaaacgtaagagtagggaagccgaagagcttggacagcaggcaggcacgaacggcggccctgaccagggctctgttaagaagtcttccggctctaaagggactaaaaagtttcgcctagagggtactctcctacggacctatatctgtcacattatattcaaaaccctgttcgaggtggggtttatcgtgggtcattatttcctctacgggtttcgcatactgcccctataccgttgtagccgctggccatgtcccaacgtggtggattgcttcgtgtctaggcctaccgagaaaacaatttttatcttgtttatgctgagcgtggcaagtgtgagcctgtttctgaacgtcatggaactgggacatcttggtcttaaaggaatccgctctgccctcaaacgccccgtggagcagccgctgggggagattccagagaagagcctgcacagcattgccgtttcctctattcaaaaggcaaaaggctatcagctgctggaagaagagaaaatcgtctcccattatttcccattaaccgaggtgggcatggtggagacctcaccactccctgccaaaccatttaaccagttcgaggagaagatatcaactgggcctcttggagatctgtcccgtggataccaggagaccctcccatcatatgcccaggtcggcgctcaggaagttgaaggggagggaccacccgctgaagagggagcagagccagaagtgggggagaagaaagaggaagccgagcgcctgaccacagaggaacaagaaaaagtggccgtccccgaaggagaaaaagtagaaacccccggtgtggacaaggaaggtgagaaggaggagccccagtccgagaaggtgagcaaacaggggctgccggccgaaaagacaccaagtctctgtccggaattgacaacagacgacgctcggcctctttctagactgagcaaggcgagttctagagcccggtccgacgatctaaccgtgtag

SEQ ID NO: 297796 - DNA, 1302 bp, Artificial Sequence
  derived and/or modified sequence
atgggagactggtctttcttgggaaacatcttggaagaagttaacgaacactcaaccgttatcggacgggtgtggctgaccgtgctatttatattcagaatcctgatcctggggacagctgctgaatttgtatggggtgacgaacagagcgactttgtttgtaacacccaacagcctggctgcgagaatgtttgttatgacgaggcgttccctatttcccacataagactatgggtacttcagatcatctttgtgtctaccccgtcgctgatgtacgtgggccatgcggtccactacgtgagaatggaagagaagcgaaagtcacgcgaggctgaggaactgggccagcaggcaggtaccaatggtggcccagaccagggatcagttaaaaaaagctcagggagcaaaggcaccaagaagtttcgtcttgagggcaccctactgcgcacgtacatttgccatattatattcaaaaccctctttgaagtcggctttattgtgggacattattttctttatgggtttagaatattacctctgtaccgctgttcccgctggccttgccctaatgtggtggactgctttgtgagccgcccaaccgagaagacgattttcatactgttcatgctctccgtggccagcgtgagtctgttcttgaatgttatggaattagggcatctgggcctaaagggaatacgctcagccctgaagcgcccagtagaacagcctctgggtgaaatccctgaaaaaagtcttcactctattgctgtctcatcgatccagaaggccaagggttatcaattattggaagaggagaagatcgtgtcccactattttccgttgacggaggtgggaatggtcgaaaccagccccttaccggccaagccttttaatcaattcgaggagaaaatcagcaccggtcccctgggggatctgagccgaggctatcaggagaccctaccctcgtacgcccaggtgggagcacaggaagttgaaggcgaagggcctccagccgaagagggggccgagcccgaggtcggagagaagaaggaagaggcggaaaggttgacgactgaagaacaggagaaagtagccgtgccggaaggcgaaaaggtggaaacaccgggtgtcgataaagaaggggaaaaggaagagccccagtctgagaaagtctccaaacagggtcttccagctgaaaaaacgccgagcctgtgtcccgaactgactaccgacgatgctcgacccttaagccgactgtcaaaagcaagcagccgtgcacgatctgacgacctgacagtgtag

SEQ ID NO: 297797 - DNA, 1302 bp, Artificial Sequence
  derived and/or modified sequence
atgggcgactggagtttcctggggaacatcttggaggaggtgaatgagcactccaccgtcatcggcagagtctggctcaccgtgcttttcatcttccggatcctcatccttggcacggccgcagagttcgtgtggggggatgagcaatccgacttcgtgtgcaacacccagcagcctggctgcgagaacgtctgctacgacgaggcctttcccatctcccacattcgcctctgggtgctgcagatcatcttcgtctccaccccgtccctgatgtacgtggggcacgcggtgcactacgtccgcatggaggagaagcgcaaaagccgcgaggcggaggagctgggccagcaggcggggactaacggcggcccggaccagggcagcgtcaagaagagcagcggcagcaaaggcactaagaagttccggctggaggggaccctgctgaggacctacatctgccacatcatcttcaagaccctctttgaagtgggcttcatcgtgggccactacttcctgtacgggttccggatcctgcctctgtaccgctgcagccggtggccctgccccaatgtggtggactgcttcgtgtcccggcccacggagaaaaccatcttcatcctgttcatgttgtctgtggcctctgtgtccctattcctcaacgtgatggagttgggccacctgggcctgaaggggatccggtctgccttgaagaggcctgtagagcagcccctgggggagattcctgagaaatccctccactccattgctgtctcctccatccagaaagccaagggctatcagctcctagaagaagagaaaatcgtttcccactatttccccttgaccgaggttgggatggtggagaccagcccactgcctgccaagcctttcaatcagttcgaggagaagatcagcacaggacccctgggggacttgtcccggggctaccaagagacactgccttcctacgctcaggtgggggcacaagaagtggagggcgaggggccgcctgcagaggagggagccgaacccgaggtgggagagaagaaggaggaagcagagaggctgaccacggaggagcaggagaaggtggccgtgccagagggggagaaagtagagacccccggagtggataaggagggtgaaaaagaagagccgcagtcggagaaggtgtcaaagcaagggctgccagctgagaagacaccttcactctgtccagagctgacaacagatgatgccagacccctgagcaggctaagcaaagccagcagccgagccaggtcagacgatctaaccgtatga

SEQ ID NO: 297798 - DNA, 1302 bp, Artificial Sequence
  derived and/or modified sequence
atgggcgactggagcttcctgggcaacatcctggaggaggtgaacgagcacagcacggtgatcgggcgggtttggctgaccgtgctgttcatctttcgaattctcatactcgggacagcggctgagttcgtttggggagacgagcaaagtgacttcgtttgcaacacacaacagcctggatgtgaaaacgtttgttatgatgaggctttccctatctctcacatcagactgtgggtgctgcagattattttcgtgtctaccccgtcccttatgtatgtcggccatgctgtccactatgtgagaatggaggaaaagaggaagagccgcgaggctgaagaactgggtcagcaggctgggaccaacggcggtcccgatcaaggcagcgtaaagaagagcagtggcagtaaaggcaccaagaagtttcgcctggaggggactctgttacgtacttatatctgccacatcatttttaagactctcttcgaagtgggatttatcgtggggcactattttctgtacggatttcgcatcctccctctctacagatgctccaggtggccttgccctaatgtcgtcgactgctttgtgagccgacccacagagaagacaattttcatcctgtttatgttaagtgtggcatcagtgagcctcttcctcaacgtgatggagctcggtcacctgggcctgaagggcattcgatcggcactgaaacgcccagtggagcagcccttgggcgaaatcccggaaaaatctctacactccattgcggtgtctagcatccagaaagctaagggctatcaactgctggaagaagaaaagatcgtttcccactattttccactgacagaggtcggcatggtggaaacctctcctctgcccgccaagccattcaatcagttcgaggagaaaattagtactggacctcttggggacctcagcagaggctaccaggagactctgccatcttatgcccaggttggcgcgcaggaggtggaaggagaagggccgcccgccgaggagggagcagaacccgaagtgggagagaaaaaagaggaggctgaaaggctcaccacggaggaacaggagaaggttgccgtgccagaaggcgagaaggtggaaacacccggcgtcgacaaagagggagaaaaagaagaacctcaatctgaaaaagtctccaaacaggggctgcctgctgagaagacgccttcattgtgtcccgaactgacaactgacgatgcccgtcctctttctcggctgagcaaggccagcagccgcgctcgctcggacgacctcacagtctag

SEQ ID NO: 297799 - DNA, 1302 bp, Artificial Sequence
  derived and/or modified sequence
atgggcgactggagcttcctgggcaacatcctggaggaggtgaacgagcattcgactgtgatcggccgcgtgtggctgaccgtcttgtttatcttccgcatactaatcctgggaaccgccgccgagtttgtgtggggcgatgaacagtccgacttcgtgtgtaatacacagcagccaggttgcgaaaatgtctgttacgatgaggcttttcccatcagccatattaggttgtgggtgctccagattattttcgtgagtacacctagtctgatgtatgttggacatgccgtgcactacgttcgaatggaggaaaagaggaagagccgcgaagcagaagaactcgggcaacaagccgggactaatgggggcccggatcagggctcagtgaaaaaatccagcgggtctaagggtaccaagaagttcaggctagaagggaccctcctacgcacctacatttgtcacatcatcttcaagaccctgtttgaagtgggctttatcgtgggccactatttcctgtatggcttcaggatccttcccctgtaccgctgttcccggtggccatgccccaacgtcgttgactgttttgtgagccggcccacggaaaaaaccatctttattctcttcatgctttctgtggctagtgtgagcctgttcctcaatgtgatggaattggggcacttaggtcttaagggaattagaagcgccctgaagcgtcccgtggaacaaccgctgggtgaaatcccagaaaaaagcctccactcaatcgccgttagcagtatacagaaggctaaaggatatcaactgttggaggaagagaagatcgtatcacactatttccctctgacagaagttggtatggtcgagactagtccattacccgctaagccattcaatcaattcgaagagaaaatcagcaccgggccgctgggcgatctcagcaggggataccaggagactctgcccagctatgctcaggttggagcccaagaagtcgaaggcgaggggcctccagccgaggaaggagcagaacccgaggttggcgaaaaaaaagaagaggccgagcggctgaccactgaggaacaggagaaagtggctgttccagagggagagaaggttgagacgccaggcgtagacaaggaaggtgagaaggaggaacctcagagcgaaaaagtttcaaagcagggactgcccgccgaaaaaacgccaagcttatgcccagaactgaccacagatgatgcgcggcctctgtcccgattgagcaaggcctcaagcagggccaggagtgatgacctgaccgtttag

SEQ ID NO: 297800 - DNA, 1302 bp, Artificial Sequence
  derived and/or modified sequence
atgggcgactggtcctttttaggcaacattctagaagaagtgaacgagcactctaccgtcattggacgcgtgtggttaactgtgctttttattttcaggatcctgattcttggaacagctgctgagtttgtgtggggcgatgaacagagcgatttcgtctgtaatacgcagcagcccggatgcgagaacgtctgttatgatgaggcatttccgattagccacataaggctgtgggtactgcagataatattcgtatcaacaccatcactgatgtatgtgggtcatgccgtgcattatgtgcgtatggaagagaagaggaaaagccgcgaggccgaagagctgggtcaacaggcaggtacaaatggcggacccgaccaaggttcagttaagaagagcagcggctccaagggaactaagaaattccggcttgaaggtaccctgctgagaacctacatctgccacatcatctttaagaccctgttcgaggttggtttcatagtaggacattattttctttatgggtttcgtattctgcccttgtacaggtgtagtagatggccatgtcctaacgtcgttgattgctttgtgtctcggcctacagagaagaccatcttcattcttttcatgctgagtgtggcctcagtgagtctgtttctgaacgtgatggagttgggccatctcggccttaaaggcatcagatccgctttgaaacggccagtggagcagccactcggcgagatcccagaaaagagcctgcattccattgcagtgtcgagcatccagaaggccaaaggctaccaattgctggaggaggaaaaaattgtaagccactacttccccctgacagaggttggcatggtggaaacgtctccactccctgcaaaaccgtttaaccagttcgaagaaaagatttcgaccgggcctttaggcgacctctcccggggataccaagagacattaccatcctatgcgcaggtaggggctcaagaggtggaaggtgagggcccaccagctgaggagggcgcagagcccgaagtgggggagaagaaggaagaggctgaacgattaaccaccgaagaacaagagaaggtggccgtacccgagggagagaaagtggaaacaccgggagttgacaaggaaggtgagaaagaggagccacagtccgagaaggttagtaagcaggggcttccggctgaaaagaccccgagtctgtgccccgagctgacgacagatgatgcacgcccactgtcacggctgtcaaaagcaagcagtcgggctaggtctgacgaccttactgtatag

SEQ ID NO: 297801 - DNA, 1302 bp, Artificial Sequence
  derived and/or modified sequence
atgggggactggtccttccttggcaacattttggaggaggtgaatgaacattcaactgtaatcggccgagtctggctcacagtcctattcatattccgtatcctcatcctgggcaccgctgcggagttcgtttggggtgacgagcagtccgactttgtgtgtaatacacagcaacccggttgcgaaaacgtgtgttacgatgaagcatttcctattagtcatattcgcctgtgggtcctgcagataatcttcgtcagcacaccttcactgatgtatgtcggccatgctgttcattatgttcgcatggaggagaagaggaagtcccgcgaggctgaagaactgggccagcaggctgggaccaacggcggtcctgaccagggttctgtcaaaaagtcctcaggatccaaagggacaaagaagtttaggttagagggcacattattgcggacttatatttgccatattatcttcaagaccctgttcgaggtcgggtttatagtgggtcactatttcttatacgggttccgcatactgcctctttataggtgctccaggtggccatgccctaacgtagtggattgctttgtgtcccgccctacagagaaaacaattttcatcctcttcatgctgtccgtcgcttccgtgtccctctttttgaacgtgatggagctggggcacttgggcctaaaagggatccgttcggctctcaagcgacctgtagaacagcctctcggagaaataccagaaaaatccctgcactcgatcgctgtgtcatcaatccagaaggctaagggatatcagctcttagaggaggaaaaaatcgtcagccactacttccccctcactgaagtcggaatggttgaaacttccccactccctgcaaagccctttaaccagttcgaggaaaaaattagcactggaccactcggcgatttatctcgagggtaccaggagacactgccgtcttacgctcaagtaggtgcccaggaggtggaaggggaagggccacctgcggaggagggtgctgagccggaggtgggcgaaaagaaagaggaagcggaacgcctgactacagaggaacaggaaaaggtcgctgttcccgaaggggaaaaagtcgagactccaggcgtggataaagagggagagaaagaggagccacagtctgaaaaggtctctaagcagggactgccagctgagaaaaccccttccctgtgcccagagctcactacagacgatgctaggcccctgtctcgcctgtctaaagcatctagcagagcccgatccgacgacttgaccgtctag

SEQ ID NO: 297802 - DNA, 747 bp, Artificial Sequence
  derived and/or modified sequence
tagtgttccacatggtctttcttggcaccactgcctcagcagtttcacctgaagattctcttcttgccccttacccccttgcgcctgttactattgtcggctcaagtcctgattgtggtcccctttagagaagcagctctgcgcgtggttcaactctttatcagcttactagaaggcgattccaaaaaaaagatcatcgtctccaacaaaaagcggtttcagggggagtatggctcagatccggaagaacggccccccaacctgaagagacctgaagactatgaagcagtgtttgtcggcaacatcgacgatcatttccgaatcggcgtcgccatcctgcagaggtctatcagactttatgcccctttctactcaagcgatattcttatcgctagtcccctaggacttaggacaatcataggaggggaaggagagaagaaacgtgacttcgatttcctgagctctatcgaactgctcattattgatcaggccgacatctatctaatgcaaaactgggaacacgtcctccatcttatgaatcatatgaacctactgccgctcgactctcatggagtggacttctcaagggtaagaatgtggagtttgaacaactggtccaaatattatagacagaccttgttattcggggccctccaggacgctcagataaactccgtgtttaacaagtattgtgtgaatatgcagggtcaggtcggttcccggctggtcagcagtgtttcttcctag

SEQ ID NO: 297803 - DNA, 747 bp, Artificial Sequence
  derived and/or modified sequence
tgatgcagcacctggagcttcctggcccccctgccccagcagttccacctgaagatcctcttcctgcccctgacccccctgcggctgctgctgctgagcgcccaggtgctgattgtggtgcccttccgggaggccgccctgcgggtggtgcagctgttcatcagcctgctggagggggacagcaagaagaagatcatcgtgagcaacaagaagcgcttccagggcgagtatggcagtgaccctgaggagaggcctcccaacctgaagaggcctgaggactatgaggccgtgtttgtgggcaacattgatgaccacttccgcatcggcgtggccatcctgcagaggagcatccggctgtatgcccccttctacagcagtgacatcctgattgccagccccctgggcctgcggaccatcatcggcggggagggggagaagaagagggactttgacttcctgagcagcattgagctgctgatcatcgaccaggccgacatctacctgatgcagaactgggagcacgtgctgcacctgatgaaccacatgaacctgctgcccctggacagccacggcgtggacttcagccgggtgaggatgtggagcctgaacaactggagcaagtactaccggcagaccctgctgtttggagccctgcaggatgcccagatcaacagcgtcttcaacaagtactgtgtgaacatgcagggccaggtgggcagccggctggtgtcctctgtgagcagctag

SEQ ID NO: 297804 - DNA, 747 bp, Artificial Sequence
  derived and/or modified sequence
tgatgcagcacctggagcttcctggcccccctgccccagcagttccatttgaaaattctattccttccactcaccccactaaggcttctgctgctgtctgcccaggtgctgattgtcgtgccatttcgggaagcagcccttcgcgtcgtgcagttattcatttccctgctcgagggcgattctaagaaaaaaatcattgtgtcgaataagaaacgctttcaaggagagtacgggtctgatccggaggagcgtccccccaacctgaaaaggcccgaggactacgaggccgttttcgtcgggaatatcgacgatcacttcagaatcggagtggcaatcctgcagcgcagcatccgcctctacgccccattttattctagcgatatcctgattgccagcccattgggccttaggacgattataggcggcgagggagaaaagaagagggacttcgatttcctaagttctatcgagctgttgatcattgatcaagccgatatttacctgatgcaaaattgggaacacgtgctccatctgatgaatcatatgaatctgttgcccctggactctcatggtgtcgatttttcccgcgtgcgaatgtggagcctgaataactggtccaaatattaccgccagactctgttgtttggggcactgcaggacgcccagatcaactctgtttttaacaagtattgcgtgaacatgcagggacaggtgggctctcgactggtgagcagcgtcagctcatag

SEQ ID NO: 297805 - DNA, 747 bp, Artificial Sequence
  derived and/or modified sequence
taatgtagcacatggtccttcctggctccactgccccaacagttccacttgaagatcttgtttctgccgctgacaccacttcgactcctgcttctgtcagctcaggtactgatcgtggtccccttccgcgaagccgctctgcgtgtggtacagctgttcatctctttgctggagggagatagtaagaagaagattatcgtgtccaacaagaagcgcttccaaggcgaatatggcagcgatcctgaagagcggccacccaatctaaagcgcccagaggactatgaggctgttttcgtgggcaatatagacgaccatttcagaataggggtagcaatcctgcagaggagcattaggttgtatgccccattctattcttctgacatcctgatcgccagccccctgggtctccggaccatcatcggcggtgaaggggagaagaaacgcgattttgattttctgtcctcaatcgagttgctgatcattgatcaagctgatatttacctgatgcaaaattgggagcatgtcctgcatctgatgaaccacatgaatctgctgcccctggactcacatggcgtggattttagccgcgtcagaatgtggtctctcaataactggtctaaatattacaggcagacacttctgttcggtgccctacaggatgcccagatcaatagtgttttcaacaaatactgcgtgaatatgcaggggcaggtcgggagccgcctagtttcaagcgtgtcaagttag

SEQ ID NO: 297806 - DNA, 2895 bp, Artificial Sequence
  derived and/or modified sequence
actgctctacatggagctttttagctccacttcctcagcagtttcacctcaagatcctgttccttcctcttaccccactaaggctgctgttgctgtctgcacaggtactgatagtggtgccattccgggaagctgctttgcgggtggtgcagctcttcatcagcctcctcgagggtgacagcaagaagaaaatcattgtgagcaacaaaaagaggtttcagggagaatatggatcagatcccgaggagagaccacccaacttgaagaggcctgaggattatgaagccgtatttgtgggcaatattgatgaccacttcaggattggagtggcaatacttcagagaagcatccgactctatgccccgttttactcctcggatatcctcattgcttcccccctgggcttgaggaccatcattggtggagaaggagagaagaagagagattttgactttctgtcttctatcgagcttctcatcattgatcaagctgacatttacctgatgcagaactgggagcatgtcctgcatttgatgaatcacatgaacctactacccctggactcacatggggtagacttttctcgagtgcggatgtggagcctcaataattggtccaagtactatcgccagacactgctatttggggcccttcaggatgcccagatcaactcagtgttcaacaagtactgtgtcaacatgcaaggccaggtgggttctcgtcttgtttcctcagtatcttcatgagcactgtttattgtttgggtcctgaggtagaaggaggcgatagcttctggtcaagaaggggatggctgtccacctaacgctcttgttgactactggcaggtggccgtgaggaatgtcccaatgacaggctctatcagtcatgtcctggtgcagctcccacatgtcttccagaggatggaagctgaaaacctagcttcagtgattgatgccaggtaacccactcctcccagcaggcccctggggaccacatagagagatttgacttgggcatacaaacctagaattggattccattttgcttttattgataactaccaaatcagttgagataattgaacttaattatgtcatttgtcagaggaggaaactgaagcacagagagaaatagtgactttggcctaggtctcataactagttagtagcagggttattactataaatcaggactctttcactcttgactgtggcattttaaaattatacagctttatgctacaaagtgtctcatgtcagcaagttaattgtaagcccctcagggaaagaactatttttctaattgtataatttccccctttttcttcattgtgtttagttaggggaccccaaagaagcttagtgaggcttagtatatggtagatgttcagtgattatttgttgactgttggactgagtgactgagtgactgactgactgactgaatagtgtggtgtgtacttcctagagtaattctctgggatataatggtattacatctgttttttacaatgaatagtgttgacacttatttttttagtgtgcttatcaagttttatccttacataatctctttgagaggaggtaaatcatattggcctctggggaggtaatcttttaacacgagattgtaatttgctcagggtcacacagttaagagacaccataagcttagctctagacattaattttgccctttgccattccaaatcaggtttaacttttttgtgaacaagattttgccacagtatcgtgatgcagtcatgtctcacacgctcatctatatcccctcctactttgacttcgtgcgtcttcgaaattacttcaagaaggaggaattgaattttacccacatctgcgagtacacgcagaagtctggtgtctccagggccagacacttcttccttcaaggagagaaacagtttctacttttcacagagcgcttccatttctacaaaaggtaaagtggtgccaggtttcaagcctcctctctgaaggggaggtgcaggacaaatcatggcctgctctgaatgcatggcaggcttcgtggtgttgagatcatccctcactctcgcactcttacaaagtagccagagagtttttggtttggacagactcttcttggttggttagttggttttctcccaaaatgggcattgctgaagaaggatgtagaaaccaaagcataccctgtctatagacctggcatgtagctgtggttatacactgcaagaaggacattacaggacaactcaaatgaatacaaggaaggggagggaccttccctgtattcacttgagttgtccctgtctagactttttccctctgtttgccctcagtgcacagacaaaagcattgagaactgtgttttctggggagatggaggctgagtacagtgtcagtttccagacagttgcggtgttcctgaggtatgcacagatactccctaccaaggagaactaggaccgtgggctccttgacatttgcaggaggtaaaagggtaagggcttcaagttgaatgttgaagggtttcagcgtttgcttagatttcctaccaggtgactttgacaaaataagttgattggtcttcatgttatttttttaaaaactcaggccaggtgcagtggctcacacctgtaatcccagcactttgggaggccaaggcaggcgaatcacctgtggtcaggagttcaagaccatcccggctaacatggtgaaaccccgtttctactaaaaatataaaaaattagttgagcgtggtggtgtgtgcctataatcccagctactcgggaggctgaggcaggagaatagcttgaacccgggaggcagaggttgcagttagctgagatcgtgccattgcactccagcttgggcaacaagagcgaaactccatctc

SEQ ID NO: 297807 - DNA, 747 bp, Artificial Sequence
  derived and/or modified sequence
tgatgcagcacctggagcttcctggcccccctgccccagcagttccacctgaagatcctgttcctgcccctgacccccctgagactgctgctgctgagcgcccaggtgctgatcgtggtgcccttcagagaggccgccctgagagtggtgcagctgttcatcagcctgctggagggcgacagcaagaagaagatcatcgtgagcaacaagaagagattccagggcgagtacggcagcgaccccgaggagagaccccccaacctgaagagacccgaggactacgaggccgtgttcgtgggcaacatcgacgaccacttcagaatcggcgtggccatcctgcagagaagcatcagactgtacgcccccttctacagcagcgacatcctgatcgccagccccctgggcctgagaaccatcatcggcggcgagggcgagaagaagagagacttcgacttcctgagcagcatcgagctgctgatcatcgaccaggccgacatctacctgatgcagaactgggagcacgtgctgcacctgatgaaccacatgaacctgctgcccctggacagccacggcgtggacttcagcagagtgagaatgtggagcctgaacaactggagcaagtactacagacagaccctgctgttcggcgccctgcaggacgcccagatcaacagcgtgttcaacaagtactgcgtgaacatgcagggccaggtgggcagcagactggtgagcagcgtgagcagctag

SEQ ID NO: 297808 - DNA, 2446 bp, Artificial Sequence
  derived and/or modified sequence
aaaatatgaacagatacagcttcatgctttcaggaaaccaccttctcttccatcttctcctttggcctgctcagacagccagacttcttaaacatatttttcctacaggctcatgcaaattaagggatgtggctgagcatctccttcagtgccctcaaacaggtcatgaatgttgcaaagcccagaatcgtgctaacctggtagaaggctggtttagccagaacacacagagaggaccttctcatgatggtgtggctgaattccacatgtcactaacagtatcttgccctgacccgactccaagtactgatccccaaggaaggcataatagagagcccatcttggggagggatgatgacttcatgtgcaaacaagtcaaattcaggatgtgtgttgtgggcagagatggcaatgcccagtcatctgttaggtatacaggtccgctgtacaggagaaaaatcagaacagaatttctatttgtagtgtttcttttagagactagggaattgaaaccacaggtgaataagaatgtacaaggaaccaggccttcttgaagaaatagctgaaccagattggtgtcaggagctgtacaaggggatccaagaatgtcttgtcatacaagccggacagctattaaagacaactgaggtcatggcaaaagggcccaggcttctactggccaacaatgagacaatttgagcatcccaaagaataatgactttagtggactgaaacacatcaacatgtatacatccatgaattcataatactcaaaacggtaaaaccaaactcatttgttacctttggaggagtctgtcacctctgattattctgaaaactggtaaatagaaggggaaaattcaagcatttattctgcttttcttgtataaactgtacctcacagttacggaagagctgataagggaaatgtcttctttattgaaaaattcagctgatacatttggaaggaatgagagaattacagtaccaccattaggtgacaatgagggtctggttttttatttttcttttgctgagtgctgggaacatagtgataacaaaaaaagccatagtgttctggcccttctggagttttgattctagcacattaaccaaataatcccagagcaaaaataaaatgtcaactatggtaagtgtagagaagggaaaatacacagaacttttaacagcttagatccgaggaagctgaccagcctgcaaaaagggacagcttccctagggaagtgactttgcagctgtgatgatggatgactaagagttaaccaaggaatgggaggagggaggaggagacagagaaggctttccaagcagaagccagagcatgtgcaaagatcctgtggcaagaaggagcctggtgcaggggaggaacgaagagacatgcaagctggctggagtgcagagagggagacaggcaggcaggcaggtggttggatggggaggcaaggatcagatcctgagtcccttggagaagcaggaaggcatcatgatgactaatgtcagaggcaggggaggacaggtagggatagacagggaagcagtgctgggaagatgctaaaatgctgcagtttgtgcttggaaagatcatggcctggttcttccattgtcatgatgggttgttctctttcttattgtttttctaatttgtcttgactaatggagaagatcaggagctcaaaaatagaggttgtttacagcactcagtttggctgctataggttaatgggcttagactctttaaggggattaggcttttgctcagagaccagtggagtattctagccaggctgtcttgtgaaggtggtatgttaagaactaggtttgtctgatttctcaaattaaaatgtggtacatcaaattaaatttgaatttcagataaataacaactaatttcagatgtgtcagataaagaatggatatggctctagtacaatatgggataatgaatattttcagataaatagatgccctgtattctgtgtagcaagcataactagagaatcaatgttagtgctcaaactaagaagacttttgagaaattatcagaggtaaatacaaatatacatttccatccatccatccatccatccatccatccatccatccatccatccatccatccctgttgagctccaactatgtgtcaggcacttctggggggttgagggtattgtgatcagtaagacaaactctctgcctttatagtgtttacattctaggagaaaaatattcatcttagagagattataaaaaacaaatcttccgaaatagtatctgttacgtccaaaatagaggaatgtataaataaatgttaatatgatggactaacacgcagccattacaaaaatcctgttttgaaggctattaaatgtcatggtgaattgattccaatataaaaccaaatgaaataaaagcagttcacaaaacc

SEQ ID NO: 297809 - protein, 450 aa, Artificial Sequence
  derived and/or modified sequence
MVALDVEFYTLKKMFWQVLLTGLISFSTASIIIGYVVIKFNKDSWDLQSCLLFSITLGIIDPLRSVNSLKTIGISKIYIDLIRGESLIICSIASIFFGNFRGNRIHFSIFRDLHVGIELSYDILGSIIFGYWCAKIIQCILADVFSNMLTNIILCFSMVYMTFYIVEFLGMSGTLALAAVGLNLDSLTFKPKIELVITKFLRIFSSVYEHLIYAFFGIVIGCGELSHYEFHTIPFIFILFTTVNLVRLLTILLVSPILMHSNYEYNWRWGVVITWSGIKGVFNLLWAPDVYNLAERKVEVPQMFILYVQVISLLTMGINSYVMTQSARKLDLCVLSLPRQMILQNATQHIQEIVQNTITLFKTEKILTNVNWTLVEDKTRIEYIPFSHVSHNDMKTESTTDEALMEEARLHVAAIQMSSFEKQRNNGILEIEAARILIGAAKCYYSIQGK

SEQ ID NO: 297810 - DNA, 2237 bp, Artificial Sequence
  derived and/or modified sequence
aaacagacgcataactgtgcattgttctttgggattttgagagccttcatctcaatttcaactttaaagcagcttaatctttaaggaacatatctctgatctgggtaatttgtagaacttaatttgagggtcattacatgtgaggatagcaggagttgaagatgccaaggacctgaagggctactggagggacaggtgaagtgatttgaagatgtagcattttgaatctctttctggcccatcctctgcttcacaccagaatcattgtgacctgtagacctgcaaaacaaaggaccaaagccagctgactaccttgttgaagagaaacatttcacaacgcttgtatgcttcattgttgttttgggaggtgcaccaaattgtctaccctcttctaagaacatcaagtttttcactttattcttacttttcacctttaattatatttatggttgctttggatgtagaattttatacactcaagaaaatgttttggcaggtcttgttaactggattaattagcttttctacagcaagcatcataattggatatgtcgttataaaattcaataaagattcatgggatttgcaatcttgcctactctttagcatcacccttggcattatagatcctcttcgttctgtgaattcactaaaaactattggcatttctaaaatatacattgatctcattagaggagaatcattgatcatttgtagcatcgcatcaattttttttggaaattttcggggcaacagaatccacttttctatttttagagatttacatgtaggcattgaactcagctatgacattttgggaagcataatatttggatattggtgtgcaaaaatcattcagtgtatattggctgacgtttttagcaatatgctgactaatatcattctctgcttttcaatggtgtacatgactttctatattgtggaatttttaggaatgtcaggcactcttgccttagccgctgtaggactgaatttagattctttaacttttaaaccgaagatcgaacttgtaattactaagttcttaagaattttttcatctgtatatgaacatttaatatatgctttctttggcattgtgattggatgtggagaactcagccactatgaatttcacactatacctttcatattcattttatttacaacagtgaatttggtaaggttgcttactattttgttagtgagccctattttgatgcattcaaattatgaatataattggcgatggggagttgtaatcacgtggtctggaattaaaggagtttttaatttactctgggctcctgatgtttataatctcgctgaacgaaaagtggaagtaccacaaatgtttatactctatgtacaagtaatatcattattgacaatgggaataaattcatacgtgatgactcagtcagccaggaagttagatttgtgtgttctttccctcccaagacaaatgatcttgcaaaatgccactcagcacatacaggagatagtacagaacacaataactttatttaaaacagaaaaaattttgacaaatgttaactggaccttagtagaagataaaacgaggatcgaatacattcctttttcccacgtttcacataatgatatgaagacagaatccacaacagatgaagctttaatggaggaagccagattgcatgtagctgcaatacaaatgagtagctttgaaaaacagcgtaacaatggaattcttgaaatagaggcagcccggatattaattggtgcagcaaaatgctattactccatccaaggaaaataataattttgaaaaggaaatattttcaacaatgttggaatactttggaattttttatcctggttattggaatcattgatatcttttgtgtatactttgtgaaattgagaccagacaacttggctcttatacagcttacagtaataatgggatatttaagaataattaggtttcttcctctcttcaagataatagtaccaatactgataagaattgcagatgtgcagatcaaaaagcgcctcagcttgatgtatagtattacaaaaggctatatcaaaagtcaagaagatgccaaacttctaataaaacaaatagctgtctgtgaatcaatatatcagaaactatgtgaaattttggaaaccaacaaacaggatgctgtcaaagaattagtactcatggagcatgagggtcgtgatgttgtcattgctttgaagactaaaca

SEQ ID NO: 297811 - DNA, 1353 bp, Artificial Sequence
  derived and/or modified sequence
atggtggccctggacgtggagttctacaccctgaagaagatgttctggcaggtgctgctgaccggcctgatcagcttcagcaccgccagcatcatcatcggctacgtggtgatcaagttcaacaaggacagctgggacctgcagagctgcctgctgttcagcatcaccctgggcatcatcgaccccctgagaagcgtgaacagcctgaagaccatcggcatcagcaagatctacatcgacctgatcagaggcgagagcctgatcatctgcagcatcgccagcatcttcttcggcaacttcagaggcaacagaatccacttcagcatcttcagagacctgcacgtgggcatcgagctgagctacgacatcctgggcagcatcatcttcggctactggtgcgccaagatcatccagtgcatcctggccgacgtgttcagcaacatgctgaccaacatcatcctgtgcttcagcatggtgtacatgaccttctacatcgtggagttcctgggcatgagcggcaccctggccctggccgccgtgggcctgaacctggacagcctgaccttcaagcccaagatcgagctggtgatcaccaagttcctgagaatcttcagcagcgtgtacgagcacctgatctacgccttcttcggcatcgtgatcggctgcggcgagctgagccactacgagttccacaccatccccttcatcttcatcctgttcaccaccgtgaacctggtgagactgctgaccatcctgctggtgagccccatcctgatgcacagcaactacgagtacaactggagatggggcgtggtgatcacctggagcggcatcaagggcgtgttcaacctgctgtgggcccccgacgtgtacaacctggccgagagaaaggtggaggtgccccagatgttcatcctgtacgtgcaggtgatcagcctgctgaccatgggcatcaacagctacgtgatgacccagagcgccagaaagctggacctgtgcgtgctgagcctgcccagacagatgatcctgcagaacgccacccagcacatccaggagatcgtgcagaacaccatcaccctgttcaagaccgagaagatcctgaccaacgtgaactggaccctggtggaggacaagaccagaatcgagtacatccccttcagccacgtgagccacaacgacatgaagaccgagagcaccaccgacgaggccctgatggaggaggccagactgcacgtggccgccatccagatgagcagcttcgagaagcagagaaacaacggcatcctggagatcgaggccgccagaatcctgatcggcgccgccaagtgctactacagcatccagggcaagtag

SEQ ID NO: 297812 - DNA, 1353 bp, Artificial Sequence
  derived and/or modified sequence
atggtggctctggacgtcgagttttacaccctcaagaaaatgttctggcaagtgttgctgacagggttgattagcttctctacagcttctatcattattggatatgtggttatcaaattcaacaaggattcttgggatttgcagtcgtgcctgctattctcaatcaccctgggaatcatcgatccacttaggtccgtcaactcccttaaaactatcggcattagtaagatttacattgatctgatccgcggggaatccctaatcatctgttccatagcctcaatcttctttggcaatttccggggaaatagaatccacttttctatctttcgcgatctccacgtgggtattgaactgagttacgacatactaggttccattattttcggctattggtgtgccaaaataatccagtgcattttggcagatgtgttctccaatatgcttactaatatcattctctgtttcagcatggtgtatatgacattttatattgttgaatttctgggcatgtctgggactctcgccctggccgccgtgggtctgaacctagacagtctgacatttaagcccaagatcgaactcgttatcaccaagttcttgaggattttctccagcgtgtacgagcatctcatttacgcttttttcggcatcgtcattggatgtggtgaactgagccactacgagttccacacaatcccttttatctttatactgtttacgactgtgaatctggttagattgctgactattttgctggtgtctcctatacttatgcacagcaattatgagtataactggcgctggggcgtcgtcattacttggtcaggtatcaagggcgtctttaaccttctgtgggcacctgacgtctacaatctcgccgaaaggaaagttgaggtgccacagatgtttattctgtacgtgcaggttatttctctgctgacgatgggaattaattcttacgtaatgacccagtccgcacgcaagttggatctgtgcgttttgagtttgccgcgccagatgatcctgcaaaacgccacccagcacatccaagagattgtccagaacactatcacattgttcaaaaccgagaagatcttgacaaacgtaaactggactctggtcgaagataaaactcgcatcgaatatatcccttttagtcatgttagccacaatgatatgaagaccgaaagcactaccgacgaggccctgatggaggaagcacgtctgcacgtcgctgccatccagatgtcatctttcgagaagcaacgtaataacggaattctcgaaatagaggccgccaggatcctgattggtgctgcaaagtgttactactccatccagggcaagtag

SEQ ID NO: 297813 - DNA, 1353 bp, Artificial Sequence
  derived and/or modified sequence
atggtggccctggatgtggagttctacaccctgaagaagatgttctggcaggtgctgctgaccggcctcatctccttcagcacagccagcatcatcatcggctacgtggtgatcaagttcaacaaggacagctgggacctgcagagctgcctgctcttcagcatcaccctgggcatcatcgaccccctgcggtctgtgaacagcctgaagaccatcggcatcagcaagatctacatcgacctgatccggggggagagcctcatcatctgcagcatcgccagcatcttctttggaaacttccggggcaaccgcatccacttcagcatcttccgggacctgcacgtgggcatcgagctgtcctatgacatcctgggcagcatcatcttcggctactggtgtgccaagatcatccagtgcatcctggctgatgtgttcagcaacatgctgaccaacatcatcctgtgcttctccatggtgtacatgaccttctacatcgtggagttcctgggcatgagcggcaccctggccctggccgctgtgggcctgaacctggacagcctgaccttcaagcccaagattgagctggtgatcaccaagttcctgcgcatcttcagctctgtgtatgagcacctgatctatgccttcttcggcatcgtcatcggctgtggggagctgagccactatgagttccacaccatccccttcatcttcatcctcttcaccaccgtgaacctggtgcggctgctgaccatcctgctggtgagccccatcctgatgcacagcaactatgagtacaactggcgctggggcgtggtgatcacctggagcggcatcaagggcgtcttcaacctgctgtgggccccagatgtgtacaacctggccgagaggaaggtggaggtgccccagatgttcatcctgtatgtgcaggtgatcagcctgctgaccatgggcatcaacagctatgtgatgacccagagcgccaggaagctggacctgtgtgtgctgagcctgccccggcagatgatcctgcagaatgccacccagcacatccaggagatcgtgcagaacaccatcaccctcttcaagacagagaagatcctgaccaacgtgaactggaccctggtggaggacaagaccagaattgagtacatccccttcagccacgtgagccacaatgacatgaagacagagagcaccacagatgaggccctgatggaggaggcccggctgcacgtggccgccatccagatgagcagctttgagaagcagaggaacaacggcatcctggagattgaagctgcccgcatcctgattggagctgccaagtgctactacagcatccagggcaagtag

SEQ ID NO: 297814 - DNA, 1353 bp, Artificial Sequence
  derived and/or modified sequence
atggtggccctggacgtggagttctacaccctgaagaagatgttctggcaggttttattaacaggactcatttcgttcagtacagcctcaatcataataggatacgtcgtgattaagttcaataaagattcttgggacctgcagtcgtgcctcctcttcagcatcactctgggaatcattgatcctctgagatctgtgaactcccttaaaacgatcggcatcagtaaaatctacatcgacctgatccgcggagaatctctgattatctgcagcatcgctagtattttttttggcaattttagagggaataggatacacttctccattttcagggaccttcatgttggcatcgagctgtcatacgatatcttaggaagtattattttcggttattggtgtgccaagattatccagtgcattctcgcagatgtgttcagtaacatgctgacaaatatcattctgtgcttctccatggtatacatgactttctatattgtcgagttcctcggaatgtccggaacgctggcactggccgctgttggcctgaatctggacagtttgaccttcaaaccgaaaatcgagctggtaatcaccaagtttttgcgtatctttagttcagtgtacgagcacttgatatacgccttcttcggcattgtgattgggtgcggcgagctgagtcattatgagttccatacaatccctttcatttttattttgtttacgacggtcaacttggttagactgctgaccattttactagtttctccaatcctgatgcacagcaactatgagtacaactggcgctggggggttgtgattacttggagtggtataaagggagtcttcaatctgctctgggcaccggatgtatataatctggcggagcgaaaggtcgaggtaccacagatgttcattctctatgtgcaggtcatttctctccttaccatgggtataaactcctacgtcatgacacagagcgccagaaagcttgatctctgtgttctgagtcttccaagacaaatgatcttgcagaacgccacccaacatatccaggagattgtgcaaaacaccataacgttgtttaaaaccgaaaaaatactaaccaatgtgaattggactttggtcgaagacaagactaggatcgagtacatccctttctctcatgtgtcccataacgatatgaagacagaaagtaccacagacgaggctctaatggaggaggcccggttgcacgtagctgcaatccagatgagctctttcgagaagcaacggaacaatgggatccttgagatcgaggccgctcgaatcctaatcggcgccgcaaaatgctactatagcattcagggaaaatag

SEQ ID NO: 297815 - DNA, 1353 bp, Artificial Sequence
  derived and/or modified sequence
atggtggccctggatgttgaattctacaccctaaaaaagatgttctggcaggttctattgactggtctcatcagttttagcacagcctctattatcatcggatatgtggtcatcaagtttaataaagactcctgggatcttcagtcatgtctgttattttctattactctgggcataatagatcccctgcgttcggtaaactctctgaagactatcggtatttcaaaaatctatattgatctaatcagaggggagtcactcattatttgcagcattgcctccatattttttggcaatttccggggtaaccgcatccacttcagtatctttagagacttacatgtgggaattgaactgagctacgacatcttgggatccataattttcggctattggtgcgcaaagattatccagtgtattctggcagacgtgtttagtaatatgttaacaaacatcatcctctgtttttctatggtatatatgacattttacatagtcgaatttttgggcatgtcaggaacattggccttggctgctgtcggtctgaatcttgattccctcacctttaagcctaagatcgaattagtgattaccaaatttcttcggattttttcatccgtctatgaacaccttatctacgccttcttcgggattgtgatcggctgcggggaactctctcactacgagttccatacaattccatttatattcatccttttcaccacagtgaatttagttcgtctgctaacaattctgcttgtgagtcccattctcatgcacagtaattatgaatataattggcggtggggagttgtgattacatggtcagggataaagggtgtatttaacctcctgtgggccccagatgtttataacttagctgaacgaaaggtcgaggtaccccagatgttcattctttacgtgcaggttatttcactcctcacaatggggattaactcttacgtgatgactcagtctgccagaaagctggatctgtgcgtcctttctctgcctcggcagatgatcctacagaatgcaactcagcacatacaggagatagtgcagaatactatcacgctgttcaaaaccgaaaaaattctcaccaacgtgaattggacactggtcgaggataagactaggattgaatatattcccttctctcatgtgtcacacaatgatatgaagacagagagcaccacagatgaggcgctgatggaagaggctcggctgcacgttgcagcaattcagatgtcgagcttcgaaaagcaacgaaacaacggaatcttagaaatcgaggcagcacggattttaataggggctgccaaatgttattactcgatacagggcaagtag

SEQ ID NO: 297816 - protein, 230 aa, Artificial Sequence
  derived and/or modified sequence
MAVIVDKPWFYDMKKVWEGYPIQSTIPSQYWYYMIELSFYWSLLFSIASDVKRKDFKEQIIHHVATIILISFSWFANYIRAGTLIMALHDSSDYLLESAKMFNYAGWKNTCNNIFIVFAIVFIITRLVILPFWILHCTLVYPLELYPAFFGYYFFNSMMGVLQLLHIFWAYLILRMAHKFITGKLVEDERSDREETESSEGEEAAAGGGAKSRPLANGHPILNNNHRKND

SEQ ID NO: 297817 - protein, 249 aa, Artificial Sequence
  derived and/or modified sequence
MLQTLYDYFWWERLWLPVNLTWADLEDRDGRVYAKASDLYITLPLALLFLIVRYFFELYVATPLAALLNIKEKTRLRAPPNATLEHFYLTSGKQPKQVEVELLSRQSGLSGRQVERWFRRRRNQDRPSLLKKFREASWRFTFYLIAFIAGMAVIVDKPWFYDMKKVWEGYPIQSTIPSQYWYYMIELSFYWSLLFSIASDVKRKDFKEQIIHHVATIILISFSWFANYIRAGTLIMALHDSSDYLLEVR

SEQ ID NO: 297818 - protein, 324 aa, Artificial Sequence
  derived and/or modified sequence
MVPLALHFPGEVGLQETAVRMLQTLYDYFWWERLWLPVNLTWADLEDRDGRVYAKASDLYITLPLALLFLIVRYFFELYVATPLAALLNIKEKTRLRAPPNATLEHFYLTSGKQPKQVEVELLSRQSGLSGRQVERWFRRRRNQDRPSLLKKFREASWRFTFYLIAFIAGMAVIVDKPWFYDMKKVWEGYPIQSTIPSQYWYYMIELSFYWSLLFSIASDVKRKDFKEQIIHHVATIILISFSWFANYIRAGTLIMALHDSSDYLLESAKMFNYAGWKNTCNNIFIVFAIVFIITRLVILPFWILHCTLVYPLELYPAFFGYYF

SEQ ID NO: 297819 - protein, 192 aa, Artificial Sequence
  derived and/or modified sequence
MLQTLYDYFWWERLWLPVNLTWADLEDRDGRVYAKASDLYITLPLALLFLIVRYFFELYVATPLAALLNIKEKTRLRAPPNATLEHFYLTSGKQPKQVEVELLSRQSGLSGRQVERWFRRRRNQDRPSLLKKFREASWRFTFYLIAFIAGMAVIVDKPWFYDMKKVWEGYPIQSTIPSQYWYYMIELSFYWS

SEQ ID NO: 297820 - DNA, 975 bp, Artificial Sequence
  derived and/or modified sequence
atggtgcccctggccctgcacttccccggcgaggtgggcctgcaggagaccgccgtgagaatgctgcagaccctgtacgactacttctggtgggagagactgtggctgcccgtgaacctgacctgggccgacctggaggacagagacggcagagtgtacgccaaggccagcgacctgtacatcaccctgcccctggccctgctgttcctgatcgtgagatacttcttcgagctgtacgtggccacccccctggccgccctgctgaacatcaaggagaagaccagactgagagccccccccaacgccaccctggagcacttctacctgaccagcggcaagcagcccaagcaggtggaggtggagctgctgagcagacagagcggcctgagcggcagacaggtggagagatggttcagaagaagaagaaaccaggacagacccagcctgctgaagaagttcagagaggccagctggagattcaccttctacctgatcgccttcatcgccggcatggccgtgatcgtggacaagccctggttctacgacatgaagaaggtgtgggagggctaccccatccagagcaccatccccagccagtactggtactacatgatcgagctgagcttctactggagcctgctgttcagcatcgccagcgacgtgaagagaaaggacttcaaggagcagatcatccaccacgtggccaccatcatcctgatcagcttcagctggttcgccaactacatcagagccggcaccctgatcatggccctgcacgacagcagcgactacctgctggagagcgccaagatgttcaactacgccggctggaagaacacctgcaacaacatcttcatcgtgttcgccatcgtgttcatcatcaccagactggtgatcctgcccttctggatcctgcactgcaccctggtgtaccccctggagctgtaccccgccttcttcggctactacttctag

SEQ ID NO: 297821 - DNA, 975 bp, Artificial Sequence
  derived and/or modified sequence
atggtgcctcttgcattgcatttcccaggcgaagtggggttgcaggagaccgcggttaggatgctccagacactgtatgattatttctggtgggaacggctgtggttgccggtcaacctcacttgggcagatctcgaggacagagacggtcgcgtgtacgccaaggcctccgatctctacattacacttccactggcattgcttttcctgatcgtgagatacttctttgaactgtacgtcgccacaccgctcgctgctcttctgaatattaaggaaaaaacacgtttgcgggccccaccgaacgccaccctggaacatttttacctgactagtggaaagcagcctaagcaggtggaggttgagctgctgagtaggcagagcggccttagtggaaggcaagtcgagaggtggttccgccgcaggagaaatcaagatcgcccctctttgttgaaaaaattcagggaggcaagctggagattcactttctatttaattgctttcattgctgggatggccgtgatagtagacaaaccttggttttacgacatgaagaaggtctgggagggctacccaattcagtccactattccaagtcaatattggtattacatgatagaattgagcttttattggagcctcctgttctctatcgctagcgacgtcaaacggaaagactttaaagaacaaatcatccaccacgtcgccactataatactgatctctttcagctggtttgcaaactatattcgggctggaacccttattatggcccttcatgactcatctgactacctgctggaatcagcaaaaatgttcaactacgcagggtggaagaacacatgtaataacatctttatcgtctttgccattgtgttcatcatcacaaggcttgtaatattaccattctggatccttcactgcactttagtctatccactcgagttgtaccccgcttttttcgggtattatttttag

SEQ ID NO: 297822 - DNA, 975 bp, Artificial Sequence
  derived and/or modified sequence
atggtgcccctggccctgcacttccctggagaggtgggcctgcaggagacagctgtgaggatgctgcagaccctgtatgactacttctggtgggagcggctgtggctgcctgtgaacctgacctgggccgacctggaggacagagatggccgggtgtatgccaaggccagtgacctgtacatcaccctgcccctggccctgctcttcctgattgtgcgctacttctttgagctgtatgtggccacccccctggccgccctgctgaacatcaaggagaagacccggctgcgggcccccccaaatgccaccctggagcacttctacctgaccagcggcaagcagcccaagcaggtggaggtggagctgctgagccggcagagcggcctgagcggccggcaggtggagcgctggttcagaagaagaagaaaccaggaccggcccagcctgctgaagaagttccgggaggcctcctggaggttcaccttctacctgattgccttcatcgccggcatggccgtcatcgtggacaagccctggttctatgacatgaagaaggtgtgggagggctaccccatccagagcaccatccccagccagtactggtactacatgattgagctgtccttctactggagcctgctcttcagcatcgccagtgatgtgaagaggaaggacttcaaggagcagatcatccaccacgtggccaccatcatcctgatctccttctcctggtttgccaactacatccgggccggcaccctcatcatggccctgcatgacagcagtgactacctgctggagagcgccaagatgttcaactatgccggctggaagaacacctgcaacaacatcttcatcgtgtttgccatcgtgttcatcatcacccggctggtgatcctgcccttctggatcctgcactgcaccctggtgtaccccctggagctgtacccagccttcttcggctactacttctag

SEQ ID NO: 297823 - DNA, 975 bp, Artificial Sequence
  derived and/or modified sequence
atggtgcccctggccctgcacttccccggcgaggtgggcctgcaggaaaccgctgtgagaatgctccagacgttgtacgattacttctggtgggagaggctgtggctaccagtgaatctgacctgggctgatctagaagaccgcgacgggagagtgtatgcaaaggcctccgacttgtatatcactctgcctcttgctctgctctttctgatcgttcggtacttttttgaactgtatgttgccacaccacttgccgccctactgaatataaaagaaaagactagactgagagcaccgccaaatgcaacccttgagcatttctacctgacaagtggcaagcagccgaagcaggtagaggttgaactcttgagtcgtcagtccgggctgtccggaagacaagttgagcggtggtttaggcgccggcggaaccaggatcgtccaagtttgctaaaaaagttcagagaggcttcatggcgttttactttctacttgatagcctttatcgccggaatggctgtgattgttgataagccttggttttacgacatgaaaaaagtttgggaggggtatcctatccagagtaccatccctagtcagtattggtactacatgatcgagctcagtttctactggtccctgctattcagcatcgccagcgatgtgaaacggaaagacttcaaggagcaaatcatacaccacgtcgccacaataatcctgatatccttttcctggtttgccaattacatacgggcagggactctaataatggctttgcacgactctagtgattatctgctcgaatctgctaagatgttcaattacgcgggttggaagaacacctgcaacaacatctttattgttttcgctatcgtatttatcattaccaggctcgtgatcctgcccttctggatcctgcactgtacgttagtctatccactggagctgtacccagccttctttgggtactatttctag

SEQ ID NO: 297824 - DNA, 975 bp, Artificial Sequence
  derived and/or modified sequence
atggtaccgctggctctgcatttcccaggtgaagtcggcctccaagagaccgcagtgagaatgctgcaaacactgtacgattatttttggtgggaaagactgtggctccccgttaacctgacctgggccgacctcgaggatagagacggacgcgtgtatgcaaaggcgtcagatctgtacataactctcccactggcattgttattccttatagtgaggtatttctttgaactgtatgtcgcaacccctttggccgcactgctgaacatcaaagaaaaaacaaggttgagggcacctccgaacgcgactctagaacatttctacctgactagtggcaagcagccgaaacaggttgaagtcgagttgctgagcagacagtctgggctgtcggggcgacaggtcgaacgctggtttcgccgaagaaggaatcaagataggccttcccttctgaagaaattccgggaggctagttggcgatttaccttttatcttatcgccttcatcgccggtatggctgtcatcgtcgataagccctggttttatgacatgaaaaaggtgtgggaagggtaccccattcagagcacgatcccgagtcagtactggtattatatgatcgagctaagtttctattggtccctgcttttctctatcgccagtgacgttaaacgcaaggactttaaggaacagattatccaccatgtggcaactattatacttatttcattctcctggttcgctaattacattcgggcaggcactctaattatggctcttcatgatagcagtgattacctcctggagtctgctaaaatgttcaattacgctggatggaagaacacatgtaacaatatcttcatagtgtttgccattgtgttcataatcacccgcctggtgattctacctttttggatcctgcattgtacactcgtgtatccattggaactctacccagccttcttcggatattacttctag

SEQ ID NO: 297825 - DNA, 2505 bp, Artificial Sequence
  derived and/or modified sequence
gagcggagggttggggtctggcctcccgcgccggggcgaaggggcagccgcagcgcagaggcccgccccgccctcccctcccgtcacgcccagcctcccggcccttgggctgctcgcggcctttttttcccggctgggctcgggctcagctcgactgggctcggcgggcggcggcggcggcgccggcggctggcggaggagggagggcgagggcgggcgcgggccggcgggcgggcggaagagggaggagaggcgcggggagccaggcctcggggcctcggagcaaccacccgagcagacggagtacacggagcagcggccccggccccgccaacgctgccgccggctactccctcttgatgccctcccctttgcccctcactcaggatgctccagaccttgtatgattacttctggtgggaacgtctgtggctgcctgtgaacttgacctgggccgatctagaagaccgagatggacgtgtctacgccaaagcctcagatctctatatcacgctgcccctggccttgctcttcctcatcgttcgatacttctttgagctgtacgtggctacaccactggctgccctcttgaacataaaggagaaaactcggctgcgggcacctcccaacgccaccttggaacatttctacctgaccagtggcaagcagcccaagcaggtggaagtagagcttttgtcccggcagagcgggctctctggccgccaggtagagcgttggttccgtcgccgccgcaaccaggaccggcccagtctcctcaagaagttccgagaagccagctggagattcacattttacctgattgccttcattgccggcatggccgtcattgtggataaaccctggttctatgacatgaagaaagtttgggagggatatcccatacagagcactatcccttcccagtattggtactacatgattgaactttccttctactggtccctgctcttcagcattgcctctgatgtcaagcgaaaggatttcaaggaacagatcatccaccatgtggccaccatcattctcatcagcttttcctggtttgccaattacatccgagctgggactctaatcatggctctgcatgactcttccgattacctgctggagtcagccaagatgtttaactacgcgggatggaagaacacctgcaacaacatcttcatcgtcttcgccattgtttttatcatcacccgactggtcatcctgcccttctggatcctgcattgcaccctggtgtacccactggagctctatcctgccttctttggctattacttcttcaattccatgatgggagttctacagctgctgcatatcttctgggcctacctcattttgcgcatggcccacaagttcataactggaaagctggtagaagatgaacgcagtgaccgggaagaaacagagagctcagagggggaggaggctgcagctgggggaggagcaaagagccggcccctagccaatggccaccccatcctcaataacaaccatcgtaagaatgactgaaccattactccagctgcctcccagattaatgcataaagccaaggaactaccccgctccctgcgctatagggtcactttaagctctggggaaaaaggagaaagtgagaggagagttctctgcatcctccctccttgcttgtcacccagttgcctttaaaccaaattctaaccagcctatccccaggtagggggacgttggttatattctgttagagggggacggtcgtattttcctccctacccgccaagtcatcctttctactgcttttgaggccctccctcagctctctgtgggtaggggttacaattcacattccttattctgagaatttggccccagctgtttgcctttgactccctgacctccagagccagggttgtgccttattgtcccatctgtgggcctcattctgccaaagctggaccaaggctaacctttctaagctccctaacttgggccagaaaccaaagctgagcttttaactttctccctctatgacacaaatgaattgagggtaggaggagggtgcacataacccttaccctacctctgccaaaaagtgggggctgtactggggactgctcggatgatctttcttagtgctacttctttcagctgtccctgtagcgacaggtctaagatctgactgcctcctcctttctctggcctcttcccccttccctcttctcttcagctaggctagctggtttggagtagaatggcaactaattctaatttttatttattaaatatttggggttttggttttaaagccagaattacggctagcacctagcatttcagcagagggaccattttagaccaaaatgtactgttaatgggttttttttaaaaattaaaagattaaataaaaaatattaaataaaacatggcaataagtgtcagactattaggaattgagaagggggatcaactaaataaacgaagagagtctttcttatgccttccttgca

SEQ ID NO: 297826 - DNA, 997 bp, Artificial Sequence
  derived and/or modified sequence
ctcgggctcagctcgactgggctcggcgggcggcggcggcggcgccggcggctggcggaggagggagggcgagggcgggcgcgggccggcgggcgggcggaagagggaggagaggcgcggggagccaggcctcggggcctcggagcaaccacccgagcagacggagtacacggagcagcggccccggccccgccaacgctgccgccggctactccctcttgatgccctcccctttgcccctcactcaggatgctccagaccttgtatgattacttctggtgggaacgtctgtggctgcctgtgaacttgacctgggccgatctagaagaccgagatggacgtgtctacgccaaagcctcagatctctatatcacgctgcccctggccttgctcttcctcatcgttcgatacttctttgagctgtacgtggctacaccactggctgccctcttgaacataaaggagaaaactcggctgcgggcacctcccaacgccaccttggaacatttctacctgaccagtggcaagcagcccaagcaggtggaagtagagcttttgtcccggcagagcgggctctctggccgccaggtagagcgttggttccgtcgccgccgcaaccaggaccggcccagtctcctcaagaagttccgagaagccagctggagattcacattttacctgattgccttcattgccggcatggccgtcattgtggataaaccctggttctatgacatgaagaaagtttgggagggatatcccatacagagcactatcccttcccagtattggtactacatgattgaactttccttctactggtccctgctcttcagcattgcctctgatgtcaagcgaaaggatttcaaggaacagatcatccaccatgtggccaccatcattctcatcagcttttcctggtttgccaattacatccgagctgggactctaatcatggctctgcatgactcttccgattacctgctggaggtcaggc

SEQ ID NO: 297827 - DNA, 1002 bp, Artificial Sequence
  derived and/or modified sequence
atctgaagtctaggactgccagggcaacatggtacctttggctttacatttccctggagaagttgggctccaagagacagcagtcaggatgctccagaccttgtatgattacttctggtgggaacgtctgtggctgcctgtgaacttgacctgggccgatctagaagaccgagatggacgtgtctacgccaaagcctcagatctctatatcacgctgcccctggccttgctcttcctcatcgttcgatacttctttgagctgtacgtggctacaccactggctgccctcttgaacataaaggagaaaactcggctgcgggcacctcccaacgccaccttggaacatttctacctgaccagtggcaagcagcccaagcaggtggaagtagagcttttgtcccggcagagcgggctctctggccgccaggtagagcgttggttccgtcgccgccgcaaccaggaccggcccagtctcctcaagaagttccgagaagccagctggagattcacattttacctgattgccttcattgccggcatggccgtcattgtggataaaccctggttctatgacatgaagaaagtttgggagggatatcccatacagagcactatcccttcccagtattggtactacatgattgaactttccttctactggtccctgctcttcagcattgcctctgatgtcaagcgaaaggatttcaaggaacagatcatccaccatgtggccaccatcattctcatcagcttttcctggtttgccaattacatccgagctgggactctaatcatggctctgcatgactcttccgattacctgctggagtcagccaagatgtttaactacgcgggatggaagaacacctgcaacaacatcttcatcgtcttcgccattgtttttatcatcacccgactggtcatcctgcccttctggatcctgcattgcaccctggtgtacccactggagctctatcctgccttctttggctattacttctt

SEQ ID NO: 297828 - DNA, 738 bp, Artificial Sequence
  derived and/or modified sequence
gggaggcggcgctggcggggggcgctgcgggcgctcatggcggcggccgccgggtaaggcgggcgcagcgcctcaagggagcggccggggccggcgggcctggcgccgcggtgtccgcggcagcgccgccctgagccggagaagctttcccgggcaacaggatgctccagaccttgtatgattacttctggtgggaacgtctgtggctgcctgtgaacttgacctgggccgatctagaagaccgagatggacgtgtctacgccaaagcctcagatctctatatcacgctgcccctggccttgctcttcctcatcgttcgatacttctttgagctgtacgtggctacaccactggctgccctcttgaacataaaggagaaaactcggctgcgggcacctcccaacgccaccttggaacatttctacctgaccagtggcaagcagcccaagcaggtggaagtagagcttttgtcccggcagagcgggctctctggccgccaggtagagcgttggttccgtcgccgccgcaaccaggaccggcccagtctcctcaagaagttccgagaagccagctggagattcacattttacctgattgccttcattgccggcatggccgtcattgtggataaaccctggttctatgacatgaagaaagtttgggagggatatcccatacagagcactatcccttcccagtattggtactacatgattgaactttccttctactggtccc

SEQ ID NO: 297829 - DNA, 545 bp, Artificial Sequence
  derived and/or modified sequence
gcggccgccgggtaaggcgggcgcagcgcctcaagggagcggccggggccggcgggcctggcgccgcggtgtccgcggcagcgccgccctgagccggagaagctttcccgggcaacagctactccctcttgatgccctcccctttgcccctcactcaggatgctccagaccttgtatgattacttctggtgggaacgtctgtggctgcctgtgaacttgacctgggccgatctagaagaccgagatggacgtgtctacgccaaagcctcagatctctatatcacgctgcccctggccttgctcttcctcatcgttcgatacttctttgagctgtacgtggctacaccactggctgccctcttgaacataaaggagaaaactcggctgcgggcacctcccaacgccaccttggaacatttctacctgaccagtggcaagcagcccaagcaggtggaagtagagcttttgtcccggcagagcgggctctctggccgccaggtagagcgttggttccgtcgccgccgcaaccaggaccggcccagtct

SEQ ID NO: 297830 - DNA, 896 bp, Artificial Sequence
  derived and/or modified sequence
caggcatgagccatcacggccggcctaacagtaaatgttaaaactggaaagccaccgtattacagatgaggaaactgatttgcccaaggctacatagccaggatagggatctagagttcgactctctgcccccttctccttttgatacatcctgaaaacttttattcatctatctcttcctccatagctactccctcttgatgccctcccctttgcccctcactcaggatgctccagaccttgtatgattacttctggtgggaacgtctgtggctgcctgtgaacttgacctgggccgatctagaagaccgagatggacgtgtctacgccaaagcctcagatctctatatcacgctgcccctggccttgctcttcctcatcgttcgatacttctttgagctgtacgtggctacaccactggctgccctcttgaacataaaggagaaaactcggctgcgggcacctcccaacgccaccttggaacatttctacctgaccagtggcaagcagcccaagcaggtggaagtagagcttttgtcccggcagagcgggctctctggccgccaggtagagcgttggttccgtcgccgccgcaaccaggaccggcccagtctcctcaagaagttccgagaagccagctggagattcacattttacctgattgccttcattgccggcatggccgtcattgtggataaaccctggttctatgacatgaagaaagtttgggagggatatcccatacagagcactatcccttcccagtattggtactacatgattgaactttccttctactggtccctgctcttcagcattgcctctgatgtcaagcgaaaggatttcaaggaacagatcatccaccatgtggccaccatcattctcatcagcttttc

SEQ ID NO: 297831 - DNA, 627 bp, Artificial Sequence
  derived and/or modified sequence
atgccagaagcagccgtgaaatctacggcaaacaaataccaggtgtttttctttgggactcatgagacggctttccttggtcctaaagatctcttcccttacgaggagtccaaggagaaatttggaaaaccaaataagcgcaagggctttagtgaggggctctgggagatcgaaaacaaccccacggtaaaagcctccggctatcagagtagccagaaaaaatcttgcgtggaagaacctgaacctgagccagaggctgcagagggcgatggagataagaagggtaatgcggaggggagttccgacgaggagggcaagcttgtgatcgatgaacctgcgaaagaaaagaacgagaagggagccctaaaacgccgtgccggtgatttgttagaggactctcccaagcgtcctaaggaggccgagaatcctgaaggcgaggagaaggaggcggccaccctcgaagtcgagcggccactacccatggaggtcgagaagaactccacaccgtctgaacccggcagtggacgcggtccacctcaggaagaggaggaggaggaagacgaggaagaggaagctaccaaagaggatgctgaggccccagggatcagagatcacgagtcgctgtag

SEQ ID NO: 297832 - DNA, 627 bp, Artificial Sequence
  derived and/or modified sequence
atgcctgaggccgctgtgaagagcacagccaacaagtaccaggtgttcttcttcggcacccatgaaacagccttcctgggccccaaggacctcttcccctatgaggagagcaaggagaagtttgggaagcccaacaagaggaagggcttcagcgagggcctgtgggagattgagaacaaccccaccgtgaaggccagcggctaccagagcagccagaagaagagctgtgtggaggagcctgagcctgagcctgaggccgcagaaggagatggagacaagaagggaaatgctgagggcagcagtgatgaggagggcaagctggtgattgatgagcccgccaaggagaagaatgaaaaaggagccctgaagaggcgggccggggacctgctggaggacagccccaagaggcccaaggaggctgaaaatcctgagggggaggagaaggaggccgccaccctggaggtggagcggcccctgcccatggaggtggagaagaacagcacccccagcgagcccggcagcggccggggccccccccaggaggaggaggaggaggaggatgaggaggaggaggccaccaaggaggatgctgaggcccctggcatccgggaccacgagagcctgtag

SEQ ID NO: 297833 - DNA, 627 bp, Artificial Sequence
  derived and/or modified sequence
atgcccgaggccgccgtgaagagcaccgccaacaagtaccaggtgttctttttcgggacacacgagacagcattcttggggccgaaagacctctttccctacgaagagtcaaaagaaaagtttggaaagccgaacaaaagaaagggcttttccgaaggcctttgggaaatcgaaaacaatcccaccgttaaggctagcggttatcaatcttcacaaaagaaatcttgcgtagaggagcctgaaccagagcctgaggccgcggagggagatggcgataagaaggggaacgccgagggcagcagcgatgaggagggcaaactggtaattgatgaaccagcaaaggagaagaacgagaagggtgcacttaaacgccgcgccggagacctgctcgaggattcccccaaacgacctaaggaggccgagaaccccgagggcgaggagaaggaggctgcaaccctggaagtggagaggcccctgcccatggaggtagagaaaaacagcacgccctcagaacccggctcgggaagagggccaccacaggaagaagaggaggaagaggacgaggaggaggaggcgacaaaagaagatgccgaggcacctgggatcagggaccatgagagcctgtag

SEQ ID NO: 297834 - DNA, 627 bp, Artificial Sequence
  derived and/or modified sequence
atgccagaggccgcagtgaagagcacagccaataaatatcaggtctttttttttggcacgcatgagaccgcctttctgggaccaaaagatttattcccttacgaagagtctaaggaaaagtttggtaaaccaaataagcgcaaaggcttctctgaaggtttatgggagatcgagaacaaccccaccgttaaggcatcagggtatcagtcctctcagaagaaatcctgtgtggaagagccagagccagagcctgaagctgcagaaggagacggcgataaaaaaggcaacgcggaggggtcctccgacgaggaaggcaagttggtaatcgacgagcctgcaaaggaaaagaacgagaagggcgctctgaagcgtcgtgcgggtgatctgctggaggatagtccaaagcggccaaaagaggcagaaaatcccgaaggcgaggagaaggaggcagctacattggaagtggagcggccactgcctatggaagtcgagaaaaatagtactccctccgagcctggtagcgggcgtggcccaccccaagaagaggaggaggaggaagacgaggaagaagaggccacaaaggaggacgccgaagcaccaggtatacgggatcacgaatccctctag

SEQ ID NO: 297835 - DNA, 627 bp, Artificial Sequence
  derived and/or modified sequence
atgcccgaggccgccgtgaagagcaccgccaacaagtaccaggtgttcttcttcggcacccacgagaccgccttcctgggccccaaggacctgttcccctacgaggagagcaaggagaagttcggcaagcccaacaagagaaagggcttcagcgagggcctgtgggagatcgagaacaaccccaccgtgaaggccagcggctaccagagcagccagaagaagagctgcgtggaggagcccgagcccgagcccgaggccgccgagggcgacggcgacaagaagggcaacgccgagggcagcagcgacgaggagggcaagctggtgatcgacgagcccgccaaggagaagaacgagaagggcgccctgaagagaagagccggcgacctgctggaggacagccccaagagacccaaggaggccgagaaccccgagggcgaggagaaggaggccgccaccctggaggtggagagacccctgcccatggaggtggagaagaacagcacccccagcgagcccggcagcggcagaggccccccccaggaggaggaggaggaggaggacgaggaggaggaggccaccaaggaggacgccgaggcccccggcatcagagaccacgagagcctgtag

SEQ ID NO: 297836 - protein, 266 aa, Artificial Sequence
  derived and/or modified sequence
MESEGPPESESSEFFSQQEEENEEEEAQEPEETGPKNPLLQPALTGDVEGLQKIFEDPENPHHEQAMQLLLEEDIVGRNLLYAACMAGQSDVIRALAKYGVNLNEKTTRGYTLLHCAAAWGRLETLKALVELDVDIEALNFREERARDVAARYSQTECVEFLDWADARLTLKKYIAKVSLAVTDTEKGSGKLLKEDKNTILSACRAKNEWLETHTEASINELFEQRQQLEDIVTPIFTKMTTPCQVKSAKSVTSHDQKRSQDDTSN

SEQ ID NO: 297837 - DNA, 801 bp, Artificial Sequence
  derived and/or modified sequence
atggagagcgagggcccccccgagagcgagagcagcgagttcttcagccagcaggaggaggagaacgaggaggaggaggcccaggagcccgaggagaccggccccaagaaccccctgctgcagcccgccctgaccggcgacgtggagggcctgcagaagatcttcgaggaccccgagaacccccaccacgagcaggccatgcagctgctgctggaggaggacatcgtgggcagaaacctgctgtacgccgcctgcatggccggccagagcgacgtgatcagagccctggccaagtacggcgtgaacctgaacgagaagaccaccagaggctacaccctgctgcactgcgccgccgcctggggcagactggagaccctgaaggccctggtggagctggacgtggacatcgaggccctgaacttcagagaggagagagccagagacgtggccgccagatacagccagaccgagtgcgtggagttcctggactgggccgacgccagactgaccctgaagaagtacatcgccaaggtgagcctggccgtgaccgacaccgagaagggcagcggcaagctgctgaaggaggacaagaacaccatcctgagcgcctgcagagccaagaacgagtggctggagacccacaccgaggccagcatcaacgagctgttcgagcagagacagcagctggaggacatcgtgacccccatcttcaccaagatgaccaccccctgccaggtgaagagcgccaagagcgtgaccagccacgaccagaagagaagccaggacgacaccagcaactag

SEQ ID NO: 297838 - DNA, 801 bp, Artificial Sequence
  derived and/or modified sequence
atggaaagcgaggggccccccgaatcagagagctcggaattcttcagtcaacaggaagaagaaaatgaggaggaagaggcccaggaacctgaggaaaccgggcccaaaaatcccctcctgcagcctgctttgacgggggacgtggagggcctgcagaaaatattcgaggacccagaaaaccctcaccacgaacaggctatgcagctgctcctggaagaagacatcgtcgggaggaaccttctctatgcagcttgtatggcgggccaatcagatgtcattcgggccctggctaagtacggcgtgaacctcaacgagaaaaccactaggggatatacactcctgcattgtgcggctgcctggggccgactggagacactaaaagcactggtggaattggacgttgacattgaggcattgaattttagagaagagagagctagggatgtggccgccagatactcacagacagagtgcgttgagtttctggactgggcagatgctcgactgactctgaagaagtacattgccaaggtgtcgctcgccgtcacggacacagaaaaggggagtggaaagctgttaaaggaggacaaaaacaccatcctgagcgcgtgtcgcgccaaaaatgaatggttggagactcacaccgaagcctctattaatgagctgtttgagcagagacagcaactagaagacattgtaacacccatcttcaccaagatgaccaccccgtgtcaggtgaagagtgccaagtcagtcacaagccacgaccagaaacggagtcaggacgacacatccaattag

SEQ ID NO: 297839 - DNA, 801 bp, Artificial Sequence
  derived and/or modified sequence
atggagagcgagggccccccagagagcgagagcagcgagttcttcagccagcaggaggaggagaatgaggaggaggaggcccaggagcctgaggagaccggccccaagaaccccctgctgcagcctgccctgactggagatgtggagggcctgcagaagatctttgaggaccctgagaacccccaccacgagcaggccatgcagctgctgctggaggaggacatcgtgggcaggaacctgctgtatgctgcctgcatggccggccagagtgatgtgatccgggccctggccaagtatggagtgaacctgaatgagaagaccacccggggctacaccctgctgcactgtgccgccgcctggggccgcctggagaccctgaaggccctggtggagctggatgtggacatcgaggccctgaacttccgggaggagcgggccagagatgtggccgcccgctacagccagacagaatgtgtggagttcctggactgggcagatgcccggctgaccctgaagaagtacatcgccaaggtgtccctggccgtgacagacacagagaagggcagcggcaagctgctgaaggaggacaagaacaccatcctgagcgcctgccgggccaagaatgagtggctggagacccacacagaggccagcatcaatgagctgtttgagcagaggcagcagctggaggacatcgtgacccccatcttcaccaagatgaccaccccctgccaggtgaagagcgccaagtctgtgaccagccatgaccagaagaggagccaggatgacaccagcaactag

SEQ ID NO: 297840 - DNA, 801 bp, Artificial Sequence
  derived and/or modified sequence
atggagagcgagggcccccccgagagcgagagcagcgagttcttcagccagcaggaagaagagaatgaggaggaagaagcacaggagccggaggagaccggaccaaaaaatccattgctccagccagctctcactggggatgtggagggtttgcagaaaatttttgaggacccagaaaatccccaccacgagcaggccatgcagctgttactcgaggaggacattgtgggcagaaatctactctatgccgcgtgcatggcaggccagagcgatgtgataagggcactggccaagtatggagtgaacctgaatgagaagaccacacgcggctacacgttgctacactgtgctgctgcctggggaaggctggagacgctgaaggcactagtcgagttggacgttgacattgaggccttaaattttcgcgaggagcgggctcgtgacgtcgctgcaaggtacagtcagaccgagtgcgtcgagttcctggactgggcagacgctagactaacactcaagaagtacattgcgaaagtcagcctggcagtcactgatactgagaaaggtagcggaaaactgctgaaggaagataagaacaccatcctgagcgcctgtagggcaaagaacgagtggctggagactcataccgaagccagcattaacgagctgttcgagcaacgacaacagcttgaggacatagtgacccccatattcaccaaaatgaccaccccttgccaggtcaaaagtgctaagtccgtgacctcccatgaccagaaaagaagtcaggatgacacgtctaattag

SEQ ID NO: 297841 - DNA, 1446 bp, Artificial Sequence
  derived and/or modified sequence
gttgcgccgttgctatggtaaccgaggaggccggggcccgggtgtggtatttttggagttaatggagtcagaaggacctccagagtcagagagttcagaatttttctcacagcaagaagaggaaaatgaagaagaagaagcccaagaaccagaggaaacaggccctaagaacccccttttacaacctgctctcacaggggatgtagagggtttgcagaagatatttgaggatcctgagaatcctcatcatgaacaggccatgcagcttctcttagaagaagacatcgttgggagaaatttgttgtatgcagcttgcatggctgggcaaagtgacgtgattagagctttggcaaaatatggtgtgaatctgaatgaaaaaaccaccagagggtacacactcttacattgtgctgcagcctggggtcgtttggaaactttgaaagcactggtagaactggatgttgatatagaagctttgaacttccgggaagaaagggctcgagatgttgctgctagatattctcagactgagtgtgttgaattcctggactgggcagatgcaaggctgactctgaaaaaatatattgcaaaagtctctttagctgttactgacacagaaaagggatcagggaaactccttaaggaagacaagaataccatcctcagtgcatgccgtgcaaaaaatgagtggttggaaacccatacagaagcttccattaatgagctttttgagcagagacaacaactggaagatattgtgactcctatcttcacaaaaatgactacaccatgtcaagtgaaaagtgccaaatctgtaacaagccatgaccagaagagaagtcaagatgatacctccaactgaacatacgttctgtaaaaggccacattttcttttagtatctgaaaggcaaacctattcatgccatttgaaatcgagaaaacagatgtgggtttctttaagtatttaagtacaacattacatcgcccttgttttgtttgacctgttcagcatgcttatgtccggactctggcctcgcctctgctcctccaagcacagccccatgtgagtttcacgtgctccttcaggaaagcacttgggtataaatcattcgtgaagaccatgtggaggctttaagaactactcagagaatctaataattttctgtgtaattgaggcattccatataaaaggacatatttggctatttccagagaaaaaatttgttctccctgcctaaaaaggaaatcttatggaatgacacttggagcaaggaaatattaagaccagcttggattaggagcctctgggtacaactatcactttttatgtccaaaattaaatttcacctgtgaggtggggtatacctctgagtaaaacccctctttatctttgacctccttctatctgtaaattaataaacacaaatctgtatagttttatactta

SEQ ID NO: 297842 - DNA, 801 bp, Artificial Sequence
  derived and/or modified sequence
atggagtccgaaggtcccccagagagtgagagtagcgagttcttctcccagcaggaggaagagaatgaagaagaggaggctcaggagcccgaagagacagggcctaagaacccactgcttcaacctgccttaaccggagacgtggagggcttgcaaaaaatttttgaagaccccgagaacccccatcacgaacaggccatgcagcttctgctagaagaagacatcgtagggagaaatctgttgtacgctgcttgcatggctgggcagagtgatgtgatcagggccctcgccaagtatggcgtgaacctgaacgagaagacgactaggggctatacactgttacactgcgcagccgcatggggtaggctcgagactctgaaagccctcgtggaactggacgtcgatattgaggccttgaatttcagggaagagagagctagagatgtggcagcaagatacagccagaccgaatgcgtcgaattcttggactgggctgacgctagactgactttgaagaagtacattgctaaagtgtcacttgccgtgacagacactgagaagggaagcgggaagctcctgaaggaggacaaaaatacgatcctgtccgcatgcagggctaagaatgaatggttagaaacccataccgaagcctccataaatgaactgtttgaacagcgtcagcagcttgaagacatagtaacacctatattcaccaaaatgacaacgccctgtcaagtgaaaagcgctaaatctgtaactagccacgaccaaaaacgaagccaggacgatacatccaactag

SEQ ID NO: 297843 - protein, 302 aa, Artificial Sequence
  derived and/or modified sequence
MERHMVRGQLYKHFDLERKNAKQAEARLDQRLQRLKVICLYHVKLLTWEQRQLQKELQRLQQAETMKKKFSSYLGNGFQKRPEDVLVFSPQGRQKHRAPQAKKMRALATRMAQDTCKSKSQVPPSHDAGLKDPMKSKKQPLSQNNRTACFIKEQPQAQEKDSVNPSKDVDPSKGISVPCQNQEVSTNTIEQGPSSSPASDSGMACADETRSKDVALKPDGNTGKQIPPKHMECAGSFEGEFTKPTFLELLSKARNAHYLRHRVPPESERLLSIGEIFGHGESSSSRAGKECENRVPSKFLPL

SEQ ID NO: 297844 - DNA, 1498 bp, Artificial Sequence
  derived and/or modified sequence
gtgccaggcaggaatggcctgctaggagatgcagtgagcccccaggacctctccactgcctcctccacccctgtatttcacttggctctccaaattgactcaactccagaccataaagaagatggagaggcacatggtcaggggacaattgtataagcattttgatttggagaggaagaatgccaagcaggctgaagccagactggaccaaagactgcagagactaaaggttatttgcctctaccatgtgaaattgctgacctgggagcagaggcagctccaaaaagaactgcagaggttgcagcaagcagaaaccatgaagaaaaagttctcctcttatttggggaatggatttcagaagagaccagaagatgttctcgtgttctcaccacagggaaggcagaagcacagagccccacaggctaagaaaatgagagcattggcaacccgtatggcccaagacacatgcaaaagcaagtcccaggtgcctccttcacatgatgctggcctcaaagaccccatgaagagcaaaaagcagccactctctcaaaataacagaactgcctgcttcataaaagagcaaccacaagcccaagagaaagattctgtgaatccatctaaggacgtagaccccagcaagggcatctctgttccatgccaaaatcaagaggtttccaccaacaccatagaacaaggtcctagttccagcccagctagtgatagtggaatggcatgtgctgatgagaccagatcaaaagatgttgctctaaagccagatgggaacactggaaaacaaattcccccaaaacacatggaatgtgcaggaagcttcgaaggcgagttcacaaagccaaccttcttagagttgctttcaaaggccagaaatgcccattatctccggcacagggtcccccctgagtctgagaggttgcttagcattggagagatatttgggcatggggaatcctcatcatccagggcaggaaaggagtgtgaaaacagggtgccttctaagtttcttcctctctaaccgtttaacatagcctgacaataacatatgccattattgctaaggaaatgtgttcctcaaatgactatattaagcaatacagagaaaaacaaacaaacataattgaattacaattttattttaaactccctattattttccgggaatataatatttcttgaatgaacaatgctaatatatgaaaaaggagaggaagaatgaatcttctgaaaatattttaagtgatatgtttatgatgtcatcaaaaatatgaatatatattgatgactggacttgggaaaacagtaacagtcttgctttcagggacttcctgtttcctctaggagattctcatggtgccacctgctggcaaaacggcatagctattctctctgttttagtttgatatatagtagtggtaggaataggaatgtgattgtaaataggtactgtaacatggtctataaagaaaatctgctctttaaccac

SEQ ID NO: 297845 - DNA, 1305 bp, Artificial Sequence
  derived and/or modified sequence
atgctgctgtggaccgccgtgctgctgttcgtgccctgcgtgggcaagaccgtgtggctgtacctgcaggcctggcccaaccccgtgttcgagggcgacgccctgaccctgagatgccagggctggaagaacacccccctgagccaggtgaagttctacagagacggcaagttcctgcacttcagcaaggagaaccagaccctgagcatgggcgccgccaccgtgcagagcagaggccagtacagctgcagcggccaggtgatgtacatcccccagaccttcacccagaccagcgagaccgccatggtgcaggtgcaggagctgttccccccccccgtgctgagcgccatccccagccccgagcccagagagggcagcctggtgaccctgagatgccagaccaagctgcaccccctgagaagcgccctgagactgctgttcagcttccacaaggacggccacaccctgcaggacagaggcccccaccccgagctgtgcatccccggcgccaaggagggcgacagcggcctgtactggtgcgaggtggcccccgagggcggccaggtgcagaagcagagcccccagctggaggtgagagtgcaggcccccgtgagcagacccgtgctgaccctgcaccacggccccgccgaccccgccgtgggcgacatggtgcagctgctgtgcgaggcccagagaggcagcccccccatcctgtacagcttctacctggacgagaagatcgtgggcaaccacagcgccccctgcggcggcaccaccagcctgctgttccccgtgaagagcgagcaggacgccggcaactacagctgcgaggccgagaacagcgtgagcagagagagaagcgagcccaagaagctgagcctgaagggcagccaggtgctgttcacccccgccagcaactggctggtgccctggctgcccgccagcctgctgggcctgatggtgatcgccgccgccctgctggtgtacgtgagaagctggagaaaggccggccccctgcccagccagatcccccccaccgcccccggcggcgagcagtgccccctgtacgccaacgtgcaccaccagaagggcaaggacgagggcgtggtgtacagcgtggtgcacagaaccagcaagagaagcgaggccagaagcgccgagttcaccgtgggcagaaaggacagcagcatcatctgcgccgaggtgagatgcctgcagcccagcgaggtgagcagcaccgaggtgaacatgagaagcagaaccctgcaggagcccctgagcgactgcgaggaggtgctgtgctag

SEQ ID NO: 297846 - DNA, 1306 bp, Artificial Sequence
  derived and/or modified sequence
catgctgctctggacggctgtgctgctctttgttccctgtgttgggaaaactgtctggctgtacctccaagcctggccaaaccctgtgtttgaaggagatgccctgactctgcgatgtcagggatggaagaatacaccactgtctcaggtgaagttctacagagatggaaaattccttcatttctctaaggaaaaccagactctgtccatgggagcagcaacagtgcagagccgtggccagtacagctgctctgggcaggtgatgtatattccacagacattcacacaaacttcagagactgccatggttcaagtccaagagctgtttccacctcctgtgctgagtgccatcccctctcctgagccccgagagggtagcctggtgaccctgagatgtcagacaaagctgcaccccctgaggtcagccttgaggctccttttctccttccacaaggacggccacaccttgcaggacaggggccctcacccagaactctgcatcccgggagccaaggagggagactctgggctttactggtgtgaggtggcccctgagggtggccaggtccagaagcagagcccccagctggaggtcagagtgcaggctcctgtatcccgtcctgtgctcactctgcaccacgggcctgctgaccctgctgtgggggacatggtgcagctcctctgtgaggcacagaggggctcccctccgatcctgtattccttctaccttgatgagaagattgtggggaaccactcagctccctgtggtggaaccacctccctcctcttcccagtgaagtcagaacaggatgctgggaactactcctgcgaggctgagaacagtgtctccagagagaggagtgagcccaagaagctgtctctgaagggttctcaagtcttgttcactcccgccagcaactggctggttccttggcttcctgcgagcctgcttggcctgatggttattgctgctgcacttctggtttatgtgagatcctggagaaaagctgggccccttccatcccagataccacccacagctccaggtggagagcagtgcccactatatgccaacgtgcatcaccagaaagggaaagatgaaggtgttgtctactctgtggtgcatagaacctcaaagaggagtgaagccaggtctgctgagttcaccgtggggagaaaggacagttctatcatctgtgcggaggtgagatgcctgcagcccagtgaggtttcatccacggaggtgaatatgagaagcaggactctccaagaaccccttagcgactgtgaggaggttctctgctag

SEQ ID NO: 297847 - DNA, 1305 bp, Artificial Sequence
  derived and/or modified sequence
atgctcctgtggactgcagtcctcctcttcgtgccctgtgtggggaaaaccgtttggctgtacctgcaggcttggccaaatcctgtcttcgaaggggatgccctcaccctgcggtgccagggctggaagaatacaccgctctcccaggtgaagttctatcgggacgggaaatttctccacttctctaaagaaaaccaaaccctaagcatgggggctgctaccgtacagtctagggggcagtactcttgttcaggacaggtcatgtacatccctcagactttcacacaaaccagtgaaaccgccatggtccaagtccaggagctgtttccgccccctgttctgtctgctatcccatcgcctgagccgcgagaggggtcgcttgtgaccctgcggtgccaaacgaagctgcatcctctgcggtctgcccttaggctccttttcagttttcataaggatggccataccctgcaggaccgtggtcctcatccagaactttgtataccaggcgcgaaggaaggtgattcaggtctgtactggtgtgaggtggcccccgagggcgggcaggttcagaaacagtccccacagctcgaggtgcgcgttcaagccccagtatcgcgacctgtcctcacactgcaccacggccccgcagatcccgccgttggggacatggtgcagctcttatgcgaagctcagaggggctcacctccgattctgtacagtttctaccttgacgagaagatcgttggcaatcatagcgcgccatgcggaggcacaacgagcctgttattcccagtgaagtctgagcaagatgctgggaactactcttgtgaagcagagaactctgtctctcgcgagcgatccgagcctaagaaactttcactcaaagggagtcaggtcctcttcacccctgccagcaactggctcgtgccctggctgccggctagcttgttaggtctgatggtgatcgctgcagccctccttgtgtatgtcagatcctggagaaaggccggccccctgcctagccagattcccccgactgcaccagggggtgaacagtgcccactatacgcaaatgtccatcatcagaagggcaaagatgaaggggttgtgtactctgtggtccataggacctccaagcgatctgaggcccgctctgccgagttcactgttgggcggaaggatagttccatcatctgcgccgaagtgcgatgcctccagccttctgaggtgagcagtacagaggtgaatatgaggtccagaaccctacaggagcccctttccgactgcgaggaagtcctctgttag

SEQ ID NO: 297848 - DNA, 1305 bp, Artificial Sequence
  derived and/or modified sequence
atgctgctgtggacagctgtgctgctgtttgtgccctgtgtgggcaagacagtgtggctgtacctgcaggcctggcccaaccctgtgtttgaaggagatgccctgaccctgcgctgccagggctggaagaacacccccctgagccaggtgaagttctacagagatggcaagttcctgcacttcagcaaggagaaccagaccctgtccatgggcgccgccaccgtgcagagccggggccagtacagctgcagcggccaggtgatgtacatcccccagaccttcacccagaccagcgagacagccatggtgcaggtgcaggagctgttccccccacctgtgctgagcgccatccccagccctgagccccgggagggcagcctggtgaccctgcgctgccagaccaagctgcaccccctgcggagcgccctgcggctgctcttctccttccacaaggatggccacaccctgcaggaccggggcccccaccctgagctgtgcatccctggggccaaggagggggacagcggcctgtactggtgtgaggtggcccctgagggcggccaggtgcagaagcagagcccccagctggaggtgcgggtgcaggcccctgtgtccaggcctgtgctgaccctgcaccacggccctgctgaccctgctgtgggggacatggtgcagctgctgtgtgaggcccagaggggcagcccccccatcctgtacagcttctacctggatgagaagatcgtgggcaaccacagcgccccctgtggcggcaccaccagcctgctcttccctgtgaagtctgagcaggatgctggcaactacagctgtgaggctgaaaattctgtgtcccgggagaggtctgagcccaagaagctgagcctgaagggcagccaggtgctcttcaccccagccagcaactggctggtgccctggctgcctgccagcctgctgggcctgatggtgattgctgctgccctgctggtgtatgtgcgctcctggaggaaggccggccccctgcccagccagatccccccaacagcccctggaggagagcagtgccccctgtatgccaacgtgcaccaccagaagggcaaggatgagggcgtggtgtacagcgtggtgcacaggaccagcaagaggtctgaggcccggtctgctgagttcaccgtgggcaggaaggacagcagcatcatctgtgccgaggtgcgctgcctgcagcccagcgaggtgagcagcacagaggtgaacatgaggagcaggaccctgcaggagcccctgagtgactgtgaggaggtgctgtgctag

SEQ ID NO: 297849 - DNA, 1305 bp, Artificial Sequence
  derived and/or modified sequence
atgctgctgtggaccgccgtgctgctgttcgtgccctgcgtgggcaaaacagtttggctctacttacaggcttggcctaatcctgtgttcgagggagatgctctgactctcagatgtcagggatggaaaaacacaccactaagtcaggtcaagttctaccgcgatggcaagttcctccactttagcaaagagaaccagacactttcaatgggcgccgcgacagtgcagtcacggggccagtattcttgctctggacaggtgatgtatattccccagacattcacccaaacaagtgagaccgccatggtacaggtgcaggagctgtttcctcccccagtcctgtctgccataccctctcccgagcctcgggaaggctccctcgtgacgttgcgatgtcagactaaactccatccactgagatctgccttgcggctgttattcagcttccacaaggatgggcataccctacaggaccgcggaccacatccagagttgtgcatcccaggggcaaaggagggggatagtggcctgtactggtgcgaggtggcgcctgaaggaggacaagtacagaaacaatccccccagttagaggtgcgggtgcaagcccccgtaagccgcccggtcttaactcttcaccacggaccagccgatcctgcagtcggagatatggtgcagctattatgcgaggcccagcgcggctcaccgcccatcctgtacagtttttatctcgacgagaaaatcgtggggaatcattcagctccctgtggggggactacctccctcctcttcccagtcaagagcgagcaggacgccggaaactattcctgtgaggccgaaaactccgtcagccgtgagcgctctgagccaaagaagctgagtctgaaggggagtcaggtcctatttactccggcttccaactggctggttccctggctaccagccagcctgcttgggctcatggttattgcggccgccctgctggtctatgtccgtagttggcgcaaggccggccctctgccatcccaaattcccccgaccgcacctgggggcgagcaatgccctctgtacgccaacgtgcaccatcagaagggaaaggacgagggagtagtgtacagtgttgtgcatagaacctccaagagatcggaagccaggtctgccgaattcactgtgggaaggaaagattccagcatcatttgcgcggaggtacggtgcctgcagccctctgaagtgagcagtacggaggtgaacatgcggtcccggacactgcaggagcctcttagcgattgcgaagaagttctttgttag

SEQ ID NO: 297850 - DNA, 1305 bp, Artificial Sequence
  derived and/or modified sequence
atgcttctttggaccgcggtgctgctgtttgtgccttgtgtgggtaagaccgtctggctgtatctgcaggcttggcccaatccagtttttgaaggagacgccttaactcttcgctgccaaggctggaaaaatacacccctatcacaagtgaagttttaccgcgatggtaagttcctgcacttcagcaaagagaaccagactctctcaatgggcgctgccactgtccagtctcgcggtcagtactcgtgcagtggccaagtgatgtatataccccagacgttcacccaaacctctgagaccgctatggtccaggttcaggagctgttcccgccacctgtgctttctgctattccttcacccgaacctagggaggggtccctggtgacgcttagatgtcaaaccaaactccatccgctgcggtctgctctgagattactcttttcgtttcacaaagatgggcacaccctccaggacagaggcccacaccccgagctgtgtatcccaggcgctaaggaaggggattctggcttgtattggtgtgaggtggccccagagggcggacaggttcagaagcagagccctcagctggaagtgagggtccaggcacctgtgtctcggcctgtcctgaccctccaccacggcccagctgatcccgctgtcggcgacatggtccagctcctgtgtgaggcgcagagaggatcaccgcctatcctctatagcttctacctcgacgagaaaattgttggaaatcatagcgcaccgtgcgggggtactacaagcctgctatttccagtgaaatccgagcaggatgctggaaactactcatgtgaggccgaaaattctgtttcccgcgagcgctccgaacccaagaagttgagcctcaagggaagccaggttttgttcactccagcttctaattggctggtgccctggctacctgcctcacttctgggcctgatggtgatcgcagcggcactactggtttacgtgcgcagttggcgcaaggcgggacccctgcccagccaaattcccccaaccgccccaggcggagagcagtgccctctgtatgctaacgtacaccaccagaagggcaaagatgaaggtgtggtctatagtgtcgtgcaccgcacttccaagcgatctgaggccaggtccgctgaattcacagttggaaggaaagattccagcatcatttgtgccgaggtccggtgtctgcagcctagcgaagttagttctacagaagtaaacatgcggtcccggacactgcaagagccgttaagcgactgtgaagaggtgctgtgctag

SEQ ID NO: 297851 - DNA, 1113 bp, Artificial Sequence
  derived and/or modified sequence
atgccatatcttcacttagatcaccagacgatcctgagggcctgggccgtcaaagattttgcgcccaattgtccattgtacgtccagattcttaagccagaaaacaagttccacatcaagttcgctgaccacgtcgtgtgcgaggaggagtttaagtacgcaatgctagcgcttaattgcatatgcccagccacgtctacccttattaccctgctagtccacacgagccgcggccaggagggacagcaatcacctgaacaatggcagaagatgtatggccggtgttccggcaatgaggtgtaccacatagtcctggaggagtccaccttttttgctgagtacgaaggaaagagttttacatacgccagctttcatgctcacaagaagttcggggtctgcctgatcggcgtcaggagggaggataataagaacattttgttaaatcctggccccaggtatatcatgaatagtacggacatttgcttctatattaacataactaaggaagaaaatagcgccttcaagaatcaagaccagcaaagaaagagcaatgtgagtaggtcattttaccatggcccctcacgcctcccggtgcattcaattatcgctagcatggggaccgtggctatcgacctgcaagatacgagctgtcgaagcgccagtggacccacgcttagcctgcccacagaaggctcaaaggagattcgcaggccgtcaattgcccctgtactggaggtagctgacacctcctcgatccagacctgtgatctgctgtctgaccagtccgaggatgagaccacccctgacgaagagatgagctcaaacttggagtacgccaaaggctacccaccctattcaccctatatagggtcctctcctaccttttgccacctgcttcatgagaaagtgcctttttgctgcttgaggcttgacaagagttgtcaacacaattattacgaagacgccaaggcatacggcttcaagaacaagctcattattgttgcagcagaaactgctgggaatggcctttataacttcatagttccactacgagcctattacaggcctaagaaagagttgaatcccatcgtgttgctgcttgataatccatag

SEQ ID NO: 297852 - DNA, 1113 bp, Artificial Sequence
  derived and/or modified sequence
atgccctacctgcacctggaccaccagaccatcctgcgggcctgggccgtgaaggactttgcccccaactgccccctgtatgtgcagatcctgaagccagagaacaagttccacatcaagtttgctgaccacgtggtgtgtgaggaggagttcaagtatgccatgctggccctgaactgcatctgcccagccaccagcaccctcatcaccctgctggtgcacaccagccggggccaggagggccagcagagccctgagcagtggcagaagatgtatggccgctgcagcggaaatgaggtgtaccacatcgtgctggaggagagcaccttctttgctgaatatgagggcaagagcttcacctacgccagcttccacgcccacaagaagtttggagtgtgcctgattggagtgcggcgggaggacaacaagaacatcctgctgaaccctggcccccgctacatcatgaacagcacagacatctgcttctacatcaacatcaccaaggaggagaacagcgccttcaagaaccaggaccagcagaggaagagcaatgtgagccgctccttctaccacggccccagccggctgcctgtgcacagcatcatcgcctccatgggcaccgtggccatcgacctgcaggacaccagctgccgcagcgccagcggccccaccctgagcctgcccacagagggcagcaaggagatccggcggcccagcatcgcccctgtgctggaggtggccgacaccagcagcatccagacctgtgacctgctgagtgaccagagtgaagatgagaccaccccagatgaggagatgagcagcaacctggagtatgccaagggctacccaccctacagcccctacatcggcagcagccccaccttctgccacctgctgcacgagaaggtgcccttctgctgcctgcggctggacaagagctgccagcacaactactatgaagatgccaaggcctacggcttcaagaacaagctgatcatcgtggccgctgagacagctggaaatggcctgtacaacttcatcgtgcccctgcgggcctactaccggcccaagaaggagctgaaccccatcgtgctgctgctggacaacccctag

SEQ ID NO: 297853 - DNA, 1113 bp, Artificial Sequence
  derived and/or modified sequence
atgccctacctgcacctggaccaccagaccatcctgcgggcctgggcagtcaaggactttgccccgaactgcccattatacgtgcaaatactgaagcccgagaataagttccacataaaattcgctgaccatgtagtgtgtgaagaagagttcaagtacgctatgctcgccctcaactgcatctgtccagcaacttcaactttaatcacgctcctcgtccacacctccagagggcaggaagggcagcagtcgccagagcagtggcagaaaatgtacggccgatgctccggcaatgaagtttaccatatagtgctggaggagtcaacgttctttgcggagtatgagggtaaatcgtttacttacgcgagttttcacgctcataagaaatttggcgtgtgtctcataggcgtcagacgtgaggacaataagaacattcttctcaacccaggtccgcgttatataatgaattctaccgacatatgtttttatataaatattacgaaagaagaaaactcagcttttaaaaaccaagatcaacaaagaaagtcaaacgtgtctcgatcattctatcacggcccttcacgcctgcctgtgcattcgatcattgcgtcgatggggacggtggcaatcgatcttcaggatacttcatgtagaagcgccagcggcccaaccctatccttgcccacagagggaagcaaggagatacgtcggccctctatcgcaccagtactggaggtagcagacacctcttcaattcaaacatgcgacctactgtctgaccagtccgaagacgaaactacaccagacgaggagatgagtagtaatctggaatacgctaaaggctaccctccctacagtccctacattggtagtagtcccactttctgtcacttgctacatgagaaggtccctttttgttgcctgagactggataaatcctgtcagcataattactacgaagacgccaaagcctacggattcaagaacaagctgatcattgtggccgccgaaactgccggcaatggactgtacaactttatagtgcctctgcgtgcttactatcggccgaagaaggaattgaatcctatcgtccttttgctggataacccttag

SEQ ID NO: 297854 - DNA, 1113 bp, Artificial Sequence
  derived and/or modified sequence
atgccgtacctgcacctggatcaccagacaatacttcgggcatgggctgtgaaggatttcgcacctaactgccctctgtacgtgcagatccttaagcccgaaaataaattccacattaagtttgctgatcacgtggtatgcgaggaagagtttaagtatgccatgctggcgcttaactgtatatgtccggcaacaagtacgttaattaccctcctggttcacacttccagagggcaggaaggtcaacagagtcccgagcagtggcagaaaatgtacggacgttgtagcggcaacgaggtatatcatatcgtcctggaagagagcacattttttgccgagtatgagggtaaatctttcacgtacgcttcattccatgcccacaaaaaattcggagtgtgcctgatcggcgtacgcagggaggacaataaaaatattctgctcaaccctggaccgcgatatatcatgaactctacagacatctgcttctatattaacatcacaaaagaagagaacagtgcattcaaaaaccaggaccagcagcgaaagtccaacgtcagtcggtccttttaccacggtccctcccgcctcccggtccacagcatcattgcttcaatgggcaccgtcgccattgacctccaggacactagctgtcgatcggcaagcggacccacgctcagcctgcccaccgagggaagcaaggagatccggaggccgagcattgcccctgtcctcgaggtggccgatacttcaagcatacagacatgcgacctcttaagcgaccagagcgaggatgagaccacccctgacgaagagatgtcctccaacctggaatacgcgaaagggtatccaccatatagcccttacatcgggtccagccctacattttgccacctgctccacgagaaagttcccttttgctgtctccgactcgacaaatcatgccaacacaactattacgaagacgctaaggcttatgggtttaagaataaactgatcattgtcgcagctgagaccgctggcaatggtctttacaacttcatcgtccccctgagagcctactaccgccctaaaaaggagttgaatcccattgtcctgctcctggataacccatag

SEQ ID NO: 297855 - DNA, 1113 bp, Artificial Sequence
  derived and/or modified sequence
atgccctacctgcacctggaccaccagaccatcctgagagcctgggccgtgaaggacttcgcccccaactgccccctgtacgtgcagatcctgaagcccgagaacaagttccacatcaagttcgccgaccacgtggtgtgcgaggaggagttcaagtacgccatgctggccctgaactgcatctgccccgccaccagcaccctgatcaccctgctggtgcacaccagcagaggccaggagggccagcagagccccgagcagtggcagaagatgtacggcagatgcagcggcaacgaggtgtaccacatcgtgctggaggagagcaccttcttcgccgagtacgagggcaagagcttcacctacgccagcttccacgcccacaagaagttcggcgtgtgcctgatcggcgtgagaagagaggacaacaagaacatcctgctgaaccccggccccagatacatcatgaacagcaccgacatctgcttctacatcaacatcaccaaggaggagaacagcgccttcaagaaccaggaccagcagagaaagagcaacgtgagcagaagcttctaccacggccccagcagactgcccgtgcacagcatcatcgccagcatgggcaccgtggccatcgacctgcaggacaccagctgcagaagcgccagcggccccaccctgagcctgcccaccgagggcagcaaggagatcagaagacccagcatcgcccccgtgctggaggtggccgacaccagcagcatccagacctgcgacctgctgagcgaccagagcgaggacgagaccacccccgacgaggagatgagcagcaacctggagtacgccaagggctaccccccctacagcccctacatcggcagcagccccaccttctgccacctgctgcacgagaaggtgcccttctgctgcctgagactggacaagagctgccagcacaactactacgaggacgccaaggcctacggcttcaagaacaagctgatcatcgtggccgccgagaccgccggcaacggcctgtacaacttcatcgtgcccctgagagcctactacagacccaagaaggagctgaaccccatcgtgctgctgctggacaacccctag

SEQ ID NO: 297856 - protein, 178 aa, Artificial Sequence
  derived and/or modified sequence
MHSSALLCCLVLLTGVRASPGQGTQSENSCTHFPGNLPNMLRDLRDAFSRVKTFFQMKDQLDNLLLKESLLEDFKGYLGCQALSEMIQFYLEEVMPQAENQDPDIKAHVNSLGENLKTLRLRLRRCHRFLPCENKSKAVEQVKNAFNKLQEKGIYKAMSEFDIFINYIEAYMTMKIRN

SEQ ID NO: 297857 - DNA, 534 bp, Artificial Sequence
  derived and/or modified sequence
atgcattcctccgctctcctgtgctgcctagtacttctcaccggagtccgggctagcccaggtcagggcactcagtctgagaattcatgtacacacttccctggcaatctccctaacatgcttcgtgacttgagagacgccttctcccgggtcaagacattctttcagatgaaggaccagttagacaaccttctcttaaaggaatcgctgctcgaggacttcaaagggtacctgggatgtcaggcgcttagtgaaatgatacagttttatcttgaagaggtcatgccacaggccgaaaaccaggaccccgacattaaagctcacgtcaattcactgggcgaaaatctgaaaacccttcggctgagacttcggaggtgccacagatttctgccatgcgagaataagtccaaggctgtggagcaagttaagaatgccttcaataagctgcaggagaagggcatctacaaggccatgtctgaatttgatattttcatcaactacatagaagcctatatgacgatgaagatccggaac

SEQ ID NO: 297858 - DNA, 534 bp, Artificial Sequence
  derived and/or modified sequence
atgcatagtagcgcactattgtgctgcctcgtcctgttgacaggagttcgcgctagccctggccaaggcactcagtcagaaaattcttgtacgcactttccggggaatctaccgaacatgttacgcgaccttcgagatgcgttctcgagggttaaaacgttctttcaaatgaaggatcaattggacaacctacttcttaaagaaagtcttttagaagactttaagggttacttagggtgtcaggcgctgtctgaaatgatccaattttatttggaggaagtaatgccacaagcggaaaatcaggatcctgacataaaagctcatgttaactctctgggcgagaatctaaaaacattgcgtttaaggttgagacgttgccaccgttttctaccctgcgagaataaaagcaaagctgttgaacaagtaaagaacgccttcaacaagttgcaagaaaagggaatttataaagcaatgtcagagtttgatattttcattaactacattgaagcgtacatgacgatgaagataagaaat

SEQ ID NO: 297859 - DNA, 534 bp, Artificial Sequence
  derived and/or modified sequence
atgcactcatcggcgctcctttgctgcttagttcttcttacgggtgttcgcgcctcgcccggtcagggaactcaatcagagaactcttgcacacattttccgggtaatcttcctaatatgttgagagatcttcgcgatgcattctcgcgggtcaaaacctttttccaaatgaaagaccagctagacaaccttctgttgaaagaatcgctgctcgaagatttcaagggctacctgggttgccaggccctatcagagatgatccaattttatctcgaagaagtgatgccgcaggctgaaaatcaggatccggatatcaaagcccatgtaaactccctgggggaaaacctgaaaacactgcgtctgcgtctgcgaagatgccatcgatttctgccctgtgagaacaaatctaaagccgttgaacaggtgaagaatgcattcaacaaattgcaggagaaaggcatctacaaagcgatgtcggaattcgatatctttattaattacatagaagcttacatgacaatgaaaatccgcaac

SEQ ID NO: 297860 - DNA, 534 bp, Artificial Sequence
  derived and/or modified sequence
atgcactcaagtgccctattatgttgtcttgtccttcttacaggagtacgggccagtcccgggcagggaactcaatctgaaaattcatgcacacattttcctgggaacctccccaatatgttgagagatctccgggatgccttctctagagtgaaaacatttttccagatgaaggatcagcttgataacctactactgaaagaatcccttctggaggattttaaaggatacttagggtgccaggctctatctgaaatgatacagttttacctggaagaagtgatgcctcaggcggaaaatcaggatcccgatatcaaagcccatgtcaatagtctaggggaaaacctgaaaacgttgaggctgcgactccgccgttgccatcggttcctaccctgtgaaaataagtctaaggcagtcgaacaggtgaaaaatgccttcaataaattgcaggagaaagggatttataaggctatgagtgaatttgatatattcatcaattatatcgaagcttatatgacaatgaaaattcggaat

SEQ ID NO: 297861 - DNA, 534 bp, Artificial Sequence
  derived and/or modified sequence
atgcattcgtcggcgttattatgttgtttagtattactaacgggtgttcgtgcgtcgccgggtcaaggtacgcaatcggaaaattcgtgtacgcattttccgggtaatctaccgaatatgctacgagatctacgagatgcgttttcgcgagtaaaaacgttttttcaaatgaaagatcaattagataatctattactaaaagaatcgttactagaagattttaaaggttatttaggttgtcaagcgctatcggaaatgatacaattttatttagaagaagttatgccgcaagcggaaaatcaagatccggatataaaagcgcatgttaattcgctaggtgaaaatctaaaaacgctacgattacgtctacgacgttgtcatcgatttctaccgtgtgaaaataaatcgaaagcggtagaacaagtaaaaaatgcgtttaataaattacaagaaaaaggtatatataaagcgatgtcggaatttgatatatttataaattatatagaagcgtatatgacgatgaaaatacgtaat

SEQ ID NO: 297862 - DNA, 534 bp, Artificial Sequence
  derived and/or modified sequence
atgcatagcagtgcgctgctgtgttgcttagtgttgctgactggggtcagagcatctcctggacagggaactcagtcagaaaactcctgtactcacttccctgggaatctgccaaatatgctcagggacctacgcgacgctttttcccgagtgaagaccttctttcagatgaaggaccagttagacaatctgctgttgaaggagagtctccttgaggacttcaagggctatctggggtgtcaggcactgtctgaaatgatacagttctatcttgaagaagtgatgccgcaggccgagaatcaggacccagacataaaggcccatgtcaacagtctcggagagaatctcaagacactgagattgcggctgcgccgatgccaccgctttctgccatgcgagaacaaatctaaggctgtagagcaggtgaagaatgcattcaacaagcttcaggaaaaaggtatatacaaagctatgtccgaattcgatatcttcataaactacatcgaggcatacatgacgatgaagatcaggaac

SEQ ID NO: 297863 - DNA, 534 bp, Artificial Sequence
  derived and/or modified sequence
atgcattcatcggcacttctctgttgccttgtccttcttaccggagtgcgggcatcgcctggacaaggaacccagtccgagaacagctgtactcattttcctggtaacctgcctaacatgctcagggatctgcgcgacgcgttctcgcgggtgaaaacgttctttcaaatgaaggatcagctggacaatctgctgctgaaggagtcactgctggaggactttaaaggctacctggggtgccaggctcttagcgagatgatacagttttacttggaagaagttatgccccaagccgaaaatcaagacccggacattaaggcacacgttaattcccttggcgagaacctcaagactcttcgcttgagacttcgacgttgtcaccgattcctgccgtgtgaaaacaagtcgaaggcagtagaacaagtgaaaaacgcattcaataagctccaagaaaaaggtatctacaaggccatgtccgagtttgacattttcatcaactacattgaggcttatatgaccatgaagattagaaac

SEQ ID NO: 297864 - DNA, 534 bp, Artificial Sequence
  derived and/or modified sequence
atgcatagcagtgccctcctgtgttgcctcgtcctcttgaccggtgtgcgagctagccctggtcaaggtacgcaatctgagaactcatgcacccatttccccggcaaccttcctaatatgctgcgcgaccttagggatgcgttttcccgtgtcaagactttctttcagatgaaggatcaactcgacaacctccttttgaaggaatcactgctggaagatttcaaaggataccttggctgtcaggcactgtcggaaatgattcagttttacctggaagaagtcatgccccaagcagaaaatcaagatcctgacatcaaggcacacgtgaactcactgggagagaacctcaagacccttcggctgagacttagacgatgtcaccggtttctcccatgtgagaacaaaagtaaggccgtggagcaagtgaaaaatgcattcaataagctccaggaaaagggtatttacaaagctatgtcggaatttgacatcttcataaactacattgaggcatacatgactatgaagattcgaaac

SEQ ID NO: 297865 - DNA, 534 bp, Artificial Sequence
  derived and/or modified sequence
atgcattcgagtgccttactttgttgcctcgtactactcacgggagttagggcatcgccaggccagggaacccagagcgagaacagttgtacacactttcccggtaacttgcccaatatgttgagggatcttcgggacgctttcagcagagtcaagactttcttccagatgaaagaccagttggacaatctgctgctgaaagaatctttgctggaggatttcaaaggatacttgggctgccaagcattaagcgaaatgatccagttctatttagaggaagtgatgccccaggcagagaaccaagacccagatataaaggcccatgtgaactccctgggcgaaaacctgaagacacttaggcttcggctgcgtcgctgccaccggtttcttccctgtgaaaacaagagtaaagccgtcgagcaggtcaagaatgcatttaataaacttcaggagaagggtatttacaaagccatgagtgagttcgatatctttataaattatatagaagcatatatgaccatgaaaatcagaaat

SEQ ID NO: 297866 - DNA, 534 bp, Artificial Sequence
  derived and/or modified sequence
atgcactcttcagcgcttttgtgctgtctcgtgttactcacgggcgtgcgtgccagcccgggacagggaacccaatccgaaaactcatgtactcatttcccgggaaacctgcccaacatgctcagggacctcagagacgcttttagtcgggtgaagaccttttttcagatgaaagatcagctggacaatctattactaaaagagagcttactggaggattttaagggatatctcgggtgccaagccctctccgagatgattcagttttatctcgaggaggtaatgccacaggcggaaaaccaggacccggacattaaggcgcacgtcaactcgctgggagagaatttgaaaacactacggctgcgactcaggaggtgccatcggttcctcccatgcgagaacaaaagcaaggccgtggagcaggtgaagaacgcgttcaataagttgcaagaaaaggggatttacaaggccatgtctgaatttgacattttcataaactatatagaggcctatatgactatgaagatccgtaat

SEQ ID NO: 297867 - DNA, 534 bp, Artificial Sequence
  derived and/or modified sequence
atgcactcgtctgctcttctctgttgccttgtgctgttgacgggggtgcgagcttcgccaggtcaaggaacgcaatcggagaacagctgtacacacttcccaggtaatttaccaaacatgttaagagatctacgtgacgcattttcaagggtcaaaacgttttttcagatgaaagatcagctagacaacctgcttcttaaggagtccttactggaagatttcaagggatacttaggatgtcaagcactatcagaaatgatccaattctacctggaggaagtcatgccacaagctgaaaatcaagatcctgatataaaagctcatgtcaacagccttggagaaaatctgaaaacgctcagattacggcttagaagatgtcaccgatttctgccatgtgaaaataagtctaaagcagtagaacaggtcaaaaatgcctttaataagttgcaagaaaaaggaatttataaagcgatgtcagaatttgacatttttattaattacattgaggcctacatgacaatgaagatccgaaat

SEQ ID NO: 297868 - DNA, 534 bp, Artificial Sequence
  derived and/or modified sequence
atgcatagtagcgctctcctttgctgtcttgtgctgctcaccggagtgcgagccagccccggtcagggcactcagtcggagaattcctgcactcacttcccggggaacctgccgaacatgctgagggacctcagagacgcattttcacgcgtcaaaacgttcttccagatgaaagaccaactcgataacctgctccttaaggaatcgctgctggaagatttcaagggatacctggggtgtcaagcgctcagtgaaatgatccagttctacctcgaagaggttatgccacaggcggagaaccaggatccagacatcaaggcccacgtcaattcacttggtgaaaatctgaaaaccctgcggctccgcttgcgccgctgccaccgctttctcccgtgcgaaaacaagtctaaggctgtggaacaagtgaagaacgctttcaacaagctccaggagaagggaatctataaggccatgtcggagtttgatatctttatcaactacattgaagcatacatgaccatgaagatccggaac

SEQ ID NO: 297869 - DNA, 534 bp, Artificial Sequence
  derived and/or modified sequence
atgcattcaagcgctctcctttgttgtctggtgctcctcactggagtgagagcaagccctggtcagggaacgcaatcagagaacagctgtactcatttccctggaaacctgcccaatatgctgagagacttgcgcgatgccttctcgcgagtcaagaccttcttccaaatgaaggaccaacttgacaacctgctgctgaaggaatcgctgcttgaggactttaaaggctacctgggttgccaagctctgtcggagatgattcaattctaccttgaagaggtcatgccacaggcggaaaatcaagatcctgacataaaggcacatgtcaacagccttggagaaaatcttaagaccctgcgccttcgcctccgccgctgtcatcgttttctcccctgcgaaaacaagtccaaagcggtggaacaagtgaagaacgcatttaacaaacttcaggagaagggaatttacaaggccatgtcagagtttgacatattcattaactacattgaagcatacatgactatgaagatccggaac

SEQ ID NO: 297870 - DNA, 534 bp, Artificial Sequence
  derived and/or modified sequence
atgcactcctccgcgctgctgtgctgcctggttctcctgaccggagtccgggcctcgccgggccaggggacccagtcagagaattcgtgtactcacttcccaggaaatctccctaacatgctgagagatctccgcgacgccttctcaagagtgaaaacttttttccaaatgaaggaccagctcgacaatctgctgctgaaggaatcgctgctcgaggacttcaagggatacctgggctgccaggcactgtctgagatgatccagttttatctcgaggaggtcatgcctcaagctgaaaatcaggacccggatatcaaggcacatgtcaactccctgggagagaatctgaaaacgctgcgcctcagactccggcgctgtcatcgctttttgccgtgcgagaacaagagcaaggccgtggagcaagttaagaatgcgttcaacaaacttcaggaaaagggcatatacaaggccatgtctgaattcgacatcttcatcaactacattgaagcctacatgaccatgaagatcagaaac

SEQ ID NO: 297871 - DNA, 534 bp, Artificial Sequence
  derived and/or modified sequence
atgcactcctcggcactgctctgttgcttggtcctccttaccggagtcagggcgtcaccaggccaaggtacgcagtccgaaaactcatgcacccacttcccagggaatttgcctaatatgctgcgggacctgagggacgcgttttcgcgcgtgaaaacgttttttcagatgaaggatcaactggacaaccttctgcttaaggaatcactgctggaagatttcaagggttacctcggatgtcaagctctttccgaaatgattcaattctaccttgaggaagtgatgcctcaggccgaaaaccaagatcccgatatcaaagcacatgtgaattccctcggcgaaaacttgaaaacgttgcggttgcgattgaggagatgccatcgttttctcccatgtgaaaacaagagcaaggcagtcgagcaagtcaagaacgcattcaataaactccaggagaaaggcatttacaaggcaatgtcggagtttgacatctttatcaactatattgaagcctacatgaccatgaagatccgcaac

SEQ ID NO: 297872 - DNA, 534 bp, Artificial Sequence
  derived and/or modified sequence
atgcattcctccgccttgctctgttgcctggtgttgctgacaggtgtgcgcgcttccccaggacagggaacccagagtgagaacagctgcacgcatttccctggtaacctccctaatatgttgagagatctccgcgacgctttcagccgggtgaagactttcttccagatgaaagaccagttggacaacctcctgctgaaagaaagtttgctggaggacttcaagggttacctgggatgtcaggccctgtctgagatgattcagttctacctggaagaggtgatgccacaagcagagaaccaggacccagacatcaaagcccatgtgaacagcctcggcgagaatctcaagactttgcggctgcggctgagacgatgccaccggtttctgccttgcgagaataaatccaaagccgtggagcaggttaaaaatgccttcaataagctccaagagaagggaatttataaggctatgagcgaatttgatattttcataaattatatagaggcctacatgaccatgaagatcaggaac

SEQ ID NO: 297873 - DNA, 534 bp, Artificial Sequence
  derived and/or modified sequence
atgcacagctcggccttgctgtgctgcctggtgctgcttaccggagtcagagcatcccccggtcaaggcactcaatcggagaactcttgtacccacttccccgggaatctgccaaacatgctgcgtgacttacgagatgccttttctcgcgtgaaaacgttctttcagatgaaagatcagctggacaatctgttgctgaaagagtctttgcttgaggactttaaggggtacctggggtgccaggcccttagtgaaatgatccagttttatcttgaagaggtgatgccgcaggccgaaaatcaggacccggatataaaggcccatgtgaattcacttggggaaaatttgaaaacactgaggttgcgccttcgccgctgtcatagattcctgccttgtgaaaataagagtaaagctgttgagcaggtaaaaaacgcgtttaacaagttgcaggagaaggggatctacaaggcaatgagtgagttcgatatcttcatcaattatattgaggcatatatgactatgaagatacgcaat

SEQ ID NO: 297874 - DNA, 534 bp, Artificial Sequence
  derived and/or modified sequence
atgcactcctctgccctcttgtgttgtctggtgcttctgactggggttagggctagccctggacagggtacccagagtgagaattcttgcacacacttcccgggaaatctccccaacatgttgagagacctgcgggatgccttcagtcgagtgaaaacatttttccaaatgaaggatcagctggacaacctgctgctgaaagagtcactgttagaagactttaaaggatacctgggttgccaggccctttctgagatgatccagttctaccttgaggaggtgatgccccaggccgagaaccaggaccccgatatcaaggcgcatgttaactcactcggggagaatctaaagaccctgcgtctgcggctacgtcgctgccatcgtttcctgccctgcgagaataaatccaaggcagtggaacaggttaaaaacgcattcaacaagctgcaggagaagggaatatacaaagccatgtccgagtttgatatttttatcaattatatcgaggcttatatgactatgaaaatccggaat

SEQ ID NO: 297875 - DNA, 534 bp, Artificial Sequence
  derived and/or modified sequence
atgcactcctcggccttgttgtgttgtctggtgctccttactggtgtgcgggcgtcacccggacagggaactcaatccgaaaatagctgtactcattttccaggaaatctccctaacatgctgcgggacctgcgtgatgcattttctagggtcaaaacgttctttcaaatgaaggatcagctcgacaacctccttctgaaggaaagccttcttgaagatttcaaaggctacttgggctgccaagcgcttagcgagatgattcagttttaccttgaggaagtaatgcctcaggccgagaaccaagatccagacattaaggcacacgtcaattctctcggggaaaatctgaaaactctgagacttcgactgaggcgctgccatagatttcttccttgtgaaaacaagtccaaagcagtggaacaagtgaagaacgccttcaataagttgcaagagaaaggaatctacaaggcaatgtcggaatttgacatattcatcaactacatagaggcttatatgacgatgaaaattcgaaac

SEQ ID NO: 297876 - DNA, 534 bp, Artificial Sequence
  derived and/or modified sequence
atgcatagcagcgccctgctgtgttgtctggtgctcctgaccggggtgagagcctccccgggccagggtactcaatccgaaaattcctgcacacatttccccggcaaccttccgaacatgttgcgcgatctcagagatgcctttagcagggtgaagacattcttccagatgaaggatcagcttgacaacttgctgctgaaagagtctctgcttgaggatttcaagggatacctgggatgtcaagcactgagtgagatgatccagttttacctcgaggaggtgatgccccaagcagagaatcaggaccctgacataaaagctcatgtaaattccctgggcgagaacttgaagacactgaggttgcgcctgcgaaggtgtcacagattccttccatgcgagaataaaagcaaggccgtggaacaagtgaaaaacgcatttaacaagctgcaggagaaggggatctacaaagccatgtctgagtttgatattttcatcaattatattgaggcctatatgaccatgaaaattaggaac

SEQ ID NO: 297877 - DNA, 534 bp, Artificial Sequence
  derived and/or modified sequence
atgcatagcagtgctttgttgtgctgtctggtgttgctgacgggcgtgcgtgcctctcccggtcagggcacccaatcagaaaactcttgtacacattttccaggcaacctgccaaacatgctgcgcgacctacgcgatgcattctcgcgcgtaaagacttttttccagatgaaagaccagctagataacctgctcttgaaggagtcgcttctggaggacttcaagggatatctggggtgccaggctcttagcgaaatgatacaattttacctggaggaggttatgccccaggcggagaaccaggatcccgacattaaagctcatgtgaatagccttggcgagaaccttaagaccctgaggttaaggttgagacgttgccaccgctttctaccatgcgagaacaagtccaaggccgtggaacaggtgaagaacgcgttcaacaagctccaggaaaaaggaatctacaaggccatgagcgaatttgatatttttattaactatatcgaggcttacatgactatgaaaatacgcaat

SEQ ID NO: 297878 - DNA, 534 bp, Artificial Sequence
  derived and/or modified sequence
atgcattccagcgcactcttgtgttgcctggtgctgctcaccggtgtccgggcctccccggggcagggaacccagagcgaaaactcgtgcactcacttcccaggaaatctgcccaatatgctccgcgacctgagggacgcgttctcccgggtgaaaaccttcttccaaatgaaggaccaacttgataaccttctgctcaaggagtcgctgctggaggatttcaagggatacctcggctgtcaggctttgtctgaaatgatccagttctacttggaggaagtgatgccgcaagccgagaaccaggacccggatatcaaggcacacgtcaactcgctcggcgaaaacctgaaaacgctgcgcctgagactgagacgatgccatcggtttctcccttgcgaaaacaagtcaaaggctgtggaacaagttaaaaacgcctttaataagctgcaggagaagggaatctataaggccatgtcagagttcgacatttttatcaattacatcgaagcgtacatgactatgaaaatccgcaac

SEQ ID NO: 297879 - DNA, 534 bp, Artificial Sequence
  derived and/or modified sequence
atgcattcttccgcgctgctgtgctgtttggttctgttgacaggagtgcgggcgtcccctggccagggcacccaatctgaaaactcatgtacacattttcccgggaacttgccaaatatgctccgagacctgcgggacgccttttcccgggttaagaccttcttccagatgaaagatcagctagacaaccttctactgaaggagtctctactcgaggacttcaagggctacttgggctgtcaggccctgtcagagatgattcagttttacctggaggaggttatgccccaggcagaaaatcaggaccccgacatcaaagctcatgttaattcgttgggagagaacctgaagactttaaggctcaggctacggcgctgtcatcggttcctgccatgcgagaacaagtcgaaggccgtggagcaggtgaaaaatgcattcaataagctgcaggagaagggcatctacaaggctatgagcgagtttgacatcttcatcaactacatagaagcatacatgactatgaaaattcggaac

SEQ ID NO: 297880 - DNA, 534 bp, Artificial Sequence
  derived and/or modified sequence
atgcattcctccgctctgctgtgctgcctagtactcttgactggagttcgggcctccccaggacagggaacacagagtgaaaattcatgcacacacttccccgggaatctccctaatatgctgagggacctgcgggatgccttcagtcgcgtcaagactttctttcagatgaaagatcagctagataacctccttctaaaagaaagtctactagaagattttaaaggatacctggggtgccaggctctgtctgagatgatacagttttatctagaagaggtgatgccacaagctgaaaatcaggatccagatataaaagctcacgttaatagtctgggagaaaatcttaagactcttagactgcgcctcaggagatgccaccggttcctgccttgtgaaaacaaatccaaagccgtggagcaggttaagaatgccttcaacaaactgcaggaaaaagggatttataaagctatgtctgagtttgatatattcattaattacatcgaagcatatatgacaatgaagattcgaaac

SEQ ID NO: 297881 - DNA, 534 bp, Artificial Sequence
  derived and/or modified sequence
atgcattcgtccgcactgctttgttgtcttgtgctgcttactggcgtccgggcgagccctgggcaaggaacccaatcggaaaatagctgcacccattttcctggtaacttgccaaatatgcttcgcgatcttagggatgctttcagtcgagtcaagacttttttccaaatgaaggatcagctcgataatctgcttcttaaagagtcgctccttgaagatttcaagggttacctgggttgtcaggcactcagcgaaatgatacagttttatcttgaggaagtcatgcctcaggcggaaaaccaagatccagacattaaggcccatgtgaactcgctcggcgaaaacctgaaaaccctcagacttaggctgcggcgctgtcaccgatttctgccctgcgagaacaagtctaaggctgtggagcaagtgaaaaatgccttcaataaacttcaggaaaagggtatctacaaagctatgagcgaatttgacattttcattaactacatcgaagcatacatgacgatgaagattcggaat

SEQ ID NO: 297882 - DNA, 534 bp, Artificial Sequence
  derived and/or modified sequence
atgcactcatcagccctcctgtgctgcctcgtgctgctcaccggtgtgcgggcatctcctgggcagggaactcagagcgaaaactcctgtacccacttcccaggcaatctgccgaatatgctgcgcgatctgcgcgatgccttctcgcgggtgaaaaccttcttccagatgaaggaccaactggacaacctgttgctcaaggaatctctcctcgaagatttcaaaggttacctgggatgtcaggcactttcggaaatgatccagttttacctggaggaggtgatgccacaagccgaaaaccaagacccagatatcaaagcccatgtcaattccctcggggagaaccttaagaccctgcggctgcgattgcgcagatgccacaggttcctgccgtgcgagaacaagagcaaagcagtggaacaggtgaaaaatgccttcaacaagctccaggagaaaggaatctacaaggcgatgtccgagtttgatatcttcattaactatatcgaagcctacatgactatgaaaatcagaaac

SEQ ID NO: 297883 - DNA, 534 bp, Artificial Sequence
  derived and/or modified sequence
atgcatagttctgcccttctgtgctgtctggtgctgctgactggggtccgcgcaagtcctggccagggcactcagtcggaaaattcttgtacccatttccccgggaacttgccaaacatgctgagggacctccgggatgctttctcccgggtcaagacttttttccagatgaaggaccagctggacaacctgctacttaaggaatctctccttgaggactttaagggctatctcggatgtcaagcactgtctgaaatgattcaattctatctagaggaagttatgccacaagcagaaaaccaggatcccgatattaaggctcacgtgaactccttgggagagaatctgaaaacattgaggttgagactgagaaggtgtcatcgatttctcccatgcgagaacaaatcaaaggcggtggagcaggtgaagaatgctttcaataaactgcaggaaaaaggcatttataaggccatgagtgaattcgatatcttcattaattacatcgaggcctacatgacgatgaagatcaggaat

SEQ ID NO: 297884 - DNA, 534 bp, Artificial Sequence
  derived and/or modified sequence
atgcactcgtcagcactgctttgctgtctcgtgcttttgacgggagttcgtgcatccccaggccaagggactcaatccgagaattcctgtactcattttcctggaaacctgccaaacatgctccgggatctgcgggatgcgttcagcagggtcaagaccttctttcaaatgaaggatcagctggacaatcttctgcttaaggaatcgctgctcgaagatttcaaaggttacttgggatgtcaggcacttagcgaaatgatccaattctaccttgaagaagtgatgccccaagccgaaaaccaagatccagacattaaggcccacgtcaacagccttggcgagaatctgaaaaccttgcgtctcagacttcgcagatgtcatcgcttcctgccttgcgaaaacaagagcaaggcagtggagcaggtgaaaaatgcctttaacaaactccaagagaagggtatttacaaggcgatgtccgaatttgacatcttcataaactatattgaggcttatatgaccatgaagatccgcaat

SEQ ID NO: 297885 - DNA, 534 bp, Artificial Sequence
  derived and/or modified sequence
atgcacagttccgccctgctgtgctgtctcgtcctcctgacgggggtgagggcctctcctggccagggcacacagagcgagaattcctgcacgcacttccccgggaatctgcccaacatgttacgggatctgagagacgcattctcccgagtcaaaacatttttccagatgaaagaccagctcgacaacttactgctgaaggaaagcttgctggaggacttcaaggggtacctaggctgccaagctcttagtgagatgatccagttttatctggaggaggttatgccgcaggcggaaaaccaagatcccgacattaaagcacatgtaaattctttgggcgagaacttaaaaactctcagactgcgtttacgaagatgtcacagattcttgccgtgcgagaataaatccaaggcagttgagcaggtgaaaaacgcttttaataagttacaggagaaggggatctacaaggctatgagtgaattcgacatcttcatcaattacatcgaggcctatatgaccatgaagatcaggaac

SEQ ID NO: 297886 - DNA, 534 bp, Artificial Sequence
  derived and/or modified sequence
atgcatagctctgcgctcctgtgctgcttggtgctgctgaccggagttcgcgcctcccccggacagggtacccagtcagagaatagctgtactcacttcccgggcaaccttccaaacatgctccgtgacctgcgggatgccttctcgcgcgtcaaaacctttttccaaatgaaggaccaactcgacaacctgcttctgaaggaatctcttctggaggatttcaagggttacttggggtgccaagccttgagcgaaatgatccagttttacctggaagaagtgatgcctcaggcagaaaaccaagacccagacatcaaagctcatgtgaactcacttggagagaatctgaaaactctgcgcctgcggttgcgaaggtgtcacagattcttgccgtgcgagaacaaatcgaaagcagtcgagcaggtgaagaatgctttcaataagttgcaggaaaagggaatatacaaggctatgtccgagttcgatatcttcatcaactatatcgaagcctacatgacgatgaagattcgcaac

SEQ ID NO: 297887 - DNA, 534 bp, Artificial Sequence
  derived and/or modified sequence
atgcatagttccgccctcttgtgctgcctggtgctcctgaccggcgtgcgagcttcgccgggccaagggacccagagcgagaattcgtgcacgcacttccctggcaatcttcccaatatgcttagggacctccgagatgccttctcgcgcgtcaagaccttctttcagatgaaggatcaactggataatctgctgctgaaggagagcttgctcgaggacttcaaagggtacctcggttgtcaagcgctgagtgaaatgattcagttttacctggaggaggtcatgccacaagcagaaaatcaggaccccgatatcaaagcgcacgtcaacagtctgggagagaatcttaagacgctgcgcctgcgcttacgccgatgtcacagattccttccgtgcgaaaacaagtcgaaagctgtagaacaggtgaagaacgcattcaataagctgcaggaaaagggaatctataaggctatgtctgagtttgacattttcatcaactacatagaggcctatatgactatgaaaatccggaac

SEQ ID NO: 297888 - DNA, 534 bp, Artificial Sequence
  derived and/or modified sequence
atgcactcttcagccctcctgtgctgtctcgtgctcctcactggagttcgcgcgagcccaggacaaggtacacagtctgaaaattcttgtacccattttccagggaaccttcccaacatgctcagagacctgagagatgcatttagccgcgtgaagacctttttccaaatgaaggatcaactcgataacctgctgctgaaagaatccctcctcgaagattttaaaggttacctcggttgccaggcattgtccgaaatgatccaattctacctggaagaagtgatgccccaggctgagaaccaagatcctgatatcaaggcacatgttaactcgctgggcgagaacctaaagacattgaggctgcgcctgagacgctgccatcgttttctcccttgcgaaaacaagagcaaggccgtggagcaggtaaagaatgcttttaacaagctccaggaaaaaggtatttacaaagccatgagtgagttcgacatttttatcaattatatagaggcgtacatgactatgaaaatccggaac

SEQ ID NO: 297889 - DNA, 534 bp, Artificial Sequence
  derived and/or modified sequence
atgcattcctccgctctcctgtgctgccttgtgctgctgacaggagttcgggcatctccaggccagggaacacaaagtgaaaactcttgcacacacttcccaggcaaccttccaaacatgctgcgcgacttgcgggacgccttttcgcgggtgaagaccttcttccaaatgaaggaccagctcgacaacctgcttctaaaggagtccttgctcgaagactttaaggggtacctcgggtgtcaggctctttccgagatgatccagttctacttagaggaggttatgcctcaggctgaaaaccaggaccctgacattaaagctcatgtcaattcactgggagaaaatctcaagacactgcgactgcgtttgagaagatgtcaccggttcctgccttgtgaaaacaagagcaaagctgttgagcaggtcaagaatgcttttaacaaactgcaggagaaaggaatatacaaagcaatgtcagagttcgacatttttattaactatattgaagcgtatatgacaatgaagatacggaat

SEQ ID NO: 297890 - DNA, 534 bp, Artificial Sequence
  derived and/or modified sequence
atgcactccagtgctctgctgtgttgtttggtgctactaaccggcgttcgggcttctccagggcagggcacccaaagtgagaactcctgcacccatttccctggcaacctgcctaacatgctgagagacttgagagatgccttcagtagagtcaagactttcttccagatgaaggaccagctggacaatctgctgctcaaggaatcactgctcgaagatttcaagggctacttaggatgccaagctctgtccgagatgattcagttttatctcgaggaggtgatgccacaggccgaaaaccaagaccccgacataaaggcccacgtaaactctctaggtgaaaacttgaaaaccctgcgactccgccttcgccggtgccataggtttctgccttgcgaaaacaagagcaaggcagtggaacaagtcaagaacgcctttaacaaattgcaggagaagggaatttataaggccatgagcgagtttgacatctttatcaactacatcgaagcttacatgaccatgaaaattagaaat

SEQ ID NO: 297891 - DNA, 534 bp, Artificial Sequence
  derived and/or modified sequence
atgcacagcagcgcattgctgtgttgtctggtgctgctgaccggcgtcagggcgagcccaggtcaaggtactcagagcgagaacagctgtacccattttccgggcaacttgccaaatatgttgcgcgatctacgggacgcattttcacgtgttaaaactttttttcaaatgaaagaccaactcgacaacctgttgctcaaagagtctctgcttgaagactttaagggctatctgggttgccaagcgctgagcgagatgatccagttctatcttgaggaggtgatgccgcaagcagaaaaccaggacccggacatcaaagcccatgtgaatagcttaggtgagaacctgaagaccctgcgcttgcgcctgcgtcgctgccatcgattcctcccttgtgagaataagtctaaagcggtagagcaagtgaaaaacgcgtttaacaagctgcaggagaaaggtatttacaaagcgatgagtgaattcgatatcttcatcaactatattgaagcgtacatgaccatgaagatacgcaat

SEQ ID NO: 297892 - DNA, 534 bp, Artificial Sequence
  derived and/or modified sequence
atgcattcatcggcacttctttgttgtttggtgcttcttactggagtccgggccagccctggtcaaggaactcaaagtgagaactcgtgtacccattttccaggcaacctgccaaacatgctccgggatctgcgtgatgcattttcgcgcgtcaagacctttttccagatgaaggaccagcttgacaatcttctcctgaaggaatcgctgttggaggatttcaaaggctacttgggttgtcaggcactcagcgagatgatccaattctacctggaagaagtgatgccccaggcagagaatcaggatccagacattaaagcacacgttaactcgttgggggaaaatctcaagactcttcgccttcgtcttagaagatgccacagattccttccatgcgagaacaaatctaaagccgtggaacaagtgaagaatgcgttcaataagttgcaagaaaagggaatctacaaggcgatgtccgaatttgacatattcatcaactatatcgaagcatacatgactatgaagattcgcaat

SEQ ID NO: 297893 - DNA, 534 bp, Artificial Sequence
  derived and/or modified sequence
atgcattcttccgcccttctgtgctgtcttgtgctgctgaccggagttcgtgctagccctggccaggggacccagagcgagaactcatgcacccacttccctggcaatttgcctaatatgctccgagacctgcgtgatgcttttagtcgcgtgaaaactttttttcaaatgaaggaccagcttgacaacctgcttctcaaggaaagcctgctggaggacttcaagggatacctggggtgtcaggcgcttagcgaaatgattcaattctacctcgaggaagtaatgccgcaggcagagaaccaggatccagatattaaagctcacgtgaacagtctgggggagaatctgaagaccctacgcctgcgcctgcggagatgccaccgttttttgccctgtgagaacaagtccaaagctgtggagcaggtgaagaatgcctttaacaagcttcaggagaagggcatctataaggcaatgtcagaattcgacatcttcatcaattacatcgaggcctacatgaccatgaaaatcaggaac

SEQ ID NO: 297894 - DNA, 534 bp, Artificial Sequence
  derived and/or modified sequence
atgcattccagcgctttgttgtgctgcctcgttctcctgaccggagtccgtgcgagccccgggcaggggacccaaagtgagaattcctgtacccactttcctggcaacctccctaacatgctccgagacttacgcgatgccttctctcgggtaaagactttttttcaaatgaaagaccagctagacaatttacttcttaaggaaagcctgctcgaggacttcaaaggttaccttgggtgtcaggcgctatctgaaatgatccaattttacttggaggaagtcatgccccaggcggagaatcaggacccagatatcaaggctcacgtgaattccttgggggagaatcttaagaccctgcggctgcgcttgagaagatgtcatcggttcctgccttgcgagaacaagagtaaagctgtggagcaagtgaaaaatgccttcaacaaacttcaggagaagggaatctacaaagccatgagtgaattcgatatctttataaactatattgaggcatacatgacaatgaaaatcaggaat

SEQ ID NO: 297895 - DNA, 534 bp, Artificial Sequence
  derived and/or modified sequence
atgcatagcagcgctctgctctgctgcctggtgttgctgaccggcgtgagggcatctccggggcaagggacacagagcgagaattcttgtactcattttcccggcaatctgccaaacatgctccgagacctgcgcgatgcgttctctcgtgtcaagacttttttccaaatgaaagatcagttggacaatctccttttaaaagaatccctgctggaagattttaagggctacctggggtgccaagccctgtctgaaatgattcaattctatctggaagaggtaatgccacaggcggagaatcaggaccccgatatcaaagctcacgtgaactcccttggggaaaatctcaaaactctgcggctaaggttgcgacgttgccatcgcttcctgccctgcgaaaacaaaagtaaagccgtcgaacaggttaaaaacgcgtttaataagctgcaggagaagggtatctataaagccatgagcgaattcgacatttttattaactatatcgaggcgtatatgacgatgaaaatccgcaat

SEQ ID NO: 297896 - DNA, 534 bp, Artificial Sequence
  derived and/or modified sequence
atgcattctagcgctctcctctgttgcctagtgctgcttacgggagtgagagcgtctcctgggcagggcactcagtctgaaaatagctgtacccactttcccgggaaccttcctaatatgttgagggacctgcgggatgcattctctagggtgaagaccttcttccaaatgaaggaccagttagacaacttgctcttgaaagaatcccttcttgaagactttaaaggttaccttggctgccaggccctctccgagatgatacagttctatctggaagaagtgatgccccaggccgaaaatcaggatcccgacatcaaagctcacgttaacagcctgggtgaaaacttgaaaaccctgcgcctcaggctcagacgatgtcacagatttctgccctgtgagaacaagtctaaagccgttgagcaggtcaaaaatgcatttaacaaactccaggagaaaggaatttacaaggcaatgagcgaattcgacatttttatcaattacatcgaggcctatatgaccatgaagatacgcaac

SEQ ID NO: 297897 - DNA, 534 bp, Artificial Sequence
  derived and/or modified sequence
atgcattcaagcgcactcctgtgttgccttgtcctgctgacgggggtgagggcatcccccggtcagggcactcaatcggagaactcttgtacgcatttccccgggaatctcccaaacatgctgcgggacctcagagatgctttctcccgggtcaagaccttttttcaaatgaaggatcaactggataatctgctgttgaaagagtccctgcttgaggactttaagggatatcttggttgtcaggcactttcggagatgatccaattctaccttgaagaagtcatgccccaggcagagaaccaagatcctgacatcaaggcccatgtgaactcgcttggagagaatctcaagactctgcgcttgcgtctgagacgatgtcatcggttcctcccatgtgagaataagtcaaaggcagtggaacaagtgaagaacgcgtttaacaaacttcaggaaaagggaatttacaaggcaatgtcggagttcgacatcttcatcaactatattgaagcatacatgaccatgaagattagaaac

SEQ ID NO: 297898 - DNA, 534 bp, Artificial Sequence
  derived and/or modified sequence
atgcactcgtctgcacttctctgctgtttggtattactgaccggggttcgagcatcccccggacaggggacccagtccgagaactcatgcacacattttcctggtaacctgcccaacatgttacgcgacctgcgcgatgcgttttcaagggtgaagaccttcttccagatgaaggatcagttagacaacctgctcttgaaagaaagtttgctcgaagattttaagggatacctcggctgccaggccttgtcagaaatgattcagttttacctcgaagaggttatgccacaggccgagaaccaagatcccgacataaaagctcacgtaaactcgttaggggaaaacctgaaaacattgcggcttagactaaggagatgccatcggttcctgccatgcgagaacaagagcaaagcggtcgagcaagtcaagaacgcctttaataaacttcaagagaagggtatttataaagctatgagtgagtttgacatattcatcaattacatagaagcgtatatgacaatgaaaatcagaaac

SEQ ID NO: 297899 - DNA, 534 bp, Artificial Sequence
  derived and/or modified sequence
atgcactcaagcgcactcctttgttgcctcgtcctgctgacaggcgtgcgggcttctcccgggcaaggaacacagtctgaaaattcttgtacacactttccaggcaaccttccaaacatgttgagagatctgcgtgacgcttttagcagggtcaaaacttttttccagatgaaagatcagctggataaccttttgctaaaggagtccctactggaagactttaagggctatttaggatgtcaggcactgagtgagatgattcagttttacctggaggaagtgatgcctcaggctgagaatcaagatcccgatataaaggcacatgtaaacagtctcggcgagaacctgaagacactgcgtctgcggctgcggaggtgccatcggttcctaccatgcgaaaataagagtaaggctgtggagcaggtgaagaacgccttcaacaaattgcaggagaagggcatctataaagcgatgtctgaatttgatatctttatcaattatattgaagcttatatgacaatgaaaatacgcaat

SEQ ID NO: 297900 - DNA, 534 bp, Artificial Sequence
  derived and/or modified sequence
atgcattcttctgctttattatgttgtcttgttcttttgacgggagttcgagcatctccaggacaaggaactcaatctgaaaattcatgtacacattttccaggaaatctaccaaacatgttaagggaccttagagatgcatttagtcgagttaaaacattttttcaaatgaaagatcaattagataatttattattgaaagaatcattacttgaagactttaagggatatcttggttgtcaggctttatctgaaatgatacaattttatttagaagaagttatgccacaagctgaaaatcaggatccagatattaaagcacatgttaatagtttaggagagaatttaaaaacacttagattaagattaagaagatgtcatagatttttaccatgtgaaaataaatctaaagctgttgaacaagttaaaaatgcttttaataaattacaagaaaaaggaatttataaagctatgagtgaattcgatatctttatcaattatatagaagcatatatgacaatgaaaattagaaat

SEQ ID NO: 297901 - DNA, 534 bp, Artificial Sequence
  derived and/or modified sequence
atgcattcctcggcactgctttgttgtctcgtgctgctgactggggtccgcgcatcgccaggacagggaacgcagtccgaaaacagctgcacccattttcccggaaatctgccgaatatgcttagagatctgcgagatgctttttcccgcgttaagacttttttccagatgaaggaccaattggacaatcttttgcttaaagagtcgcttctggaggactttaaaggctacctgggatgtcaagccctttcagaaatgattcagttctatctggaagaggtgatgccccaggcagaaaaccaagatcctgatatcaaggcacatgtcaattccctgggtgaaaatctgaaaaccttgaggcttcggcttcggcggtgccacagatttcttccttgcgaaaacaagtcgaaggcggtggaacaggtgaaaaacgcgttcaataagctgcaggagaagggcatctacaaggcaatgtctgaattcgacattttcatcaattacatcgaggcctacatgaccatgaagattagaaac

SEQ ID NO: 297902 - DNA, 534 bp, Artificial Sequence
  derived and/or modified sequence
atgcattcatctgcccttctttgttgcctcgtgctactaacaggtgtgagagcctcgccaggtcaggggacacagtcagagaactcatgtacgcacttccctggtaacctgcctaacatgctgcgtgatctgcgggacgcttttagtagagttaaaacctttttccaaatgaaagatcagctggacaatttgctgctaaaagagagtctgttggaagactttaaaggctatctgggctgccaggcattgtccgagatgattcagttctatctggaggaagtgatgccgcaggccgaaaaccaggatccagatattaaagctcacgtgaatagtctgggtgagaatttaaaaaccctgcggctgagattgaggaggtgtcatcgatttcttccttgcgaaaataaatctaaggctgtggagcaggtcaagaatgcctttaacaagctgcaagaaaaggggatttacaaagctatgagcgagtttgacatttttatcaactacattgaggcctatatgactatgaaaattcgcaat

SEQ ID NO: 297903 - DNA, 534 bp, Artificial Sequence
  derived and/or modified sequence
atgcactcgagcgccctgctttgctgcctcgtgttgctcacaggggtgagagccagccctgggcaggggacccagagtgaaaattcctgtacgcacttccccgggaatctgcccaacatgctgcgggacttaagagatgcctttagtcgcgtcaagaccttcttccaaatgaaagatcagctggacaacctgctgcttaaagaatcactcctcgaagatttcaaagggtatctaggctgccaagccctgtcagagatgattcagttttatctcgaggaagtaatgcctcaggccgagaatcaggacccagatataaaagcgcacgtcaacagcctgggggagaacttgaaaactctgcgcttacgcctaagacgttgtcatcgcttccttccgtgcgagaacaaaagcaaagcagttgagcaggtaaagaacgcattcaacaagttgcaggagaagggcatctataaggcaatgtctgagtttgacatatttatcaactacatcgaggcatatatgaccatgaaaattcgcaac

SEQ ID NO: 297904 - DNA, 534 bp, Artificial Sequence
  derived and/or modified sequence
atgcattcatccgccctgctgtgctgcctggtccttctcacgggagtgcgggcttctcccggccaggggactcagtcagagaattcgtgcacccatttccctggaaacctgccgaacatgctgagggacttgcgcgacgccttttcaagagtgaaaacttttttccaaatgaaagaccaactggacaatctgttgctcaaagaatccctgttggaggacttcaagggatacttgggatgccaggcgctgtcagagatgatccagttttacctcgaagaggtgatgccacaggcggaaaaccaagacccagacatcaaggcacacgtcaatagcctgggggaaaatcttaagaccctgcgcctccgcctgcggcgctgccaccgctttctgccgtgcgaaaacaaatcaaaagctgtggagcaggtgaagaacgcctttaacaagctccaggaaaagggaatctacaaggccatgtcggaattcgacattttcatcaactatattgaggcgtatatgacgatgaaaatccggaac

SEQ ID NO: 297905 - DNA, 534 bp, Artificial Sequence
  derived and/or modified sequence
atgcactcaagtgccctgctgtgctgccttgtgctgctgaccggggtgcgcgctagccctggacaaggcacacaatccgagaacagctgcacacactttcccggtaatctgcccaacatgttaagagaccttagggatgctttttctcgcgtgaagaccttctttcagatgaaagaccagcttgacaatctgctgctgaaagagtctctcttggaagattttaaagggtaccttggttgccaggctctgtctgaaatgatccaattctacctggaggaggtgatgccccaggcggaaaatcaggatcccgacatcaaggcccacgtcaacagtttgggcgagaacctgaagacactgcggcttcgacttcgcagatgtcacagatttctgccgtgtgaaaacaagtcaaaagctgtggaacaggtcaagaacgcatttaacaagctgcaggagaagggtatttataaagctatgagtgagtttgacatctttataaactacatagaggcatacatgactatgaagattcgtaac

SEQ ID NO: 297906 - DNA, 534 bp, Artificial Sequence
  derived and/or modified sequence
atgcactcatctgcactgctgtgctgtctcgtcctgttgacaggcgttagagcgagcccaggacagggaactcagagcgagaattcatgcacacatttcccgggcaacctgccaaacatgctaagagacctgcgggatgccttctctagagttaagactttctttcagatgaaagatcagctggacaaccttttgcttaaggagagtttgctggaggacttcaaaggttatctaggctgtcaagccctctccgaaatgatccagttctatctggaagaggtgatgccacaggcagagaatcaggaccctgatattaaagcgcacgtcaactccttaggagaaaatctgaaaacactccgattgaggctgcgccggtgtcaccggtttctcccatgtgagaacaaatccaaggctgtggaacaagtgaaaaatgcctttaacaagctgcaagagaagggaatctacaaggccatgagcgagtttgacatttttattaattatatcgaggcgtatatgactatgaaaatccgtaat

SEQ ID NO: 297907 - DNA, 534 bp, Artificial Sequence
  derived and/or modified sequence
atgcattcctccgcccttctctgttgcttggtgctcctgactggagtcagggcatcgcctggtcagggcacccaatccgagaattcctgcactcattttcccggcaacctccctaacatgctgcgagatcttcgcgatgcattttcaagagtcaagaccttttttcagatgaaggatcagctcgataaccttctccttaaagaatccctgctggaggactttaagggttacctgggttgtcaggccctctcggaaatgatccagttttatctggaagaagtgatgcctcaagcagaaaaccaggatccagacataaaggcacacgtgaactctctgggcgagaatctgaaaacccttagattgcgccttagaaggtgtcatagattcctgccttgtgagaacaagtccaaagccgtggaacaggtcaagaacgcattcaacaaacttcaagaaaaaggaatctacaaggccatgtcggagtttgacattttcattaactacattgaagcatacatgaccatgaagatccgtaac

SEQ ID NO: 297908 - DNA, 534 bp, Artificial Sequence
  derived and/or modified sequence
atgcactcttccgctctgctgtgctgcctggtcttgctaacgggcgtacgggcctccccgggtcagggcacgcaatctgaaaattcgtgcacccatttccccggcaacctgcccaacatgctccgtgacctgcgtgacgctttttctcgggtgaagaccttcttccagatgaaggaccaattggacaacctcctgcttaaggaaagtctgttggaagatttcaaggggtatctgggatgccaggcactatctgagatgatacagttctacctcgaggaggttatgccgcaggcagagaaccaagaccccgacattaaagcccacgtcaactcgctgggagagaatctaaagacgctgcgcctccgcctgcgcaggtgccaccgattcctgccatgcgagaacaagtccaaggcggttgaacaggtgaaaaacgccttcaataaattgcaggagaaaggcatttacaaggccatgtccgagttcgatattttcatcaattatatcgaggcctatatgaccatgaagatcagaaat

SEQ ID NO: 297909 - DNA, 534 bp, Artificial Sequence
  derived and/or modified sequence
atgcactcttccgccttgctgtgctgccttgtgttactcacaggagtgcgggcatctcccgggcagggcactcagtccgagaacagctgtactcacttccctggcaatctccccaacatgctgagagacctgagggacgctttctcaagggtaaagaccttctttcagatgaaggatcagctggacaacctcctgctgaaggagagcctgctcgaggactttaaaggctacctgggctgccaggctctgtccgagatgattcagttctatttagaagaggttatgcctcaagcggagaatcaggacccagacatcaaagctcacgtcaacagtcttggcgagaatctgaagactctgagactccgcctgcgacggtgtcatcgcttcctgccatgcgaaaataagtcaaaggccgtcgaacaagtaaagaatgcctttaacaagctgcaggagaaaggcatctataaggcaatgtctgaattcgacatatttataaattatattgaggcctacatgacaatgaagatacgcaat

SEQ ID NO: 297910 - DNA, 534 bp, Artificial Sequence
  derived and/or modified sequence
atgcatagctcggcattgctctgttgcctcgtgctgctgaccggggtccgcgcgtcccctggtcaaggaactcaatccgaaaactcctgcactcattttcctggtaacctcccaaacatgctgagggatctgcgcgacgcattttccagggttaagacctttttccagatgaaggatcagctggataatctcctgctgaaggaatcgcttctggaggacttcaagggatacttgggttgccaggcactcagcgaaatgatccagttttacctcgaagaagtcatgccccaagctgagaaccaagaccccgatatcaaggcccatgtcaactcacttggagaaaacctcaagacccttagacttaggttgaggagatgtcacagatttctcccttgtgagaacaagtcaaaggcagtggagcaagtgaaaaatgcttttaacaaactccaagaaaaggggatttacaaagccatgagcgaatttgacattttcatcaattacatcgaagcctacatgactatgaaaatcaggaac

SEQ ID NO: 297911 - DNA, 534 bp, Artificial Sequence
  derived and/or modified sequence
atgcattccagtgccctgctctgctgccttgtcctcctgaccggtgtgcgggcgtcgccgggtcaagggacgcagagcgaaaactcctgtactcactttccgggtaatctgcctaatatgcttcgggacttgagggatgcgttctcccgtgtgaaaaccttctttcaaatgaaagatcaactcgataaccttctcctgaaggaatcattgctggaggatttcaagggatacctgggatgccaggcgctctccgaaatgattcagttctaccttgaagaggttatgccacaggcagaaaatcaagaccccgacatcaaggcccacgtgaattcgctgggagagaatttgaaaaccctgcgcctgcgactgagacgctgccatagattcctgccgtgtgagaacaaatcgaaggccgtggaacaggtgaaaaacgctttcaacaagctgcaggagaaagggatctataaggcgatgtcggaattcgacattttcatcaactacatcgaggcttacatgactatgaaaatccggaac

SEQ ID NO: 297912 - DNA, 534 bp, Artificial Sequence
  derived and/or modified sequence
atgcactcgtcggcgctcctttgctgtctcgttctgctgaccggagtgagagcgtcaccaggacagggcacccaatctgagaactcatgcactcacttcccgggaaatctccccaatatgctgcgcgatctgcgcgacgccttttcgcgcgtcaaaaccttcttccagatgaaggaccaactggataacctgcttttgaaggagtcgctgttggaggacttcaagggctacctgggatgtcaggccctcagcgagatgattcagttttatcttgaagaagtgatgcctcaggccgaaaaccaagaccccgatatcaaggcacatgtgaattcactgggcgaaaatctgaaaaccctcagactgcgactgcggcgctgccatcgctttcttccgtgcgagaacaagtcaaaggccgtggagcaagtcaagaacgccttcaataagctccaggaaaaaggaatttacaaagctatgtccgaattcgacatcttcataaactacatcgaagcatacatgactatgaaaatccggaac

SEQ ID NO: 297913 - DNA, 534 bp, Artificial Sequence
  derived and/or modified sequence
atgcatagttctgccctgctgtgttgtctagtgttgctgacaggagtgcgcgcttctcctggtcaaggcactcaatccgagaattcctgtactcattttcccggcaatctgcctaatatgcttcgggatctacgagacgctttctcgcgggttaagacgttcttccaaatgaaagatcaactagacaatctgctcctcaaggagtcgctgctggaagatttcaaggggtatctgggctgtcaggcacttagtgagatgatccagttctacctggaggaagtaatgccccaagcggaaaatcaggatcccgatatcaaggcacatgtgaacagcctaggagaaaacctcaaaaccctgcggttaagattgcgtcgctgtcacaggtttctaccgtgcgagaataagagtaaggccgtcgagcaagtgaaaaatgcctttaacaagctgcaggaaaaaggaatctataaagccatgtccgagtttgacatcttcatcaactacatcgaggcttatatgaccatgaagattcggaat

SEQ ID NO: 297914 - DNA, 534 bp, Artificial Sequence
  derived and/or modified sequence
atgcacagcagcgctctcctgtgctgtctggttctgctgaccggagtccgcgcatcgccaggtcaaggtactcaaagcgaaaactcttgcacccactttccgggaaacctgcctaacatgctgcgggatctgcgggatgctttctcccgagtaaagacgttcttccaaatgaaagatcagctggacaacctgctcctgaaagagtcgctgctggaggactttaagggatacctgggctgtcaggccctctccgaaatgatccagttctacctcgaagaggtgatgccgcaggccgaaaatcaagacccggacatcaaggcccacgtcaactcactgggagaaaacttgaaaactctgcggctccgcttgaggagatgccaccggtttctcccctgcgaaaacaagtccaaagcggtggagcaggtgaaaaacgccttcaacaagctccaggagaagggaatctacaaagcgatgtcggaattcgacatcttcatcaattacattgaggcctacatgactatgaaaatcaggaat

SEQ ID NO: 297915 - DNA, 534 bp, Artificial Sequence
  derived and/or modified sequence
atgcattcgtctgctttgttgtgttgtctcgtgttgctaaccggggtgagggcatcccctggacagggtacacagtcagagaattcctgcacacatttcccaggaaacctccctaatatgttaagggacctccgagatgctttcagtcgagtgaagaccttttttcaaatgaaagatcagcttgataatctgcttcttaaagaatctctcttggaagatttcaagggatacttgggatgtcaagctctttcagagatgattcagttctatttagaagaggtgatgccacaagcggagaatcaagatccagacattaaggcgcatgtaaactccttgggtgaaaatttaaagactctcaggcttagacttcgaaggtgtcatcgattccttccttgcgagaacaaatccaaagctgttgaacaggtcaagaatgctttcaacaagctccaagagaagggcatttataaggctatgtctgaattcgatatctttatcaactatatcgaagcttatatgacgatgaagattcggaat

SEQ ID NO: 297916 - DNA, 534 bp, Artificial Sequence
  derived and/or modified sequence
atgcattcgtcagctcttctttgttgcctggtgttgttgactggcgtgcgcgcatctccaggacaaggaactcagagcgagaactcatgtacccatttccccggtaatcttccaaatatgctgagagatctgcgtgacgcgttctcaagagtcaagaccttttttcaaatgaaggatcaacttgataacctcttgctgaaggaaagccttttggaagatttcaagggttacctggggtgccaggccttgtcagaaatgatccaattctacctggaggaagtcatgccacaagcggagaaccaggatccggacattaaggctcatgtcaactccctgggagaaaatcttaagactctcagactgcgcctgcggcgttgccacagatttctgccctgtgagaacaagtccaaggccgtggaacaagtgaaaaacgcgttcaataagctgcaggagaaggggatatacaaggcaatgtccgaatttgacattttcattaactacatagaagcatacatgactatgaagatccggaac

SEQ ID NO: 297917 - DNA, 534 bp, Artificial Sequence
  derived and/or modified sequence
atgcattctagcgctctgctctgctgtctcgtgctgttgactggagtccgcgcatccccaggacagggtacccagagcgaaaacagctgcacccacttcccaggaaatcttcccaacatgctgcgtgatctgcgcgatgctttttcccgcgtgaagacttttttccagatgaaggaccaactggataatttgctgcttaaggagtccctcctcgaggactttaagggttatctgggatgtcaagccctgagcgagatgattcagttttacctggaggaggttatgcctcaggctgagaatcaggacccagatatcaaggctcacgtaaattctcttggcgagaatctgaagactctgaggctcaggctcagaagatgtcaccgctttctcccttgcgagaacaaaagtaaggctgtagagcaagtcaaaaatgctttcaacaagttgcaggagaagggaatctacaaagccatgtctgaatttgatatttttattaactacattgaagcttacatgactatgaagataaggaat

SEQ ID NO: 297918 - DNA, 534 bp, Artificial Sequence
  derived and/or modified sequence
atgcattcttcagcgctgctgtgctgccttgtgctgctgaccggtgtgagagcctcccctggacagggaacacaaagtgagaattcatgtactcactttccaggaaatctgccgaacatgctgcgtgacttgcgcgatgcgttttctagagttaaaacctttttccagatgaaagatcaattggacaatctgctcctgaaggaatcacttctggaggactttaaagggtacctgggttgtcaagctttgtccgagatgatccagttttacctcgaggaagtgatgccacaagcagagaaccaggaccccgatattaaggctcacgttaacagtctgggggagaaccttaagaccctgcgtctgcgcctccggaggtgccaccggtttctgccatgcgagaacaaatcaaaggccgttgaacaggttaaaaacgcattcaataaactacaagaaaaggggatttacaaggccatgtccgaattcgacattttcatcaactatattgaggcatacatgactatgaagattcgcaat

SEQ ID NO: 297919 - DNA, 534 bp, Artificial Sequence
  derived and/or modified sequence
atgcattcctccgcgttgctgtgctgcctcgtgttgctcactggcgtgcgcgcgtcgcctggccagggtactcaaagcgaaaattcctgtactcactttccggggaacctcccgaacatgctgcgtgacctccgggacgccttcagccgcgtgaaaaccttcttccagatgaaggatcagttggacaacttgcttttgaaggagtcacttctggaagatttcaagggatacctgggatgccaagccctgtcagaaatgatccagttttacttggaggaagtgatgccacaggcggaaaatcaggatccggacatcaaagcccatgttaactcgctgggggagaatctcaaaactctgagacttcgcctgcggcggtgtcacagattcctgccatgcgagaacaagtcaaaggctgtcgagcaggtgaaaaacgcctttaacaagctgcaagaaaaggggatctacaaggcaatgtcggaattcgatatctttatcaattacatcgaagcatacatgaccatgaagattcggaac

SEQ ID NO: 297920 - DNA, 534 bp, Artificial Sequence
  derived and/or modified sequence
atgcactcatctgccctcctatgttgcttggtgcttcttactggagtacgagcaagccctgggcagggtactcagtccgagaactcatgcacccacttcccaggaaacctccctaacatgctgagagacctccgcgacgcattttcgagagtgaagactttttttcagatgaaggaccagctggacaacctcctactgaaggagtccctactggaagactttaagggctacctaggatgtcaggccctaagcgagatgatccagttctacctggaggaagttatgccacaggcagagaaccaagatccagacatcaaagcacacgtgaacagcctgggggaaaatcttaagaccctacggttgagactgcgcagatgtcaccgattcctcccttgtgaaaataagagcaaggccgtcgagcaggtcaagaacgcattcaataaactgcaggagaaagggatatataaagccatgagtgaattcgacatattcatcaactacatcgaggcttatatgaccatgaaaattagaaat

SEQ ID NO: 297921 - DNA, 534 bp, Artificial Sequence
  derived and/or modified sequence
atgcatagctcggccctgctgtgttgtctcgtcttgctcacgggcgtccgcgctagtcctggacaaggtactcaatctgagaattcgtgcacgcatttccccggtaatttgcctaacatgcttagggacctccgggatgcctttagcagggtgaagactttcttccagatgaaagaccaactcgacaatcttctgctaaaagaatctctgttggaagattttaaaggttacctgggttgccaggctttgtccgaaatgatacagttttacttagaggaagtcatgccccaggccgaaaaccaggaccccgatatcaaggcccacgtgaattcacttggcgagaacctgaagacgcttcgactgcgactgaggcgttgccatcgattccttccttgcgaaaacaagtcaaaggccgtggaacaggtcaagaatgcgtttaacaaactccaagagaaaggtatatataaagctatgtcggaatttgatattttcataaactacattgaagcttacatgacaatgaaaataagaaat

SEQ ID NO: 297922 - DNA, 534 bp, Artificial Sequence
  derived and/or modified sequence
atgcattcgtccgcactcctctgctgcctggtgctcctcactggtgtacgcgcaagccctggccaaggtacccagagcgagaactcctgcactcacttcccgggaaacctcccaaacatgttgcgcgatctgcgggacgctttctccagggtcaagacgttcttccaaatgaaggatcagctcgacaatttgctgctgaaggaatcactgctcgaggactttaagggctacttgggatgccaggctttgtcagagatgatacaattctatcttgaagaagtgatgccccaagcggagaatcaggacccagatatcaaggcccacgtcaacagcctgggagaaaatctgaaaaccctgcggctccgtttgcgcagatgtcatagattcctgccgtgtgaaaacaaatcgaaagcagttgaacaggtgaagaacgccttcaacaagttgcaggagaagggaatttacaaagcgatgtcagaatttgatatctttatcaactacatcgaggcatacatgactatgaaaatccggaat

SEQ ID NO: 297923 - DNA, 534 bp, Artificial Sequence
  derived and/or modified sequence
atgcattcatccgcactgctttgttgtcttgtgctgctcaccggtgtgagagcatcgccagggcagggtacccagtcggaaaactcatgcacccattttcctggaaaccttccaaacatgcttagagatttgcgggacgcattttcgagagttaagactttctttcagatgaaggaccagctggataaccttctgcttaaggaaagcctgctggaggatttcaagggttacctcggatgccaggccctctcggagatgattcagttctacctcgaagaagtcatgccgcaagccgaaaaccaagatcctgatatcaaggctcacgtgaattcgcttggagagaacctgaaaacgctgcggttgcgtttgcgccgctgtcatcggtttcttccatgcgagaataagtccaaggctgtcgaacaggtgaagaatgcattcaacaaactccaggagaaaggaatttacaaagcaatgtcggaatttgatatctttatcaactacattgaggcatacatgactatgaagatacggaac

SEQ ID NO: 297924 - DNA, 534 bp, Artificial Sequence
  derived and/or modified sequence
atgcactcctcggcactcctgtgctgcctggtcctgctcactggtgtccgcgcctcccctggtcaaggaactcagtcggagaattcctgcacccacttcccgggcaatctgccaaatatgctgcgcgacctgcgggatgccttcagcagagtcaagactttcttccagatgaaggaccagctggacaacctgcttctgaaggaatcactcctcgaagatttcaagggatacctcgggtgccaggccctgagcgagatgatccagttctacctggaagaagtcatgccgcaagctgagaaccaggacccagacattaaggctcatgtcaattcgcttggagagaacctcaagacgttgagactgcgtctgagacggtgccatcgcttcctgccgtgcgaaaacaagtcaaaggcggtggaacaggtgaagaacgctttcaacaagctgcaggagaaaggaatctacaaagcgatgagcgagtttgacattttcattaactacatcgaggcatacatgaccatgaagatccgcaac

SEQ ID NO: 297925 - DNA, 534 bp, Artificial Sequence
  derived and/or modified sequence
atgcattcctccgctctgctctgctgtcttgtgcttctgaccggagtgcgtgcctcacctgggcagggcacccaatccgagaactcttgcactcactttccgggaaacctgccaaacatgctgcgcgatctgcgggacgcgttctcgagagttaagactttctttcagatgaaggaccagcttgataatctgctcttgaaagagtcgctgctcgaagatttcaaaggatacctggggtgccaggcactgtcggaaatgatacagttctatttggaagaggtgatgccacaagccgagaaccaagatcctgacatcaaggcccatgtaaactcactgggtgaaaacctcaagacgctgcggctgcgattgcgccggtgtcacagattcctgccctgtgaaaacaaatcgaaggcagtcgaacaggtgaaaaatgctttcaataagctccaagagaaaggaatctacaaggctatgtcagaattcgacatcttcatcaattacattgaggcctacatgaccatgaagattcgcaac

SEQ ID NO: 297926 - DNA, 534 bp, Artificial Sequence
  derived and/or modified sequence
atgcatagctcggcattgctctgctgcctcgtgctcctcaccggagtcagagcatcaccgggacaaggtactcaatcggaaaactcatgtacccattttccaggcaatctgccaaatatgcttagggacctgagagatgccttttcccgcgtcaaaacgtttttccaaatgaaggatcaactggacaatctgctccttaaagagtccctcctcgaagatttcaagggttacctgggatgccaggccctctcggaaatgattcaattctacttggaagaagtgatgcctcaggcggaaaaccaggatccggatatcaaagcacacgtcaacagcctgggggaaaatcttaaaactttgcgcctgcgcctgcgtaggtgccatcggtttctgccgtgtgagaataagtccaaggcggttgaacaggtcaagaatgccttcaacaagctccaagaaaaaggcatctacaaggcaatgtcggagtttgacatcttcattaactacattgaagcgtacatgaccatgaagatccggaac

SEQ ID NO: 297927 - DNA, 534 bp, Artificial Sequence
  derived and/or modified sequence
atgcatagctccgctttgctgtgctgcctggttctgttgactggcgtgcgagccagccctgggcaaggaactcagtctgaaaacagctgtacccattttcctgggaacctgcccaatatgttaagggatctgcgtgacgccttcagccgcgttaagaccttttttcagatgaaggaccagctggacaatctcctgctgaaagagagtctgctggaagactttaaaggctacctgggctgccaggccctgtccgaaatgattcagttctacctggaggaagtgatgccccaagccgagaatcaggatcctgatatcaaggcgcacgtgaattccctaggcgaaaacctcaaaacgttgcggcttcgtttaagacgttgccaccggttcctgccctgtgagaataagtccaaagccgttgaacaggttaaaaacgccttcaacaagctgcaagagaaggggatctacaaagcaatgagtgaattcgatatctttataaattatatcgaagcatacatgaccatgaaaatcagaaat

SEQ ID NO: 297928 - DNA, 534 bp, Artificial Sequence
  derived and/or modified sequence
atgcattcctccgccctgctttgctgtctggtgttgctgacgggagtgagggcaagccctggccaagggacgcagtcggagaactcatgtactcattttcctggaaaccttcctaatatgctcagagatctgcgtgatgcattttcccgggtcaagaccttctttcaaatgaaagatcagctggataaccttctgcttaaggagtctttgctcgaagatttcaagggatatctcggttgtcaagcactcagcgaaatgattcaattctaccttgaagaagttatgccacaagcagaaaaccaggacccagatatcaaagcacatgttaactcgctgggtgaaaatctgaaaaccttgcgccttaggctccggcggtgtcatcggtttctcccttgcgaaaacaaatcaaaggccgtggagcaagtcaagaacgcgttcaataaactgcaggagaagggtatttacaaagccatgtccgagttcgacatcttcatcaattacattgaagcgtacatgaccatgaagatcaggaac

SEQ ID NO: 297929 - DNA, 534 bp, Artificial Sequence
  derived and/or modified sequence
atgcatagctccgctctgctttgttgtcttgtgctgttgacaggggtgagggcttcaccaggccagggtacacaaagtgagaacagttgcacgcatttccctggcaatttgcctaatatgctgagagatctgagagacgcattttctagagtgaagacattctttcagatgaaggatcagctcgacaacttgctgcttaaggagtcccttttagaagacttcaaaggttatctcgggtgccaggcccttagcgagatgattcagttttatttggaggaagtcatgccccaggccgagaatcaggatcctgatatcaaagcacatgtgaatagcctcggcgaaaatttgaaaacactaagactgcgactgagaagatgtcaccgatttcttccatgtgagaacaagtccaaagccgtggaacaagttaagaatgcattcaataagttgcaggaaaaggggatctacaaggccatgtcggaattcgacattttcatcaactatatagaagcctatatgacaatgaagatcagaaac

SEQ ID NO: 297930 - DNA, 534 bp, Artificial Sequence
  derived and/or modified sequence
atgcattcgtctgctctgctgtgctgccttgtccttctgacgggcgtccgagcttccccggggcagggcacccaaagcgagaattcctgcacgcactttccaggtaatcttcccaacatgttaagagatcttcgggatgcttttagcagggtgaaaacctttttccaaatgaaggatcagctggacaatttgctccttaaagaaagccttctcgaggacttcaaaggctatctggggtgtcaggccctgtcagaaatgatacagttctacctggaagaggtgatgccacaggccgagaaccaggaccctgacatcaaagctcatgtgaattccctgggcgagaacctgaagactctccgcttgcggctgaggcggtgccaccggtttctgccttgcgagaataagagtaaagctgtcgagcaagtcaaaaacgcattcaacaagctgcaggagaaaggcatttataaggccatgagtgaattcgacatttttattaactacatcgaagcttacatgacaatgaaaatacgaaac

SEQ ID NO: 297931 - DNA, 534 bp, Artificial Sequence
  derived and/or modified sequence
atgcactcctctgctctcttgtgctgcttagtcctcttaactggggtgcgagctagtccaggacagggaacacaatccgagaactcctgcacacacttcccaggcaatcttcccaacatgctcagggacttgcgggacgccttcagccgggtgaagaccttctttcagatgaaggaccagttagacaatttattactcaaggagtcactccttgaagatttcaaaggctacttaggctgccaggccctgagtgaaatgatccaattttacctggaggaggtaatgccacaggcagaaaaccaagacccggacattaaagcacatgtaaactcccttggcgagaatctgaagacactgcgattacggctgaggaggtgtcacaggttcctgccctgcgagaacaaaagcaaggccgtggagcaggtcaaaaacgcatttaataaacttcaggagaagggaatttataaggcaatgtccgaattcgacatttttattaattacatcgaagcttacatgaccatgaaaatccgcaac

SEQ ID NO: 297932 - DNA, 534 bp, Artificial Sequence
  derived and/or modified sequence
atgcactcttcagctctgctgtgctgccttgtactgctgactggagtacgcgctagccctggccaaggaacacaatccgagaattcttgcacacacttcccaggcaaccttccaaacatgcttcgcgatctgcgcgacgcctttagtcgcgtgaaaaccttcttccaaatgaaggaccagctcgacaacctgcttttgaaggagtccctgctcgaggattttaagggatatctgggatgtcaagccctctcagagatgatccaattttacttggaggaagtaatgccccaagccgaaaaccaagacccggacatcaaagcccacgtcaattcactcggcgaaaatctcaagacattgagactgcgcctgcgcagatgccaccgctttctgccctgcgaaaataagtcaaaagcggtagaacaggtaaagaacgccttcaacaagctgcaggagaaaggcatatacaaggccatgtctgagttcgatatcttcattaactacatcgaagcctacatgactatgaagatccgcaac

SEQ ID NO: 297933 - DNA, 534 bp, Artificial Sequence
  derived and/or modified sequence
atgcattcgtcagcccttctttgttgtctcgttcttctcacgggagtgagagcttcgccaggccaaggtacgcaaagcgaaaattcctgcactcactttcctggtaaccttcctaatatgttgcgtgaccttagggacgccttctcgcgggtgaaaacttttttccagatgaaagaccaactggacaaccttctgttgaaggaatcgctgcttgaggatttcaagggatatcttgggtgtcaggccctgagcgaaatgatccagttttacctcgaagaggtgatgcctcaagcagaaaatcaagatccagacattaaggcacacgtcaactcactcggtgaaaaccttaagaccttgcgccttcggctgcgacgctgtcatagatttcttccttgtgagaataagtccaaggcagtcgagcaggtgaagaacgcgtttaacaaactccaggagaaaggaatctacaaagccatgagcgaatttgatatcttcatcaattacattgaggcatacatgaccatgaaaatcagaaac

SEQ ID NO: 297934 - DNA, 534 bp, Artificial Sequence
  derived and/or modified sequence
atgcactcgagcgcactgctgtgttgcctggtccttctcacgggcgtcagggcctccccgggacagggtacccagtcagagaattcctgcactcatttcccgggtaatctgcctaacatgctgcgggacctcagagatgcgtttagccgcgtcaagaccttcttccaaatgaaggaccaattggataacctgctgttgaaggaatccctcctggaggacttcaaaggttacctgggatgccaggctctctcggagatgatccagttttacctggaggaagtgatgccacaagcagaaaatcaagatccagacatcaaagcccacgtgaatagtctgggagagaacctgaaaacgctgcggctcagattgagacgctgccaccggttcctgccgtgtgaaaacaagtcgaaggcagttgagcaggttaagaacgccttcaacaagctgcaggaaaaaggcatatacaaggcgatgtctgaattcgatatctttatcaactatatcgaggcgtacatgaccatgaagattcggaat

SEQ ID NO: 297935 - DNA, 534 bp, Artificial Sequence
  derived and/or modified sequence
atgcattcctccgccctcctgtgctgcctcgtcttgctcaccggcgtgcgggcatcacctggtcaaggaacgcagtccgaaaacagctgtacccactttcccgggaatctcccgaacatgttgagggacctgagagacgccttctctcgggttaagacgttcttccagatgaaggaccagctggataatctgctgctcaaggagtcgctgctcgaagatttcaaagggtacttggggtgccaggcactgtccgaaatgattcagttctacttggaagaggtgatgcctcaagcggaaaaccaggacccagatatcaaggcgcatgtgaactcgctgggagaaaacctgaaaaccctcagactcaggctgagacggtgccatcggttcctcccgtgcgaaaacaagtcgaaagccgtggaacaggtgaagaatgccttcaacaaacttcaggaaaagggtatctacaaagccatgtcggagttcgatatctttatcaattacatcgaggcctacatgaccatgaaaatccgcaat

SEQ ID NO: 297936 - DNA, 534 bp, Artificial Sequence
  derived and/or modified sequence
atgcactcctccgcactcttgtgctgtctggtgctgcttacgggcgtcagagcatcgcctgggcaaggtactcagtccgagaattcgtgtacgcattttcccggcaatctgcccaacatgcttcgtgacctgcgcgatgcattctcaagggtgaaaaccttttttcaaatgaaggatcaactcgacaatctgctgctgaaggagtccctccttgaggacttcaagggatacttgggctgtcaagcccttagcgaaatgatccagttctacctcgaagaggtgatgcctcaagcagagaatcaggatccagacataaaggctcatgtgaattcgcttggagaaaatctcaaaaccctgaggcttagattgcggaggtgtcatcgatttttgccatgcgaaaacaagagcaaggctgtggagcaagtgaagaatgcatttaacaagctgcaggaaaagggtatctacaaggcaatgtccgaattcgatatcttcatcaattacatcgaagcgtacatgactatgaagattaggaac

SEQ ID NO: 297937 - DNA, 534 bp, Artificial Sequence
  derived and/or modified sequence
atgcattcatccgctctcctgtgttgcttggtgctgctgaccggagtgagggcgtccccgggtcagggaacccaatcagaaaacagttgcacccacttcccgggcaatctgccaaatatgctgcgggatctgagagacgcattctcacgtgtcaagactttcttccaaatgaaagatcagttggataacctgctccttaaagaatcactgctcgaggacttcaagggatacttgggatgccaagcgctgtcagagatgatccagttttacctggaggaggtcatgccgcaggcggagaaccaggaccccgatatcaaggcccacgtgaacagcctgggtgagaatttgaaaactctgcggctccgcctgagaagatgccatcgatttctcccatgcgaaaacaagtcgaaggcagtggagcaggtcaaaaatgcctttaacaagctgcaagaaaagggaatctacaaggccatgagcgagttcgatatcttcatcaattacattgaagcgtacatgactatgaagatccgcaac

SEQ ID NO: 297938 - DNA, 534 bp, Artificial Sequence
  derived and/or modified sequence
atgcacagttcagcccttctgtgctgtctggtactcctgactggcgtccgggccagcccaggccaagggactcagagcgagaattcctgtacccattttcctggtaacctgcctaatatgttgcgggacctccgagacgcattcagtcgggttaagacattcttccagatgaaagatcagctggacaacctactgctgaaggaatccttactagaggactttaaaggctacctcggctgtcaggccctctcagagatgatccagttttatctcgaggaggtgatgccacaggccgaaaatcaggacccagatattaaggcacacgtgaactccctgggggagaatctgaagacactgcgactacgtctgaggagatgtcaccgctttctgccttgtgaaaataagtctaaagcagtggaacaagtgaaaaacgcttttaacaagctgcaggagaagggcatttataaagctatgagcgagtttgacattttcatcaactatattgaagcttacatgactatgaagattcggaat

SEQ ID NO: 297939 - DNA, 534 bp, Artificial Sequence
  derived and/or modified sequence
atgcactcgtcggcactcctgtgttgccttgtgctgctgactggcgtgagagcctctccaggacagggaactcaatcggagaactcgtgtacccacttcccggggaacctcccgaacatgttgcgcgacctccgggacgctttctcccgcgtcaagacgttcttccaaatgaaggatcagctggacaacctcctgctcaaggagagccttcttgaagatttcaagggttacctcggatgccaggccctgtcggagatgatccagttctacctggaggaagtgatgccgcaagccgagaatcaggatccagatatcaaggcccatgtgaactcacttggagagaatctgaaaactctgaggcttcggctgaggagatgccaccgcttcctcccgtgcgagaataagtcaaaggccgtggagcaggtcaaaaatgccttcaataagctccaagaaaagggaatctataaggctatgtccgaattcgacatcttcatcaactacattgaggcttacatgactatgaagatccgaaat

SEQ ID NO: 297940 - DNA, 534 bp, Artificial Sequence
  derived and/or modified sequence
atgcacagctccgccctgctgtgttgcctcgtgctgttgaccggagttagggcctcaccaggccaagggacccaatctgaaaatagctgcactcattttcccggcaatctgcccaacatgctaagggacctaagagatgccttctctcgggtgaaaacctttttccagatgaaggaccaactggacaatttgctgcttaaagaatctctcctcgaagactttaaggggtacctggggtgtcaagccctgtctgaaatgatccagttttatcttgaggaggttatgccacaggctgagaaccaagatcctgatatcaaggcccatgtgaacagcctgggagaaaacctgaaaaccctcaggcttcgattacgacgctgccaccgcttcctgccatgtgaaaacaagagtaaggctgtggagcaagttaagaatgccttcaacaaattacaggagaagggcatctacaaggcgatgtccgagtttgatatttttatcaattacatcgaggcctatatgacaatgaagattcggaac

SEQ ID NO: 297941 - DNA, 534 bp, Artificial Sequence
  derived and/or modified sequence
atgcacagctccgctctgctgtgctgcctcgttctcctgactggagtgagggcgagtcccggccaggggacgcagtcagaaaactcctgcactcacttcccaggtaatctgccaaacatgctgagagatcttagagacgctttctccagggtcaaaacctttttccagatgaaggatcaactcgataatctgcttctgaaagaatctctccttgaggacttcaaaggataccttggctgccaggcactgtctgagatgatacaattttatctggaggaagtgatgcctcaggctgagaatcaggatcccgacatcaaggcgcacgtgaactccttgggcgaaaatctgaaaacactgagactcaggcttcgaagatgccacagattcttgccctgtgagaataaaagtaaagctgtggagcaagtgaagaacgcctttaataagcttcaagaaaaggggatttacaaggctatgagcgaattcgatatcttcattaattacatcgaggcctatatgactatgaagatccggaat

SEQ ID NO: 297942 - DNA, 534 bp, Artificial Sequence
  derived and/or modified sequence
atgcactcgtcggcgctgctgtgctgcctggtgctccttactggagtgcgcgcatcccccggccaaggaactcagagtgagaactcctgcactcacttcccgggcaacctcccgaacatgctgcgggatctgcgggacgccttctcacgcgtaaagaccttcttccaaatgaaggaccagctggacaatctgctcctcaaggaatcactcctggaagatttcaaggggtacctgggctgccaggcgctttcggagatgatccagttctacctcgaggaggtcatgccgcaggcggaaaaccaggatcctgacataaaagctcacgtcaatagcctcggagaaaacctcaagacgctccgactgcggctgcgaagatgtcaccgcttcctgccgtgtgagaacaaatcgaaggcagtggaacaagtcaagaatgccttcaacaagctccaagagaaaggcatttacaaagccatgagcgaatttgatatctttatcaactatatcgaggcttacatgaccatgaagatccgcaat

SEQ ID NO: 297943 - DNA, 534 bp, Artificial Sequence
  derived and/or modified sequence
atgcacagcagcgccctgctgtgctgcctggtgctgctgaccggcgtgcgcgccagccccggccagggcacccagagcgagaacagctgcacccacttccccggcaacctgcccaacatgctgcgcgacctgcgcgacgccttcagccgcgtgaagaccttcttccagatgaaggaccagctggacaacctgctgctgaaggagagcctgctggaggacttcaagggctacctgggctgccaggccctgagcgagatgatccagttctacctggaggaggtgatgccccaggccgagaaccaggaccccgacatcaaggcccacgtgaacagcctgggcgagaacctgaagaccctgcgcctgcgcctgcgccgctgccaccgcttcctgccctgcgagaacaagagcaaggccgtggagcaggtgaagaacgccttcaacaagctgcaggagaagggcatctacaaggccatgagcgagttcgacatcttcatcaactacatcgaggcctacatgaccatgaagatccgcaac

SEQ ID NO: 297944 - DNA, 537 bp, Artificial Sequence
  derived and/or modified sequence
atgcacagcagcgccctgctgtgctgcctggtgctgctgaccggcgtgagagccagccccggccagggcacccagagcgagaacagctgcacccacttccccggcaacctgcccaacatgctgagagacctgagagacgccttcagcagagtgaagaccttcttccagatgaaggaccagctggacaacctgctgctgaaggagagcctgctggaggacttcaagggctacctgggctgccaggccctgagcgagatgatccagttctacctggaggaggtgatgccccaggccgagaaccaggaccccgacatcaaggcccacgtgaacagcctgggcgagaacctgaagaccctgagactgagactgagaagatgccacagattcctgccctgcgagaacaagagcaaggccgtggagcaggtgaagaacgccttcaacaagctgcaggagaagggcatctacaaggccatgagcgagttcgacatcttcatcaactacatcgaggcctacatgaccatgaagatcagaaactag

SEQ ID NO: 297945 - DNA, 537 bp, Artificial Sequence
  derived and/or modified sequence
atgcactcctcagcattactctgttgtcttgtactgttaaccggcgttagggcttcacccggccaggggacacaatccgagaactcctgcacgcatttccctgggaacctccccaatatgcttagggatcttagagacgcattctcccgcgtaaaaactttttttcaaatgaaagaccagctggacaacctgcttctaaaggagagcctcctggaggactttaagggttacctcgggtgtcaggcgctgtcagagatgatccaattctacttagaggaagtgatgcctcaggccgaaaaccaagatcctgacattaaggcacatgtgaacagcctgggggagaacctgaaaactctgcgcctcaggcttagacgctgccacaggtttctgccctgcgagaacaaaagtaaggcggtcgaacaagtgaaaaacgcattcaacaagctacaggagaagggcatttataaggccatgagcgagtttgacatcttcattaattacattgaggcctacatgacaatgaagattcgcaactag

SEQ ID NO: 297946 - DNA, 537 bp, Artificial Sequence
  derived and/or modified sequence
atgcacagcagcgccctgctgtgctgcctggtgctgctgactggagtgcgggccagccctggccagggcacccagagcgagaacagctgcacccacttccctggcaacctgcccaacatgctgcgggacctgagagatgccttcagccgggtgaagaccttcttccagatgaaggaccagctggacaacctgctgctgaaggagagcctgctggaggacttcaagggctacctgggctgccaggccctgtctgagatgatccagttctacctggaggaggtgatgccccaggccgagaaccaggaccctgacatcaaggcccacgtgaacagcctgggggagaacctgaagaccctgcggctgcggctgcggcgctgccaccgcttcctgccctgtgagaacaagagcaaggctgtggagcaggtgaagaatgccttcaacaagctgcaggagaagggcatctacaaggccatgtctgaatttgacatcttcatcaactacatcgaggcctacatgaccatgaagatcagaaattag

SEQ ID NO: 297947 - DNA, 537 bp, Artificial Sequence
  derived and/or modified sequence
atgcacagcagcgccctgctgtgctgcctggtgctgctgaccggcgtgcgggccagcccgggtcagggtacccaatcagagaacagttgcacgcactttcccggcaatctgccaaatatgctaagggacctccgggatgcgttcagccgtgtcaagacattcttccagatgaaagaccaactcgataacctcctgctaaaagagagcctgttggaagatttcaagggatatttgggctgccaggccctgtcagagatgatccagttctacctcgaagaagtcatgccacaagcggagaatcaagatccagatataaaagctcacgtgaacagcctaggagagaacttgaaaacactgcgccttcgtctgcgccggtgtcacagattcctgccctgcgagaacaagtccaaagcggtggagcaggtgaagaacgcctttaacaaactgcaggagaaaggcatctacaaagctatgtcggagttcgatattttcatcaactacattgaagcttatatgacaatgaagatacgcaattag

SEQ ID NO: 297948 - DNA, 537 bp, Artificial Sequence
  derived and/or modified sequence
atgcattcttctgctctactgtgttgcctggtcttactgaccggcgtgagggctagtccaggccaaggtactcaaagcgaaaactcatgcacacactttcctggcaacttgccaaatatgctgcgtgaccttcgggacgcattcagtagagtgaagacattcttccagatgaaagatcagctagacaatttgctccttaaggaaagcctgctggaagacttcaaagggtatctcgggtgccaggcactgtctgagatgatccagttttacctggaggaggtgatgcctcaggcagagaatcaggatcctgacattaaggcacacgtcaattccctcggtgaaaatctaaaaacactgcgactccgcttgagaaggtgccatcgattcctgccatgtgaaaacaagtccaaagccgtagaacaggttaagaacgccttcaataagctgcaggagaagggcatctacaaagctatgagcgaattcgatatattcatcaattatatcgaagcttacatgaccatgaaaattcgaaattag

SEQ ID NO: 297949 - DNA, 1630 bp, Artificial Sequence
  derived and/or modified sequence
acacatcaggggcttgctcttgcaaaaccaaaccacaagacagacttgcaaaagaaggcatgcacagctcagcactgctctgttgcctggtcctcctgactggggtgagggccagcccaggccagggcacccagtctgagaacagctgcacccacttcccaggcaacctgcctaacatgcttcgagatctccgagatgccttcagcagagtgaagactttctttcaaatgaaggatcagctggacaacttgttgttaaaggagtccttgctggaggactttaagggttacctgggttgccaagccttgtctgagatgatccagttttacctggaggaggtgatgccccaagctgagaaccaagacccagacatcaaggcgcatgtgaactccctgggggagaacctgaagaccctcaggctgaggctacggcgctgtcatcgatttcttccctgtgaaaacaagagcaaggccgtggagcaggtgaagaatgcctttaataagctccaagagaaaggcatctacaaagccatgagtgagtttgacatcttcatcaactacatagaagcctacatgacaatgaagatacgaaactgagacatcagggtggcgactctatagactctaggacataaattagaggtctccaaaatcggatctggggctctgggatagctgacccagccccttgagaaaccttattgtacctctcttatagaatatttattacctctgatacctcaacccccatttctatttatttactgagcttctctgtgaacgatttagaaagaagcccaatattataatttttttcaatatttattattttcacctgtttttaagctgtttccatagggtgacacactatggtatttgagtgttttaagataaattataagttacataagggaggaaaaaaaatgttctttggggagccaacagaagcttccattccaagcctgaccacgctttctagctgttgagctgttttccctgacctccctctaatttatcttgtctctgggcttggggcttcctaactgctacaaatactcttaggaagagaaaccagggagcccctttgatgattaattcaccttccagtgtctcggagggattcccctaacctcattccccaaccacttcattcttgaaagctgtggccagcttgttatttataacaacctaaatttggttctaggccgggcgcggtggctcacgcctgtaatcccagcactttgggaggctgaggcgggtggatcacttgaggtcaggagttcctaaccagcctggtcaacatggtgaaaccccgtctctactaaaaatacaaaaattagccgggcatggtggcgcgcacctgtaatcccagctacttgggaggctgaggcaagagaattgcttgaacccaggagatggaagttgcagtgagctgatatcatgcccctgtactccagcctgggtgacagagcaagactctgtctcaaaaaataaaaataaaaataaatttggttctaatagaactcagttttaactagaatttattcaattcctctgggaatgttacattgtttgtctgtcttcatagcagattttaattttgaataaataaatgtatcttattcacatca

SEQ ID NO: 297950 - DNA, 695 bp, Artificial Sequence
  derived and/or modified sequence
gggaaataagagagaaaagaagagtaagaagaaatataagagccaccatgcatagctcagccctcttgtgttgcctggttcttcttacgggagtgcgggcttcgccaggccaagggactcagtccgaaaactcgtgtacccactttcccggaaacctgcctaacatgcttcgggatctcagagatgcgttctcgcgcgtcaagaccttcttccaaatgaaggaccaactcgataacctgcttctcaaagaatcactgcttgaggactttaagggttatcttggttgtcaggcattgtccgagatgatccagttttaccttgaggaagtgatgccgcaagcggaaaaccaggatccagacattaaggcacatgtgaatagccttggagaaaatctcaaaaccctgaggctgcgtctgcgaagatgccacagatttctgccttgtgagaataagtctaaggcagtggagcaggtcaagaacgcattcaacaagctgcaagaaaaaggcatatacaaagccatgtccgaatttgatatctttatcaactacattgaagcatacatgactatgaagattcgcaattgataataggctggagcctcggtggccatgcttcttgccccttgggcctccccccagcccctcctccccttcctgcacccgtacccccgtggtctttgaataaagtctgagtgg

SEQ ID NO: 297951 - DNA, 1629 bp, Artificial Sequence
  derived and/or modified sequence
acacatcaggggcttgctcttgcaaaaccaaaccacaagacagacttgcaaaagaaggcatgcacagctcagcactgctctgttgcctggtcctcctgactggggtgagggccagcccaggccagggcacccagtctgagaacagctgcacccacttcccaggcaacctgcctaacatgcttcgagatctccgagatgccttcagcagagtgaagactttctttcaaatgaaggatcagctggacaacttgttgttaaaggagtccttgctggaggactttaagggttacctgggttgccaagccttgtctgagatgatccagttttacctggaggaggtgatgccccaagctgagaaccaagacccagacatcaaggcgcatgtgaactccctgggggagaacctgaagaccctcaggctgaggctacggcgctgtcatcgatttcttccctgtgaaaacaagagcaaggccgtggagcaggtgaagaatgcctttaataagctccaagagaaaggcatctacaaagccatgagtgagtttgacatcttcatcaactacatagaagcctacatgacaatgaagatacgaaactgagacatcagggtggcgactctatagactctaggacataaattagaggtctccaaaatcggatctggggctctgggatagctgacccagccccttgagaaaccttattgtacctctcttatagaatatttattacctctgatacctcaacccccatttctatttatttactgagcttctctgtgaacgatttagaaagaagcccaatattataatttttttcaatatttattattttcacctgtttttaagctgtttccatagggtgacacactatggtatttgagtgttttaagataaattataagttacataagggaggaaaaaaaatgttctttggggagccaacagaagcttccattccaagcctgaccacgctttctagctgttgagctgttttccctgacctccctctaatttatcttgtctctgggcttggggcttcctaactgctacaaatactcttaggaagagaaaccagggagcccctttgatgattaattcaccttccagtgtctcggagggattcccctaacctcattccccaaccacttcattcttgaaagctgtggccagcttgttatttataacaacctaaatttggttctaggccgggcgcggtggctcacgcctgtaatcccagcactttgggaggctgaggcgggtggatcacttgaggtcaggagttcctaaccagcctggtcaacatggtgaaaccccgtctctactaaaaatacaaaaattagccgggcatggtggcgcgcacctgtaatcccagctacttgggaggctgaggcaagagaattgcttgaacccaggagatggaagttgcagtgagctgatatcatgcccctgtactccagcctgggtgacagagcaagactctgtctcaaaaaataaaaataaaaataaatttggttctaatagaactcagttttaactagaatttattcaattcctctgggaatgttacattgtttgtctgtcttcatagcagattttaattttgaataaataaatgtatcttattcacatc

SEQ ID NO: 297952 - RNA, 695 nt, Artificial Sequence
  derived and/or modified sequence
gggaaauaagagagaaaagaagaguaagaagaaauauaagagccaccaugcauagcucagcccucuuguguugccugguucuucuuacgggagugcgggcuucgccaggccaagggacucaguccgaaaacucguguacccacuuucccggaaaccugccuaacaugcuucgggaucucagagaugcguucucgcgcgucaagaccuucuuccaaaugaaggaccaacucgauaaccugcuucucaaagaaucacugcuugaggacuuuaaggguuaucuugguugucaggcauuguccgagaugauccaguuuuaccuugaggaagugaugccgcaagcggaaaaccaggauccagacauuaaggcacaugugaauagccuuggagaaaaucucaaaacccugaggcugcgucugcgaagaugccacagauuucugccuugugagaauaagucuaaggcaguggagcaggucaagaacgcauucaacaagcugcaagaaaaaggcauauacaaagccauguccgaauuugauaucuuuaucaacuacauugaagcauacaugacuaugaagauucgcaauugauaauaggcuggagccucgguggccaugcuucuugccccuugggccuccccccagccccuccuccccuuccugcacccguacccccguggucuuugaauaaagucugagugg

SEQ ID NO: 297953 - DNA, 69 bp, Artificial Sequence
  derived and/or modified sequence
atgcttaggggtccggggcccgggctgctgctgctggccgtccagctggggacagcggtgccctccacg

SEQ ID NO: 297954 - DNA, 291 bp, Artificial Sequence
  derived and/or modified sequence
atgaccccctgcctggagagcttctgccagagggccaaggactgcaagcagaacatccccctgcccttcctgatccaggactggcccctgtctgagagcaagccccagggccaggacttctggaccccccagcccctgcaggccgccgcccccagccatgagttccagcaggtggccctgcacccagcccggacccggctggccagccggccccagggcggccgcctgatgagcagccgggaggtgggcctgcgggccccccgctgcagctgtgggaagaggaagaggtag

SEQ ID NO: 297955 - protein, 500 aa, Artificial Sequence
  derived and/or modified sequence
MAAAPGLLVWLLVLRLPWRVPGQLDPSTGRRFSEHKLCADDECSMLMYRGEALEDFTGPDCRFVNFKKGDPVYVYYKLARGWPEVWAGSVGRTFGYFPKDLIQVVHEYTKEELQVPTDETDFVCFDGGRDDFHNYNVEELLGFLELYNSAATDSEKAVEKTLQDMEKNPELSKEREPEPEPVEANSEESDSVFSENTEDLQEQFTTQKHHSHANSQANHAQGEQASFESFEEMLQDKLKVPESENNKTSNSSQVSNEQDKIDAYKLLKKEMTLDLKTKFGSTADALVSDDETTRLVTSLEDDFDEELDTEYYAVGKEDEENQEDFDELPLLTFTDGEDMKTPAKSGVEKYPTDKEQNSNEEDKVQLTVPPGIKNDDKNILTTWGDTIFSIVTGGEETRDTMDLESSSSEEEKEDDDDALVPDSKQGKPQSATDYSDPDNVDDGLFIVDIPKTNNDKEVNAEHHIKGKGRGVQESKRGLVQDKTELEDENQEGFKTEPIKL

SEQ ID NO: 297956 - DNA, 1503 bp, Artificial Sequence
  derived and/or modified sequence
atggccgcggccccgggtctgttggtttggctgctcgtgttgaggctgccctggagagtcccaggccaactcgatccaagtactggaaggcgcttctccgagcacaaactgtgcgccgacgacgaatgttctatgctcatgtaccgcggcgaagcactggaagacttcactggtcctgattgccgattcgtcaatttcaaaaaaggagaccccgtgtacgtgtattacaaactcgctcgaggttggccagaggtatgggccgggagcgttgggagaaccttcgggtattttccgaaggatctgatccaggtggtacacgaatacacaaaggaagagttacaggtcccaacagacgagactgactttgtttgttttgacggcgggagagacgactttcataattataacgttgaagaactgctgggctttctcgagctctacaattcagctgcaactgattccgaaaaggccgtggagaaaactctacaagacatggagaagaatcctgagctcagtaaggagcgggaacccgaacctgaacctgtcgaggcaaactctgaagaatcagatagcgtgttttccgaaaacaccgaggacctccaggagcaattcactacacaaaagcaccacagtcatgctaatagtcaggctaatcatgcgcaaggcgaacaagcttcctttgagagttttgaagagatgttacaagataagctgaaagttcctgaatccgagaacaacaagacatccaactcatctcaagtctcaaatgagcaagataagattgacgcctataagttgttaaaaaaagagatgactttggacctgaaaactaagttcggttcaactgcggatgccctggtgagcgacgatgaaacaactcgacttgtcacaagcctcgaggatgattttgatgaagaactcgatactgagtattacgcagtcggcaaagaggacgaagaaaaccaagaagactttgatgaactacccctactgacgttcacagatggcgaggacatgaaaacgccagcaaagtcaggcgtggagaagtaccctaccgataaggagcagaactccaacgaggaggacaaggtgcagctcactgtccctcccgggattaagaatgacgacaagaacatcctcacaacatggggagataccatattttccatcgtgacgggcggagaagagacgcgcgacactatggatttggagtcatcgtctagtgaagaggagaaggaggatgacgatgatgctctggtacctgattctaagcaggggaagcctcaatcagctactgactactctgaccctgataacgttgatgacggtctatttatcgtcgatattccaaagacaaacaatgacaaggaggtcaatgctgaacaccacattaaaggtaagggacgcggtgtacaggaatccaaacgcggcctggtgcaagataagactgaattggaggacgaaaatcaagagggtttcaaaaccgaacctatcaagttgtag

SEQ ID NO: 297957 - DNA, 1503 bp, Artificial Sequence
  derived and/or modified sequence
atggctgctgcccctggcctgctggtgtggctgctggtgctgcggctgccctggagggtgcccggccagctggaccccagcacaggccgccgcttcagcgagcacaagctgtgtgctgatgatgagtgcagcatgctgatgtacagaggagaggccctggaggacttcaccggccctgactgccgctttgtgaacttcaagaagggggaccctgtgtatgtgtactacaagctggcccggggctggccagaggtgtgggccggctctgtgggccgcaccttcggctacttccccaaggacctgatccaggtggtgcatgagtacaccaaggaggagctgcaggtgcccacagatgaaacagactttgtgtgctttgatggcggcagagatgacttccacaactacaacgtggaggagctgctgggcttcctggagctgtacaacagcgctgccacagacagcgagaaggctgtggagaagaccctgcaggacatggagaagaaccctgagctgagcaaggagcgggagcctgagcctgagcctgtggaggccaacagcgaggagagtgacagcgtcttctctgaaaatacagaggacctgcaggagcagttcaccacccagaagcaccacagccacgccaacagccaggccaaccacgcccagggcgagcaggccagctttgagagctttgaggagatgctgcaggacaagctgaaggtgcctgagagcgagaacaacaagaccagcaacagcagccaggtgtccaatgagcaggacaagattgatgcctacaagctgctgaagaaggagatgaccctggacctgaagaccaagtttggcagcacagcagatgccctggtgtctgatgatgagaccacccggctggtgaccagcctggaggatgactttgatgaggagctggacacagagtactatgctgtgggcaaggaggatgaggagaaccaggaggactttgatgagctgcccctgctgaccttcacagatggagaggacatgaagaccccagccaagtctggagtggagaagtaccccacagacaaggagcagaacagcaatgaggaggacaaggtgcagctgactgtgcccccaggcatcaagaatgatgacaagaacatcctgaccacctggggagacaccatcttcagcatcgtgactggaggagaggagacccgggacaccatggacctggagagcagcagcagcgaggaggagaaggaggatgatgatgatgccctggtgcctgacagcaagcagggcaagccccagagcgccacagactacagcgaccctgacaacgtggatgatggcctcttcatcgtggacatccccaagaccaacaatgacaaggaggtgaatgctgagcaccacatcaagggcaagggccggggcgtgcaggagagcaagaggggcctggtgcaggacaagacagagctggaggatgagaaccaggagggcttcaagacagagcccatcaagctgtag

SEQ ID NO: 297958 - DNA, 2026 bp, Artificial Sequence
  derived and/or modified sequence
aacatggctgcggcgcctgggctgctcgtctggctgctcgtgctccggctgccctggcgggtgccgggccagctggaccccagcactggccggcggttctcggagcacaaactctgcgcggacgacgaatgcagcatgttaatgtaccgcggtgaggctcttgaagatttcacaggcccggattgtcgttttgtgaattttaaaaaaggtgatcctgtatatgtttactataaactggcaagaggatggcctgaagtttgggctggaagtgttggacgcacttttggatattttccaaaagatttaatccaggtagttcatgaatataccaaagaagagctacaagttccaacagatgagacggattttgtttgttttgatggaggaagagatgattttcataattataatgtagaagaacttttagggtttttggaactgtacaattctgcagctacagattctgagaaagctgtagaaaaaactttacaggatatggaaaaaaaccctgaattatctaaggaaagggaacctgaacctgaaccagtagaagccaactcagaggaaagtgatagtgtattctcagaaaacactgaggatcttcaggaacagtttacaactcagaagcaccactcccatgcaaacagccaagcaaatcatgctcagggagagcaggcttcatttgaatcttttgaagaaatgctgcaagataaactaaaagtgccagaaagtgaaaacaacaaaaccagcaatagttctcaggtctcaaatgaacaggataagattgatgcctataaacttttgaaaaaagaaatgactctagacttgaaaaccaaatttggctcaacagctgatgcacttgtatctgatgatgagacaaccagactcgttacttcattagaagatgattttgatgaggaattggatactgagtattatgcagttggaaaggaagatgaggagaaccaagaagactttgatgagttgccattacttacctttacagatggggaagatatgaaaactccagcaaagtctggcgttgagaaatatccaacagataaagagcagaattcaaatgaagaggacaaggttcagctaactgtgccccctggcatcaaaaatgatgataaaaatatactaacaacctggggggacactatcttctctattgtcacaggaggtgaagaaacaagagatacgatggatttagagagctctagttcagaggaagaaaaagaagatgatgatgatgcattagtcccagatagcaaacaggggaaaccacagtcagcaacagattatagtgaccctgacaatgtagatgatggtctttttattgtagacattcctaaaacaaataatgacaaagaagtaaacgcagaacatcacattaaaggaaaagggaggggagttcaggaatccaagaggggcctggtacaagataagacagaattagaggatgaaaatcaagaaggctttaaaacagagcccataaaactatgacctctgaggtttcattggaaagaaagtgtactgtgcattatccattacagtaaaggatttcattggcttcaaaatccaaaagtttattttaaaaggtttgttgttagaactaagctgccttggcagtgtgcatttttgagccaaacaattcaaaaatgtcatttcttccctaaataaaaatcaccttttaagctagagcgtccttacaactttgaaatgtgcaataaagaatacctgtgttttagctaatgtagcatatgtaattgcaaaatgatttagaatgtcatgaaaaatatgaacatttcctgtggaaatgctttaagaacatgtatttccattatcctatttttagtgtacaccagctgaatacggagcaatggtgtttataagcgtttttttaaactatctggtcacaaagactgttacgctaaaaatgtttactaaaagatcactaaactatctcccctcttgctgaagttctttgtagtaatagctcataaaaatttgtttattaatattt

SEQ ID NO: 297959 - DNA, 1503 bp, Artificial Sequence
  derived and/or modified sequence
atggccgccgcccccggcctgctggtgtggctgctggtgctgcggctgccctggagggtgcctggtcagctggaccccagcaccgggaggagattctctgagcataagctctgcgcagatgatgagtgtagtatgctgatgtatagaggggaggcattggaggattttacaggtcccgactgccgcttcgtcaacttcaaaaagggggacccggtgtacgtgtactataagctagcccggggctggcccgaggtctgggctggatccgtcggccgcacgttcggctacttcccaaaggacctgatccaagtagtccacgagtacactaaagaggagctgcaagttccaactgacgagaccgacttcgtgtgttttgacggcggcagggacgactttcacaattacaacgttgaagaactgttgggcttcttggagttgtataattccgcggcgaccgattccgaaaaagctgttgagaagactctgcaggacatggagaagaacccagagctaagcaaagaaagagagcctgagcccgagcccgtggaagcaaatagtgaggaaagcgattccgtattctccgaaaatactgaggatctacaggaacagtttacaacccagaagcatcattcacacgcaaatagtcaagccaatcacgcccaaggagaacaggcctcatttgagagttttgaggagatgttgcaggacaaattgaaggtcccagagagtgaaaacaataagactagcaattcctcacaggtttccaatgaacaggataaaatagacgcttataagctgctaaagaaggagatgaccctggacctaaaaaccaaatttgggtccactgcagacgccctcgtctctgacgacgagacgactcgcctggtgacatccctggaggatgattttgacgaggagctggacacagaatattatgcagtagggaaggaagatgaagagaatcaggaggacttcgatgaactgcctctcctcacgtttactgatggtgaggacatgaaaactccggcgaagagtggcgtggagaagtatccgacagacaaggaacagaatagcaacgaggaagataaagtccagctaactgtgcctcctggcatcaagaacgatgataagaatattcttacaacatggggcgacacgatattttccatcgtaactggaggcgaagagacccgggacacaatggacctagagagcagcagctccgaggaggagaaggaggatgatgatgatgctttagtgccagacagcaagcagggcaagccacagtccgctacggattacagcgatcctgacaacgtggatgacgggctgtttattgtggatatcccaaagacaaacaatgacaaggaggttaacgcagaacaccacattaagggcaaaggacgtggagtgcaggagagcaaaaggggcttggtgcaggacaagaccgagcttgaagacgagaatcaggagggcttcaagaccgaaccgatcaaattgtag

SEQ ID NO: 297960 - DNA, 1503 bp, Artificial Sequence
  derived and/or modified sequence
atggccgcagcccctggattgctcgtctggctgctggtgcttaggctgccatggcgggtgcccggacagctggacccctccacagggcgtcgatttagcgaacacaaactctgcgccgacgatgagtgctccatgctaatgtaccggggtgaagctctggaagattttactggcccagattgtcgattcgtcaactttaagaagggcgaccccgtgtacgtatattacaagttagcccgtggatggcctgaagtgtgggccggaagcgtgggcagaacatttggttacttcccaaaggacctgatacaggttgtgcacgaatatacaaaggaagagctgcaggtgccaacagatgagactgactttgtttgttttgacgggggtcgcgatgatttccacaactacaatgtagaggagctccttgggtttctggagctttataactctgccgcaaccgactcagaaaaggcagtggaaaagacccttcaggacatggagaagaaccccgaactaagcaaagagcgggaaccagaacccgaacccgttgaagcaaacagcgaggaatcagactccgtgtttagcgagaacacggaggatctgcaagaacagttcacaacacaaaagcatcactcccatgccaattctcaggcaaaccacgcgcaaggcgaacaggcctctttcgagagttttgaagagatgctgcaggacaagttgaaagtcccagagagcgaaaacaacaaaacctcgaattcaagtcaagtctctaatgaacaagataaaatcgacgcgtataagttgctgaaaaaagaaatgactctcgacctgaagacaaagtttgggtccaccgccgacgctctggtgtctgatgacgagaccacccggttggtcaccagcctcgaggacgattttgacgaggaacttgatacagagtactatgccgtcgggaaggaggatgaagagaatcaagaggattttgatgagttgcccctgttgacattcaccgacggggaggatatgaaaacccctgccaagtccggcgtcgaaaaatatccaaccgacaaggagcagaacagcaatgaagaggataaggtccagcttacggtgccacctggaatcaaaaacgatgacaagaacattcttacaacatggggcgataccatattcagcattgtgacaggcggagaagagaccagggatactatggatttggaaagcagctcctcagaggaagagaaagaagacgatgatgatgcactggtgcctgacagtaagcagggaaagccacagtccgcaaccgattacagtgaccccgataacgttgatgatggtctctttattgtagatatacccaagaccaataacgacaaggaggttaacgccgaacatcacataaaaggaaaggggaggggtgtgcaagagtctaagcgcggtttggtgcaggacaagactgaattggaagatgaaaatcaggaagggttcaaaacagaacccatcaagctgtag

SEQ ID NO: 297961 - DNA, 1503 bp, Artificial Sequence
  derived and/or modified sequence
atggccgccgcccccggcctgctggtgtggctgctggtgctgagactgccctggagagtgcccggccagctggaccccagcaccggcagaagattcagcgagcacaagctgtgcgccgacgacgagtgcagcatgctgatgtacagaggcgaggccctggaggacttcaccggccccgactgcagattcgtgaacttcaagaagggcgaccccgtgtacgtgtactacaagctggccagaggctggcccgaggtgtgggccggcagcgtgggcagaaccttcggctacttccccaaggacctgatccaggtggtgcacgagtacaccaaggaggagctgcaggtgcccaccgacgagaccgacttcgtgtgcttcgacggcggcagagacgacttccacaactacaacgtggaggagctgctgggcttcctggagctgtacaacagcgccgccaccgacagcgagaaggccgtggagaagaccctgcaggacatggagaagaaccccgagctgagcaaggagagagagcccgagcccgagcccgtggaggccaacagcgaggagagcgacagcgtgttcagcgagaacaccgaggacctgcaggagcagttcaccacccagaagcaccacagccacgccaacagccaggccaaccacgcccagggcgagcaggccagcttcgagagcttcgaggagatgctgcaggacaagctgaaggtgcccgagagcgagaacaacaagaccagcaacagcagccaggtgagcaacgagcaggacaagatcgacgcctacaagctgctgaagaaggagatgaccctggacctgaagaccaagttcggcagcaccgccgacgccctggtgagcgacgacgagaccaccagactggtgaccagcctggaggacgacttcgacgaggagctggacaccgagtactacgccgtgggcaaggaggacgaggagaaccaggaggacttcgacgagctgcccctgctgaccttcaccgacggcgaggacatgaagacccccgccaagagcggcgtggagaagtaccccaccgacaaggagcagaacagcaacgaggaggacaaggtgcagctgaccgtgccccccggcatcaagaacgacgacaagaacatcctgaccacctggggcgacaccatcttcagcatcgtgaccggcggcgaggagaccagagacaccatggacctggagagcagcagcagcgaggaggagaaggaggacgacgacgacgccctggtgcccgacagcaagcagggcaagccccagagcgccaccgactacagcgaccccgacaacgtggacgacggcctgttcatcgtggacatccccaagaccaacaacgacaaggaggtgaacgccgagcaccacatcaagggcaagggcagaggcgtgcaggagagcaagagaggcctggtgcaggacaagaccgagctggaggacgagaaccaggagggcttcaagaccgagcccatcaagctgtag

SEQ ID NO: 297962 - DNA, 1182 bp, Artificial Sequence
  derived and/or modified sequence
atggcccaggagaacgccgccttcagccccggccaggaggagccccccagaagaagaggcagacagagatacgtggagaaggacggcagatgcaacgtgcagcagggcaacgtgagagagacctacagatacctgaccgacctgttcaccaccctggtggacctgcagtggagactgagcctgctgttcttcgtgctggcctacgccctgacctggctgttcttcggcgccatctggtggctgatcgcctacggcagaggcgacctggagcacctggaggacaccgcctggaccccctgcgtgaacaacctgaacggcttcgtggccgccttcctgttcagcatcgagaccgagaccaccatcggctacggccacagagtgatcaccgaccagtgccccgagggcatcgtgctgctgctgctgcaggccatcctgggcagcatggtgaacgccttcatggtgggctgcatgttcgtgaagatcagccagcccaacaagagagccgccaccctggtgttcagcagccacgccgtggtgagcctgagagacggcagactgtgcctgatgttcagagtgggcgacctgagaagcagccacatcgtggaggccagcatcagagccaagctgatcagaagcagacagaccctggagggcgagttcatccccctgcaccagaccgacctgagcgtgggcttcgacaccggcgacgacagactgttcctggtgagccccctggtgatcagccacgagatcgacgccgccagccccttctgggaggccagcagaagagccctggagagagacgacttcgagatcgtggtgatcctggagggcatggtggaggccaccggcatgacctgccaggccagaagcagctacctggtggacgaggtgctgtggggccacagattcaccagcgtgctgaccctggaggacggcttctacgaggtggactacgccagcttccacgagaccttcgaggtgcccacccccagctgcagcgccagagagctggccgaggccgccgccagactggacgcccacctgtactggagcatccccagcagactggacgagaaggtggaggaggagggcgccggcgagggcgccggcggcgaggccggcgccgacaaggagcagaacggctgcctgcccccccccgagagcgagagcaaggtgtag

SEQ ID NO: 297963 - DNA, 1182 bp, Artificial Sequence
  derived and/or modified sequence
atggctcaagaaaatgccgcattcagccccgggcaggaagagcccccaaggagacggggtagacaacgatacgttgagaaagacgggcgatgtaacgtgcaacagggcaatgtgcgagaaacttatagatatctgactgatttgttcacgacactcgtggacctccagtggcgactatccctgctgttcttcgtcctggcttacgcccttacgtggttgttcttcggagccatttggtggttaatcgcctatggcaggggcgatctggagcacctcgaagacactgcctggactccttgcgtgaataacctgaatggttttgtagcggcctttttgttcagtatcgaaactgagaccaccatcggatacggccaccgcgtcattacggaccagtgtcctgaggggattgtcctgctcctgctgcaagcaatcctaggttcgatggtgaacgcattcatggtcggctgcatgttcgtgaaaatctcccagccaaacaagcgtgcagctactctggtgttcagctctcacgccgtggttagcttgagggacggccggctctgtcttatgttccgcgtgggagatttgcggagctctcacattgtggaagcctccatccgagcaaagctgatccgttcaaggcagacattagaaggtgaattcattcccctgcaccagacagatttaagtgttggatttgatacaggcgacgatagactcttcctagtctcccctctggtgattagccatgaaatcgacgccgcaagtcctttctgggaagcatccagaagagcactcgaacgggatgattttgagattgtggtgattctcgagggcatggtcgaggccaccggcatgacttgtcaggccaggagttcctatctggttgatgaagttctgtggggccatcgctttacatctgtgctgacgctagaagacggcttttatgaggtggactacgcctcttttcacgagaccttcgaagttcccacaccgagctgtagtgctagagagctagccgaggctgcagcaagactggacgctcatctgtactggtctattcctagtcgccttgacgaaaaagtggaagaagagggagcaggcgaaggtgccggcggtgaagcgggggctgacaaggagcaaaacgggtgcttgcctccaccggaaagcgagtccaaggtatag

SEQ ID NO: 297964 - DNA, 1182 bp, Artificial Sequence
  derived and/or modified sequence
atggcccaggagaatgctgccttcagccctggccaggaggagcccccaagaagaagaggccggcagcgctacgtggagaaggatggccgctgcaatgtgcagcagggcaatgtgcgggagacctaccgctacctgacagacctcttcaccaccctggtggacctgcagtggaggctgagcctgctcttctttgtgctggcctatgccctgacctggctgttctttggagccatctggtggctgattgcctacggccgcggggacctggagcacctggaggacacagcctggaccccctgtgtgaacaacctgaatggatttgtggccgccttcctgttcagcattgaaacagagaccaccatcggctacggccacagggtcatcacagaccagtgcccagagggcatcgtgctgctgctgctgcaggccatcctgggctccatggtgaatgccttcatggtgggctgcatgtttgtgaagatcagccagcccaacaagagagctgccaccctggtgttcagcagccatgctgtggtgtccctgagagatggccgcctgtgcctgatgttccgggtgggggacctgcggagcagccacatcgtggaggccagcatccgggccaagctgatccgcagccggcagaccctggagggggagttcatccccctgcaccagacagacctgtctgtgggctttgacacaggagatgacaggctcttcctggtgagccccctggtgatcagccatgaaattgatgctgccagccccttctgggaggccagccggcgggccctggagagagatgactttgagatcgtggtgatcctggagggcatggtggaggccaccggcatgacctgccaggcccggagcagctacctggtggatgaggtgctgtggggccaccgcttcacctctgtgctgaccctggaggatggcttctatgaggtggactatgccagcttccacgagacctttgaggtgcccacccccagctgcagcgcccgggagctggccgaggccgccgcccggctggatgcccacctgtactggagcatccccagccggctggatgagaaggtggaggaggagggcgctggggagggcgctggaggagaggccggggctgacaaggagcagaatggctgcctgcccccacctgagagcgagagcaaggtgtag

SEQ ID NO: 297965 - DNA, 1182 bp, Artificial Sequence
  derived and/or modified sequence
atggcccaggagaacgccgccttcagccccggccaggaggagcccccgcgtcgtcgcggcagacaaaggtatgtcgagaaggatgggcgatgcaacgtgcagcaagggaatgtccgcgaaacgtacagatacctgaccgatctgtttaccacattggtagatcttcagtggaggctgtctctgctcttttttgtacttgcatacgctttgacttggctcttctttggtgctatatggtggctcatcgcctatggcaggggtgacttggaacaccttgaggacacggcgtggacaccgtgtgttaacaatctgaatgggttcgtggctgcctttctgttttcgatcgagacggaaacgactatcggctatggacaccgcgtgattactgaccagtgcccggaggggattgtgctcttgctgttacaggctattctgggatctatggttaacgcattcatggtgggatgcatgttcgtgaaaattagtcagcctaacaagcgagctgcaacattggtctttagtagtcatgctgtcgtctccctccgcgatggccgactgtgcctgatgttccgggtgggggatctgcgctcctcccatatcgtagaagccagtatcagagccaagctgatcaggtccagacagaccttggaaggtgaattcatacctttgcatcagactgatctctcagtcggcttcgacacaggagatgatagactgttcttagtgagcccactggtgatcagccacgaaatagatgcagcatcccccttctgggaggccagccgccgggccctcgagcgcgatgattttgagattgtggtgatccttgaggggatggttgaagcgacagggatgacctgccaggccagaagctcctatctcgtggacgaagtgctgtgggggcatcggttcacaagtgtgctgaccctggaggacggcttttatgaagtggactatgcctcatttcatgagaccttcgaggtgcccaccccaagttgctccgctcgcgaactggctgaggctgccgctcggctggacgcacatctgtactggtccatcccatctaggctcgacgagaaggttgaagaagagggtgcaggagagggcgcagggggggaggctggcgctgataaggagcaaaacggatgtcttcctccccccgagagtgagtcaaaagtgtag

SEQ ID NO: 297966 - DNA, 4170 bp, Artificial Sequence
  derived and/or modified sequence
acatttaggagaaacagcggtgtctgcggctcccacccttcggggggcccgtggggggggcggtgtcaggggcatggacgccaccccccaggggtctctgctgccggctactctcctctccacgtgctcccctccaggacccccgacgccgcctaggcgcccagcgacgcgcggcaggtggcagcagctcgggcccccgccgcactccaggcgcccgcagcgctcgccctgacgcggccgccatggcgcaggagaacgcggccttctcgcccgggcaggaggagccgccgcggcgccgcggccgccagcgctacgtggagaaggatggccggtgcaacgtgcagcagggcaacgtgcgcgagacataccgctacctgacggacctgttcaccacgctggtggacctgcagtggcgcctcagcctgttgttcttcgtcctggcctacgcgctcacctggctcttcttcggcgccatctggtggctgatcgcctacggccgcggcgacctggagcacctggaggacaccgcgtggacgccgtgcgtcaacaacctcaacggcttcgtggccgccttcctcttctccatcgagaccgagaccaccatcggctacgggcaccgcgtcatcaccgaccagtgccccgagggcatcgtgctgctgctgctgcaggccatcctgggctccatggtgaacgccttcatggtgggctgcatgttcgtcaagatctcgcagcccaacaagcgcgcagccacgctcgtcttctcctcgcacgccgtggtgtcgctgcgcgacgggcgcctctgcctcatgttccgcgtgggcgacttgcgctcctcacacatagtggaggcctccatccgcgccaagctcatccgctcgcgccagacgctggagggcgagttcatcccgctgcaccagaccgacctcagcgtgggcttcgacacgggagacgaccgcctcttcctcgtctcgccgctggttatcagccacgagatcgacgccgccagccccttctgggaggcgtcgcgccgtgccctcgagagggacgacttcgagatcgtcgttatcctcgagggcatggtggaagccacgggaatgacatgccaagctcggagctcctacctggtagacgaggtgctgtggggccaccgcttcacgtcagtgctgactctggaggacggcttctacgaagtggactatgccagctttcacgagacttttgaggtgcccacaccttcgtgcagtgctcgagagctggcagaggctgccgcccgccttgatgcccatctctactggtccatccccagccggctggatgagaaggtggaggaggagggggcgggggagggggcgggtggggaagctggggctgacaaggagcagaatggctgcctgccacccccagagagtgagtccaaggtgtgaccagcttcctccagacccctgtggcagaccgggggccagacacagatacatggggaactgcatatcggaggtggtggaggaggaggaggaggaggaaggcaaagcccctggaaatgtgctaaagttggaaagtccccgtcccccagaacctcaagtctagaaaccagtatggaagggaggggtcctgatttcagggaaatggagggtggggccgggtgaaaatgccagtctgtgtttgaccttcacatttgttcatgagtggatggatggacagaatgatggacttttgggggttggatgggaagatggtagcagataaagacagctgacagatacatagatggaccagtagacaactggtccactcagggctgccactaacctgtagaacacccctgtgcaaattttaaaaaggaacccttttcctccagacagatacagccccaaaccagggtgcatggcttggggagcagagtataggatggattgcagtccccagtcacctcttctgccagcctccccacatatggcacaactgtctaatgacacggtaggccaagctgaagtgaaggagaaaggagccggaccaagatgggcacatgaggagggtgccctcctagctccaccctcaccaggatgaaggcgtgcaaggggctcagcaaggtgtgaatgaccttagtccgcaagttcagggaagcaggcagagcggggaggtgcctgagctggggcctggagaggggcctgggaaaggaaaaccagggatagctattttcttacagtggagtgagatcttacaggtatcaggcacaggcaggaagagagagagagaggttctggggaggaagggccaggagagagatctagaaagtgggttcactagagctgggaaacagggagcccctaggaaagcagtgtgtccttggggcacagtcattcacatcactgattgggtgccatgtggagtggacattcaaaaacctggttcctgtcctcaaaataaggggcacctgggaaaacagaggaatctacctgtggtgactgaacgagggataattcaaactgacaacctgtgcagtcccgtggagggtaggggagtgtgggtgatcagaaggctggggccagtgtaaggcatagggaatatgtaagtcaggagttagaaatctccagtgtgcgttggaatcacctggagggcttggtaaaacacagatttttgggctccactccaagggtttctgacccaagaggtggggaccaaaaccatgcattcctaagaagtccccaggtcatgctgctgttgctggactgaggaccacactttgagaacctgtgctctaagtgaatacttggaagtcgtttcaggacatggggcatagaaactgaggagtagctgagaggaagatgaagagaagctgagaagaagctgaggatcctcacaggagcagacagagaaatgtgaagggtggggttttatgtgtgggaaagggacccgaagcccaggctgaagagtttaactttgggcccagaaactcaaccatcaatggaaacagggcagtgacaagtggagggggtgtctggaagctgagcaggcccgacagagagatgaagccatcagaaggacttgagggggctcctggggaggtcggggggaggtggagcaggaagagttttaggggcaaaggacagaaccccttgtaggactggaggcaagattgaatgtgggagaaaatcggagagaagcgataggagttagaacatctggatgtgtctgcagcctgctgtcagcccaattgggccagggggtcccaaagacgcatattctcaccccacctccacctgcttcctgatcacatcccagtcaccagcggcagcttcctggatagtgagggagaacaactgcaagttgagagaggcagaggggtggaagggacctgaagctggcctggagaaaagcataggcccaggagagcctgccctgggacagcgcctgtctcccacacagcagcactggcccagcaaggacctcctcccttggccctggccacatcccactcctgccctttcataagccccctggggaaagcactccagtcttctctgttccaggctgggcagatagggtcctatggggcacagccagggtcctatgggcatagccagggccctatgggtcctctggaagcaagaaagggggccatggaagcagcccagacagctggggttcactcagagaggacccaagtcccagtcccttcctttcagtcaaaacacggatatctttgcctcaggtcacagggccactggggccctgtcatcaaagatgagattcctgaagcctggcattgactggtcccctaagaacagatgttgggatggagaatggggattcatttgggtttcagtaaaacaggggggtctggacaagagcgggtgggctacttggtatccacacacacgcactcacacaggagccaacccattgcagctgaacaagcagagaaactcagtctggaaaggcccctcctgcctgctgaagtcactgagaccctgccacacctctcctcgccactgtcaccactcagggcaccactgtacagtgcaacaagtcaggagacctaggtcctactcctgacacttgctaattagctctatgactctgggcaaatcgcatatctgggcctcagtttcctcatctgtaaaaatgacagcaaactcgtaatgctcaataaatgtttaaataacaactgaa

SEQ ID NO: 297967 - DNA, 1182 bp, Artificial Sequence
  derived and/or modified sequence
atggctcaagagaacgccgcattttcaccgggtcaggaggagcccccaaggcggaggggccgtcaacggtatgtggagaaagacggccgatgcaatgtccaacagggcaacgtgcgggagacctacaggtacttaactgacctttttacgactctcgtggatctgcaatggcggctatctctgcttttcttcgtgctggcctacgcactcacatggcttttctttggcgcaatctggtggttgatcgcatatggtagaggggatctggaacacctggaggacactgcatggacgccatgtgtcaataatcttaacgggtttgtggccgcatttctgttctctatcgaaacagagactactatcggatacggccatcgagttattaccgatcagtgcccggaggggattgtgctactgctactgcaggccattttgggatctatggtcaatgccttcatggtgggctgcatgttcgttaagatctcacagcctaacaagcgagcggcaacattagtgtttagcagtcacgccgtcgtgagtctgagagacggcagactatgtctgatgttcagggtcggagacctcagatcctcccacatcgtcgaggcaagtataagggcaaagctgattagatccaggcagaccctggaaggtgaatttatccctctgcatcagaccgatctatccgtgggcttcgacacaggagatgatcgcctgtttctggtgtcgccccttgtgatctcacacgaaattgatgccgcatctccattttgggaggcgtcacggagggctctggagcgggacgatttcgagatagtcgtcatactggaagggatggtcgaagcaactggtatgacctgtcaagcgagaagcagttatctggtggacgaggtgctttgggggcacagatttacaagtgtgctgactttagaagatggtttttacgaggttgactatgcttccttccatgaaacgttcgaggtgccgacccctagctgttctgccagagaactagccgaggcggctgcacgcctggacgctcacctttattggagcatccctagtagactagatgagaaggtcgaggaagagggcgcaggagagggggcaggaggagaggccggagccgacaaagagcagaatgggtgtttacctcctccagagtcagagagtaaggtgtag

SEQ ID NO: 297968 - DNA, 2496 bp, Artificial Sequence
  derived and/or modified sequence
aagaaaccttggaggaagaacggcattaaagatcaaaagcatgatgactcctgatgaaaacatcaccaaatgatgaacccacgagcaaaaagggatttctacttggcggcacctgacttgctggatcctaaatctgccgctcagaactccaaaccgaggctctcgttttccacgaaacccacagtgcttgcttcccgggtggagagtgacacgaccattaatgttatgaaatggaagacggtctccacgatattcctggtggttgtcctctatctgatcatcggagccaccgtgttcaaagcattggagcagcctcatgagatttcacagaggaccaccattgtgatccagaagcaaacattcatatcccaacattcctgtgtcaattcgacggagctggatgaactcattcaggatttggaaacatctcaccacgcacagaaggcggcaaaatattctgtatcatctatgccttactgggaattcccctctttggttttctcttggctggagttggagatcagctaggcaccatatttggaaaaggaattgccaaagtggaagatacgtttattaagtggaatgttagtcagaccaagattcgcatcatctcaacaatcatatttatactatttggctgtgtactctttgtggctctgcctgcgatcatattcaaacacatagaaggctggagtgccctggacgccatttattttgtggttatcactctaacaactattggatttggtgactacgttgcaggtggatccgatattgaatatctggacttctataagcctgtcgtgtggttctggatccttgtagggcttgcttactttgctgctgtcctgagcatgattggagattggctccgagtgatatctaaaaagacaaaagaagaggtgggagagttcagagcacacgctgctgagtggacagccaacgtcacagccgaattcaaagaaaccaggaggcgactgagtgtggagatttatgacaagttccagcgggccacctccatcaagcggaagctctcggcagaactggctggaaaccacaatcaggagctgactccttgtaggaggaccctgtcagtgaaccacctgaccagcgagagggatgtcttgcctcccttactgaagactgagagtatctatctgaatggtttgacgccacactgtgctggtgaagagattgctgtgattgagaacatcaaatagccctctctttaaataaccttaggcatagccataggtgaggacttctctatgctctttatgactgttgctggtagcattttttaaattgtgcatgagctcaaagggggaacaaaatagatacacccatcatggtcatctatcatcaagagaatttggaattctgagccagcactttctttctgatgatgcttgttgaacggtccactttctttgatgagtggaatgacaagcaatgtctgatgcctttttgtgcccagactgttttcctctctctttccctaatgtgccataaggcctcagaatgaatgagaattgtttctggtaacaatgtagctttgagggatcagttcttaacttttcagggtctacctaactgagcctagatatggaccatttatggatgacaacaattttttttttgtaaatgacaagaaattcttatgcagccttttacctaagaaattttctgtcagtgccttatcttatgaagaaacagaacctctctagctaatgtgtggtttctccttccctgcccccacccctaggctcacctctgcagtcttttaccccagttctcccatttgaataccataccttgctggaaacagtgtgtaaaatgactgaagtgatgatgcccgaagatgaaatagatgccaaattagatggacattgaagcaacactcagcgttgcctagcgttaaaggcactgcagagaaatgaggtgcagaggtggcccctctgagtatttatttgactcaggtaccagtggtacatatatacagtgtaattatgaccaggctggtaaaattggctgctcgcaaacaatccccttttttcctggcagtatttggaatttatcatttattaataactatacatttttaaaatgcagaaagaaaataatttccctaaatataattgcaaactgatttcttttacttttttgtgtgtgggggtgggagctgtatctgaataagtggcattcagattagggtcttgaaaaataaacccagaatctttaaaagaagcaaataaactaatagacgcttattttccaaaatttaaatttaagctagaaatgtaaatattcaattaatttgttaaaagtacttttataaagttaaaaaaaatccaaccaaaattttagaaagtcaggctcttttagaaagaaagctacacccatttcctcaaataactgttccgaaaatttatatggtggaatgcgccatgtataaactgtgaattgtattgacaaataaagtttgtaattaaagtc

SEQ ID NO: 297969 - DNA, 961 bp, Artificial Sequence
  derived and/or modified sequence
accttgtaaaacaaagccggggaaaatgcctgcccgtgcagctcggagcgcgcagcccgtctctgaataagaagtgagtacaatggcgtgtttgtaaaaaaaagcttcaagtccgtctttttcaaaaaacattttgaatgctgcatgcctcatgcttcccagcgcctcgcgggagagacccggctatagagcaggagtggcggcacctgacttgctggatcctaaatctgccgctcagaactccaaaccgaggctctcgttttccacgaaacccacagtgcttgcttcccgggtggagagtgacacgaccattaatgttatgaaatggaagacggtctccacgatattcctggtggttgtcctctatctgatcatcggagccaccgtgttcaaagcattggagcagcctcatgagatttcacagaggaccaccattgtgatccagaagcaaacattcatatcccaacattcctgtgtcaattcgacggagctggatgaactcattcaggatttggaaacatctcaccacgcacagaaggcggcaaaatattctgtatcatctatgccttactgggaattcccctctttggttttctcttggctggagttggagatcagctaggcaccatatttggaaaaggaattgccaaagtggaagatacgtttattaagtggaatgttagtcagaccaagattcgcatcatctcaacaatcatatttatactatttggctgtgtactctttgtggctctgcctgcgatcatattcaaacacatagaaggctggagtgccctggacgccatttattttgtggttatcactctaacaactattggatttggtgactacgttgcaggtggatccgatattgaatatctggacttctataagcctgtcgtgtggttctggatccttgtagggcttgcttactttgctgctgtcctgagcatgattggagatt

SEQ ID NO: 297970 - DNA, 1883 bp, Artificial Sequence
  derived and/or modified sequence
aacattcacacacaaaaaggaaacagtatgggacgatggcttgttagtacaagtgactctgttttggaaattacggacaagaaaccttggaggaagaacggcattaaagatcaaaagcatgatgactcctgatgaaaacatcaccaaatgatgaacccacgagcaaaaagggatttctacttggcggcacctgacttgctggatcctaaatctgccgctcagaactccaaaccgaggctctcgttttccacgaaacccacagtgcttgcttcccgggtggagagtgacacgaccattaatgttatgaaatggaagacggtctccacgatattcctggtggttgtcctctatctgatcatcggagccaccgtgttcaaagcattggagcagcctcatgagatttcacagaggaccaccattgtgatccagaagcaaacattcatatcccaacattcctgtgtcaattcgacggagctggatgaactcattcaggatttggaaacatctcaccacgcacagaaggcggcaaaatattctgtatcatctatgccttactgggaattcccctctttggttttctcttggctggagttggagatcagctaggcaccatatttggaaaaggaattgccaaagtggaagatacgtttattaagtggaatgttagtcagaccaagattcgcatcatctcaacaatcatatttatactatttggctgtgtactctttgtggctctgcctgcgatcatattcaaacacatagaaggctggagtgccctggacgccatttattttgtggttatcactctaacaactattggatttggtgactacgttgcaggtggatccgatattgaatatctggacttctataagcctgtcgtgtggttctggatccttgtagggcttgcttactttgctgctgtcctgagcatgattggagattggctccgagtgatatctaaaaagacaaaagaagaggtgggagagttcagagcacacgctgctgagtggacagccaacgtcacagccgaattcaaagaaaccaggaggcgactgagtgtggagatttatgacaagttccagcgggccacctccatcaagcggaagctctcggcagaactggctggaaaccacaatcaggagctgactccttgtaggaggaccctgtcagtgaaccacctgaccagcgagagggatgtcttgcctcccttactgaagactgagagtatctatctgaatggtttgacgccacactgtgctggtgaagagattgctgtgattgagaacatcaaatagccctctctttaaataaccttaggcatagccataggctcacctctgcagtcttttaccccagttctcccatttgaataccataccttgctggaaacagtgtgtaaaatgactgaagtgatgatgcccgaagatgaaatagatgccaaattagatggacattgaagcaacactcagcgttgcctagcgttaaaggcactgcagagaaatgaggtgcagaggtggcccctctgagtatttatttgactcaggtaccagtggtacatatatacagtgtaattatgaccaggctggtaaaattggctgctcgcaaacaatccccttttttcctggcagtatttggaatttatcatttattaataactatacatttttaaaggcagaagaagaaaatctatctatctatctatctatctatctatctatctatctatctatctatctaaatgacctgacagaagaaaactgttaaaaatggatattattggaggggatttaaaacagtgggtgtgaattatcattctgatggaaagaaaatagcaaaacaatgtgttacaagtatttgctaataaacagtatactgccagc

SEQ ID NO: 297971 - protein, 138 aa, Artificial Sequence
  derived and/or modified sequence
MNSLVSWQLLLFLCATHFGEPLEKVASVGNSRPTGQQLESLGLLAPGEQSLPCTERKPAATARLSRRGTSLSPPPESSGSPQQPGLSAPHSRQIPAPQGAVLVQREKDLPNYNWNSFGLRFGKREAAPGNHGRSAGRG

SEQ ID NO: 297972 - DNA, 417 bp, Artificial Sequence
  derived and/or modified sequence
atgaacagcctggtgagctggcagctgctgctgttcctgtgcgccacccacttcggcgagcccctggagaaggtggccagcgtgggcaacagcagacccaccggccagcagctggagagcctgggcctgctggcccccggcgagcagagcctgccctgcaccgagagaaagcccgccgccaccgccagactgagcagaagaggcaccagcctgagccccccccccgagagcagcggcagcccccagcagcccggcctgagcgccccccacagcagacagatccccgccccccagggcgccgtgctggtgcagagagagaaggacctgcccaactacaactggaacagcttcggcctgagattcggcaagagagaggccgcccccggcaaccacggcagaagcgccggcagaggctag

SEQ ID NO: 297973 - DNA, 417 bp, Artificial Sequence
  derived and/or modified sequence
atgaattcgctggtgtcctggcagctcctcctctttctgtgtgctacccatttcggagaaccgttggaaaaagtggcaagtgtggggaattcaaggcctactgggcagcaacttgaatccctggggctgctggcccccggagagcagagccttccttgtaccgagcgaaagccagccgctacagcacggctaagccgtcgcggtacatcattatctccacccccagagagttccggttctccccagcagcctggcctctcggccccacattcacgccaaattcccgctccccaaggggctgtcttggtgcaaagggaaaaagatctccctaactataactggaacagctttggtctgagatttggaaagcgcgaagcagcccctggaaatcatggtagaagtgctgggagaggatag

SEQ ID NO: 297974 - DNA, 417 bp, Artificial Sequence
  derived and/or modified sequence
atgaacagcctggtgtcctggcagctgctgctcttcctgtgtgccacccactttggagagcccctggagaaggtggcctctgtgggcaacagccggcccaccggccagcagctggagagcctgggcctgctggcccctggagagcagagcctgccctgcacagagaggaagccagctgccacagcccggctgagccggcggggcaccagcctgagccccccacctgagagcagcggcagcccccagcagcccggcctgagcgccccccacagccggcagatcccagccccccagggcgctgtgctggtgcagcgggagaaggacctgcccaactacaactggaacagctttggcctgcgctttgggaagcgggaggccgcccctggcaaccacggccgctctgctggccggggctag

SEQ ID NO: 297975 - DNA, 709 bp, Artificial Sequence
  derived and/or modified sequence
ctcttgagaccgggagcccagctgcccaccctctggacattcacccagccaggtggtctcgtcacctcagaggctccgccagactcctgcccaggccaggactgaggcaagcctcaaggcacttctaggacctgcctcttctcaccaagatgaactcactggtttcttggcagctactgcttttcctctgtgccacccactttggggagccattagaaaaggtggcctctgtggggaattctagacccacaggccagcagctagaatccctgggcctcctggcccccggggagcagagcctgccgtgcaccgagaggaagccagctgctactgccaggctgagccgtcgggggacctcgctgtccccgccccccgagagctccgggagcccccagcagccgggcctgtccgccccccacagccgccagatccccgcaccccagggcgcggtgctggtgcagcgggagaaggacctgccgaactacaactggaactccttcggcctgcgcttcggcaagcgggaggcggcaccagggaaccacggcagaagcgctgggcggggctgagggcgcaggtgcggggcagtgaacttcagaccccaaaggagtcagagcatgcggggcgggggcggggggcggggacgtagggctaagggagggggcgctggagcttccaacccgaggcaataaaagaaatgttgcgtaactca

SEQ ID NO: 297976 - DNA, 417 bp, Artificial Sequence
  derived and/or modified sequence
atgaacagcctggtgagctggcagctgctgctgttcctgtgcgccactcactttggcgagccgcttgagaaggtggcctcagtgggaaactcccgcccaacaggccagcagctagaaagtctggggctcctggcacctggagaacaatctctgccttgcaccgaaaggaagcctgcggcgactgctcgcctctcacggcggggaaccagcttaagccccccaccggaatccagcggtagcccccaacagcccggactctctgctcctcactcacgacagatccccgctccccagggagccgtactggtgcaaagggagaaagatctccctaattataactggaattccttcggcctgcgctttgggaaacgggaagcggcccctggaaaccacggtagaagtgccggccggggttag

SEQ ID NO: 297977 - DNA, 417 bp, Artificial Sequence
  derived and/or modified sequence
atgaattcgctggtatcttggcagctgctgctgtttttgtgcgcaacacacttcggcgaacccctggagaaggtagctagcgtggggaactcaagacccactggccaacagcttgagtctctggggctgctcgctccaggtgagcagtcccttccctgtacagagcggaaacctgcagcaacagctcgcctatcacgtcgcggtacgtctctgtctcctccccctgaaagttccggaagtccacagcagcccggattatcggccccacattcccgtcaaatccccgcaccccaaggcgctgtgctcgtccagcgggagaaagacctgccaaactataattggaactcctttggtcttagatttggaaagagagaagcggcacctggaaaccatggacggagcgcaggccgaggttag

SEQ ID NO: 297978 - DNA, 423 bp, Artificial Sequence
  derived and/or modified sequence
atgtggcccttcagactgagatgccccatctacttcaagaccagactgctgtacagcagcagccaggacggcttcctgagcagcagcaccaactactacaaccacagaacctaccccggcctggtgaactggctgttcgtgctgaccgagcccgagctgaccggcgagctgggcgacgacgacagaaagggcatgcacaccggcggcatcatcagatggctgggcagacccagcagccagctgaagcccatcttccacgccgaggagagaagagtgccccccccccccgagagactggtgggcagagccagccccagagagcaggccaccgtgttcaagagaatctgcgcccccctgcacgccgaggtgttctgcagagccggcctgtgcgcctgccaccccgactgcaccgccgccggctag

SEQ ID NO: 297979 - DNA, 288 bp, Artificial Sequence
  derived and/or modified sequence
atgagctgtcagcagaatcagcaacaatgccagccgctaccaaaatgcccaagccctaagtgcccaccgaagtcatctgcccagtgcctgcctccagctagctcatgttgcgcccctaggccaggctgctgtgggggacccagctccgaagggggatgttgcctctcccaccaccgctgttgcaggagccacagatgccgacgccagtcatccaactcatgtgacagagggagcgggcaacaggacggagccagcgattgtggttatggcagcggtggttgctgctag

SEQ ID NO: 297980 - DNA, 2292 bp, Artificial Sequence
  derived and/or modified sequence
atgctcgccagccccgcccggcccacattgcgcatgcttgccaaccacgccctgtccacaccacactgcgcatgctcgccggcccccgccccgcgcacggcgtcagcgtctagacgcaggtgcgttcccgtcgaggctcgcgcagcgggcgtttttggggatcgcctggcgggggtgttcgggagccgcgggctgaagcacgggggcgtgcaggcgcccaggcctcgtgtagtgagggccgagccccgcgccggcttcgctgtagtccgcagcccccggcggctttgtgggcgcagccacgctcctcagccgcccgcccacctgggcctgggccccggttgtttccctgcggtggctgtggtcgttcccgttccagggtctcgagcgcaccgccccttcgctgcgctgttagtcgagggcagttttctgggggatcccccgatccccccgcgccgctcaggcgtcttggctcgcggaagcgcaggcgccgactgcctggcgtcgtccgtgactcctggcccttctctgtggatccctttgcttctcgttgcgggttgtgtttcctgcttcgtgggcctggccgtttgcgtttggatgcaggcccgggtgagccctgcgtggcccgctggccttttcctgctccctaggtgactgagccgcgtgtgtgacacatcggagtgaattgaggcaacgcgttcctttccaggcttgcagcgggcggtgtcgttcacgctcctgagcagagccttccggtgctttactcgacgccacaaatagtgcagggttcctcccaggggctgtcgcgagctagaactcttccccgcccctgtgagctcgggctgttcttcctcctccgcgtggctcactccagcctcggatgtttcctcgctgcacagacctgctcgggaagactcgagaaggccaccccaggactccagctctccccggaagggcttcccctcggattgcgtcttggcccctggaaccctccctctgtatcctctgctgttcctctcttggcctccatttgggttgtggcctggatactctggctcgctgcttcccttctcttaaggatcacagccctgcactgcctgtcgtccggtgcctggaaaccattgtattttttggtctgattttgtagttgtttgagaacttaagtctggtccctcacactccatgcccagaagcagaaatgagtaaagtttgttttatcttttcttaatatgacaattattgtgttggttcaacttatgttgtactttaattagaagaaatttggccgaaaatacaaggaaaatatacaaatgcaagtaattttttttaaacttccctgaaagcagggtctaaagaaattaccaaccaacttagactggatctagaagaaaaggaagggtctttgcagtcttaggactcttccgttccgcgacgtaggtgttaggataacagccataaatggttgtaagactttgggctcagataagtagacttaagttcaaattttgacttattttacaagtgtgtgatttttggcaagctcatcttcctaaaccatgagctccttatttgtaaaggggacattagccactctccagcaacagccctggtacttcttcagtcctgggatgggacgtatgattagcctaagcgaaccagaaaatccaggcccgtgaccagtgacttgatcagggctggcgatatatctaggtaggccaaccaggtggactcagtatttttgtgggtgctactggaaaatttatttaattctaactgaatgtagaaacagcaacagacatgaaatggcagttgtattgctgtcttatcatgaggtgagggcctgaagctatggtagccaccctgtgaaccttggaaggagggttctacaggaactggcagagctgagactgggacgcaacccatgtcctggtgacgtatttgagtcctgaggctggccctcctgttagtcttttctcttactggcttcagccagatggggtctggttttctgttacttgcaacaggaaaaattggaatgatatctatgcatgctattaccgccttatggctgtggtgagattaaaacatgatactgtgggtgaactgcttagtacagtgcctgctattctttatgttggttttaaggtatttttcttgaactttaaagttctaagaaaaattaccgttttaaaattcctaccctctgttcacatgtttaaattttcatgatagtttttctgtctgcatgttttctattcaaaataaattggtcattcttcagttagccacgaagaa

SEQ ID NO: 297981 - DNA, 410 bp, Artificial Sequence
  derived and/or modified sequence
aaatgagtcacttcttcaagaccctcatgccagtgtttcatctccatttcaggtgccgagccccttttccatgacctggatagcgacgacacctccctcagtaacctgggtgattgtttcctagcaacctcagaagctgggcctctgcagtccagagtgggaaaccccattgaccatctgtactccatgcagaattcttacttcacatcttgagtcttcccctagagttctgtgactaggctcccatatggaacaaccatattctttgaggggtcactggctttaggacagggaggccagggaagaggtgggttggggagggagttttgttggggatgctgttgtataatgatatggtgtagctcagcatttccaaagactgaatacattatggattgcatagtttaatg

SEQ ID NO: 297982 - DNA, 939 bp, Artificial Sequence
  derived and/or modified sequence
atgtcatatcaaaaaaaacagcctaccccccagccacctgtggattgcgttaaaacctctggaggggggggtgggggcggtgggtccggggggggcggctgtggatttttcggcgggggtgggtcagggggcggtagctcaggcagcggttgcgggtatagcggcggggggggctacagcggcggagggtgcggagggggcagtagcggcggcggcgggggaggcgggatcggtggctgcggagggggcagtggtggcagtgtgaagtactctggggggggcggatcaagtggcggcggctccggatgtttttcctcggggggtggaggatccggctgcttctcaagcgggggaggtgggtccagcggtggaggcagtggatgtttcagcagtggtgggggcggttcctccggaggcggcagcggttgcttcagctcaggaggcggcggtttttccgggcaggcagtgcagtgccagtcctacgggggcgtgtcttccggcggcagtagcgggggcggctctggatgttttagctctggaggaggcgggggctccgtgtgcgggtactcaggaggagggtcagggtgcggagggggatcctcgggcggcagcggctccgggtatgtgtcctcacagcaggtgacacagacatcatgcgcgccgcagccaagctatgggggcggttcgtccggggggggaggctctggtggctccgggtgcttcagcagtggcggcggcggggggtcatccggatgtggcggaggaagcagcggcatcggcagtggctgcataatctccggcggcggtagtgtctgcggcgggggatcttccgggggagggggggggggctcaagtgtaggcggcagtggctccggcaaaggcgtgcccatctgccaccagactcagcagaaacaggcccctacttggccaagcaagtag

SEQ ID NO: 297983 - DNA, 939 bp, Artificial Sequence
  derived and/or modified sequence
atgagctaccagaagaagcagcccaccccccagccccctgtggactgtgtgaagaccagcggcggcggcggcggcggcggcggcagcggcggcggcggctgcggcttctttggaggcggcggcagcggcggcggcagcagcggcagcggctgcggctacagcggcggcggcggctacagcggcggcggctgcggcggcggcagcagcggcggcggcggcggcggcggcattggaggctgcggcggcggcagcggcggctctgtgaagtacagcggcggcggcggcagcagcggcggcggcagcggctgcttcagcagcggcggcggcggcagcggctgcttcagcagcggcggcggcggcagcagcggcggcggcagcggctgcttcagcagcggcggcggcggcagcagcggcggcggcagcggctgcttcagcagcggcggcggcggcttcagcggccaggccgtgcagtgccagagctatggaggagtgagcagcggcggcagcagcggcggcggcagcggctgcttcagcagcggcggcggcggcggctctgtgtgtggctacagcggcggcggcagcggctgcggcggcggcagcagcggcggcagcggcagcggctacgtgagcagccagcaggtgacccagaccagctgtgccccccagcccagctatggaggcggcagcagcggcggcggcggcagcggcggcagcggctgcttcagcagcggcggcggcggcggcagcagcggctgcggcggcggcagcagcggcatcggcagcggctgcatcatcagcggcggcggctctgtgtgtggcggcggcagcagcggcggcggcggcggcggcagctctgtgggcggcagcggcagcgggaaaggagtgcccatctgccaccagacccagcagaagcaggcccccacctggcccagcaagtag

SEQ ID NO: 297984 - DNA, 1002 bp, Artificial Sequence
  derived and/or modified sequence
atgagctaccagaagaagcagcccaccccccagccccctgtggactgtgtgaagaccagcggcggcggcggcggcggcggcggcagcggcggcggcggctgcggcttctttggaggcggcggcagcggcggcggcagcagcggcagcggctgcggctacagcggcggcggcggctacagcggcggcggctgcggcggcggcagcagcggcggcggcggcggcggcggcattggaggctgcggcggcggcagcggcggctctgtgaagtacagcggcggcggcggcagcagcggcggcggcagcggctgcttcagcagcggcggcggcggcagcggctgcttcagcagcggcggcggcggcagcagcggcggcggcagcggctgcttcagcagcggcggcggcggcagcagcggcggcggcagcggctgcttcagcagcggcggcggcggcttcagcggccaggccgtgcagtgccagagctatggaggagtgagcagcggcggcagcagcggcggcggcagcggctgcttcagcagcggcggcggcggcggctctgtgtgtggctacagcggcggcggcagcggctgcggcggcggcagcagcggcggcagcggcagcggctacgtgagcagccagcaggtgacccagaccagctgtgccccccagcccagctatggaggcggcgtgagaagaagacggcagaggaggaagaggctgctgctgcagaggcggggccggcgggagctgcggctgcggcggcggctgctgcgggactggcagaggctgcaccaccagtggaggggcctgcggctgcggcgctggttcctgtggaggagaagaagaaggctgctgcggggctggctgcgggagtggcagggccgcccagacctgcccccagaccctgctgaggccggggcctacctggccgtgcagattgaccccccaggctaccacggcggggagggcgtgggcggcgtcttccagggccaccgctgggcctag

SEQ ID NO: 297985 - DNA, 1230 bp, Artificial Sequence
  derived and/or modified sequence
cttctctcctcactcacccttcctggtgctttgggctctccttccttctcagacaagatgtcttatcagaaaaagcagcccacccctcagcccccagtggactgcgtgaagacctctggcggcggtggcggtggcggcggcagcggcggtggtggctgcggcttcttcggcggcggcggctcagggggcggtagcagcggttctggctgcggctactccggcggcggtggctactctggcggcggctgcggcgggggctcctccggcggcgggggcgggggcggcattggaggctgcggagggggctccggtgggagcgtcaagtactccggaggcggcggctcctccggcgggggctctggctgtttctccagcggtgggggcggctccggctgcttctcctccggtggcggcggctcctccgggggcggctccggctgcttctccagcggtgggggcggctcctccgggggcggctccggctgcttctcctccggcggcggcggcttctcgggccaggcggtccagtgccagagctacggaggcgtctctagcggcggctcctccgggggcggctccggctgcttctccagcggcgggggcggcggctctgtctgcggctactctggcggcggctctggctgcggcggaggctcctctggcggcagcggctccggctacgtctcctcgcagcaggtcactcagacctcgtgcgcgccccagccgagttacggaggggggtcgtccggcggcggcggcagcggcggaagcggctgcttctccagcggcgggggcggcgggagctccggctgcggcggcggctcctccgggattggcagcggctgcatcatcagtggcgggggctccgtctgcggaggtggttcctctggaggcggcggcggcggctcctccgtgggtggctccgggagtggcaagggcgtcccgatctgccaccagacccagcagaagcaggcgcctacctggccgtccaaatagatcccccagggtaccacggaggcgaaggagttggaggtgttttccaggggcaccgatgggcttagagctctcatgatgctacccgaggtttgcaaatccttcatgtcttaacctacctggaagaagccattgagctctccggctgcatctagttctgctgtttagcctctttggtttctgtacaactacctcccaaccccagtgcctcagtcaataaatttgcaaattcatgag

SEQ ID NO: 297986 - DNA, 1190 bp, Artificial Sequence
  derived and/or modified sequence
ggctctccttccttctcagacaagatgtcttatcagaaaaagcagcccacccctcagcccccagtggactgcgtgaagacctctggcggcggtggcggtggcggcggcagcggcggtggtggctgcggcttcttcggcggcggcggctcagggggcggtagcagcggttctggctgcggctactccggcggcggtggctactctggcggcggctgcggcgggggctcctccggcggcgggggcgggggcggcattggaggctgcggagggggctccggtgggagcgtcaagtactccggaggcggcggctcctccggcgggggctctggctgtttctccagcggtgggggcggctccggctgcttctcctccggtggcggcggctcctccgggggcggctccggctgcttctccagcggtgggggcggctcctccgggggcggctccggctgcttctcctccggcggcggcggcttctcgggccaggcggtccagtgccagagctacggaggcgtctctagcggcggctcctccgggggcggctccggctgcttctccagcggcgggggcggcggctctgtctgcggctactctggcggcggctctggctgcggcggaggctcctctggcggcagcggctccggctacgtctcctcgcagcaggtcactcagacctcgtgcgcgccccagccgagttacggagggggggtccggcggcggcggcagcggcggaagcggctgcttctccagcggcgggggcggcgggagctccggctgcggcggcggctcctccgggattggcagcggctgcatcatcagtggcgggggctccgtctgcggaggtggttcctctggaggcggcggcggcggctcctccgtgggtggctccgggagtggcaagggcgtcccgatctgccaccagacccagcagaagcaggcgcctacctggccgtccaaatagatcccccagggtaccacggaggcgaaggagttggaggtgttttccaggggcaccgatgggcttagagctctcatgatgctacccgaggtttgcaaatccttcatgtcttaacctacctggaagaagccattgagctctccggctgcatctagttctgctgtttagcctctttggtttctgtacaactacctcccaaccccagtgcctcagtcaataaatttgcaaattc

SEQ ID NO: 297987 - DNA, 939 bp, Artificial Sequence
  derived and/or modified sequence
atgagctaccagaagaagcagcccaccccccagccccccgtggactgcgtgaaaacctccggtggtggcgggggcggggggggctccggcggtggggggtgtgggttctttggcggcggtggatctggcgggggctcgtcagggtctggctgcggttactcaggtgggggcggctacagcggcgggggctgtggaggggggagctccggaggggggggcggaggcgggattggggggtgtggaggaggaagtgggggttccgtgaagtatagcggagggggaggcagctctgggggaggtagcgggtgtttctcttccgggggggggggttctgggtgctttagtagcggaggcgggggcagctccggtggcgggtctgggtgtttctccagcggggggggggggtcctctgggggcggatcggggtgtttttcatcggggggcggcggcttctcaggccaagccgttcagtgccaatcctacggcggggtgtccagcgggggttcctcaggtggaggcagcgggtgcttctcatctgggggcggcggtggaagtgtttgcggctattccggggggggctccggctgcggaggtgggtcgtccggtggttcaggttcgggctatgtgagtagccaacaggtaactcagacatcttgtgctcctcagccttcctacggaggcgggtcatccggaggcggtggttccgggggcagtgggtgcttctcttcagggggtggaggaggatcatctggctgcgggggcggctcatctggaattggcagtggatgcataatttctggcggggggagcgtttgtgggggcgggtcctccggcggagggggcgggggatctagtgtggggggatccggctctggaaaaggagtgccaatttgtcatcagacccagcagaagcaagcccctacctggccgtcaaaatag

SEQ ID NO: 297988 - DNA, 1002 bp, Artificial Sequence
  derived and/or modified sequence
atgagctaccagaagaagcagcccaccccccagccccccgtggactgtgtgaaaacatcaggaggcggagggggaggtggcgggagcggcggaggtggctgcggttttttcggaggagggggcagtggcgggggaagctccggcagcggatgcggctactctggggggggaggttatagtggtggaggctgcggcgggggctcctccggggggggagggggaggcggtattggcggatgcggcgggggatccggtgggtccgtgaaatatagtggagggggtggtagttccggaggggggagcgggtgcttctctagtgggggaggtgggagcggctgcttctctagcgggggagggggatcttcaggaggtggctccggatgtttcagtagtggcggggggggatcgtcaggaggcggctccggatgtttctcctctgggggtgggggcttcagtggccaggcagtgcagtgtcaatcttatggaggcgtgtccagtggcggcagtagcggggggggtagcgggtgcttctctagtggcggcggcggtggatcagtatgcgggtattctggcggcgggtcagggtgcggcggcgggagttctggcgggtctggctccggctacgtgtcatcacagcaggtcacacagacttcatgcgctccccagccttcatacggcggcggcgtgcgacgcagacgacagaggagaaagagactcttgttgcagcggcggggccggagagagttgaggctgcgacggaggctgctcagggattggcagcggctccaccaccagtggaggggcctccggctgaggagatggttcctttggcgccggcgccgtagactcttaaggggctggctgcgcgaatggcaaggaagaccggacctgccacctgatcccgccgaagcaggtgcttacctggcagtgcagattgaccctcccggttaccacggaggcgaaggtgtggggggagtgtttcaggggcaccgctgggcctag

SEQ ID NO: 297989 - DNA, 939 bp, Artificial Sequence
  derived and/or modified sequence
atgtcgtaccagaagaaacagcccactccacagccacccgtggactgcgtcaagacatcgggcggtgggggaggcggaggtggatctgggggaggcggttgtggtttcttcgggggaggcggatctggcggtggttcctcaggctcagggtgtggttatagtggaggaggcggttatagcggcggaggttgcggcggtggctcatcagggggaggtggcggaggtggcatcggcggttgcggcggagggtcaggtgggtctgtgaagtattccggcggaggcggtagctccggtggaggttctggatgcttcagtagtgggggaggaggttctggctgttttagctctggcggaggcggatcatcaggcggtggatccggctgcttttccagcggcggtgggggaagctccggcggtggatctgggtgttttagttctggcggaggaggcttttcaggccaggctgtacaatgccagtcatatgggggtgtctcttccggtggatcatctggtgggggatcgggctgtttcagtagcggcggtggaggcggatccgtatgtggctatagcggtgggggtagcgggtgtggtggaggctcctctgggggttcgggaagtgggtacgtgtcatcacagcaggtgacacaaactagttgcgctccacagccttcatacgggggtggtagctccggaggtggtggcagtggagggtcgggctgcttttctagcggaggtggcggaggttcttccggatgcggcggtggctcgagtggcatcggcagcggatgtattatctccggaggaggttccgtgtgcggcggaggatctagtggtggtggcggaggtggtagttctgtcggaggaagcggtagtggtaagggggtaccgatctgtcaccaaacacagcaaaagcaggctccaacatggccctcaaagtag

SEQ ID NO: 297990 - DNA, 1002 bp, Artificial Sequence
  derived and/or modified sequence
atgtcttatcaaaagaaacagcccacaccccagcccccagtcgattgcgtgaaaaccagtggcggagggggaggtggaggcggttctggcggaggaggttgcggtttttttggtggcggtggaagtggcggagggtcaagcgggtccggctgcggttactctgggggaggtggatacagcggtggaggctgcggtgggggatcttccggaggcggtggaggcggtggcatagggggatgtggcggtggttctgggggaagcgtgaaatactcgggcggtggcggttcctccggcggaggatcaggttgcttctcttctggtgggggtgggagtggatgtttctctagtgggggtggcggaagctctggcggtgggagcggatgtttttcgagcggcggaggtggctcgagtggtggcggttctggttgcttttctagcgggggagggggattctctggtcaggccgtgcagtgccaatcctatggcggagtgtccagcggcggtagcagcggcggtggctcaggatgtttcagcagcggagggggaggtggtagtgtttgtgggtactccgggggagggagcgggtgtgggggaggttcgtctggcggatcaggcagcggttacgtatcctcccagcaggttacccaaacaagctgcgctccacagccttcctatggaggaggggtgcggcgtagaagacagcgtaggaaacgcctcttgttgcaacggagggggagacgcgagcttaggttacgtcggcgtttgttaagggactggcagcgacttcaccatcagtggcgcggtttacggctacggagatggttcctttggcgtcggagaaggcggttactacgtggatggctgcgcgaatggcagggtcggcctgatttgcctccagaccccgcagaagcaggggcttacttagcagtgcaaatcgatcccccaggctatcacggaggtgagggcgtggggggtgttttccagggccatagatgggcctag

SEQ ID NO: 297991 - DNA, 939 bp, Artificial Sequence
  derived and/or modified sequence
atgagctaccagaagaagcagcccaccccccagccccccgtggactgcgtgaagaccagcggcggcggcggcggcggcggcggcagcggcggcggcggctgcggcttcttcggcggcggcggcagcggcggcggcagcagcggcagcggctgcggctacagcggcggcggcggctacagcggcggcggctgcggcggcggcagcagcggcggcggcggcggcggcggcatcggcggctgcggcggcggcagcggcggcagcgtgaagtacagcggcggcggcggcagcagcggcggcggcagcggctgcttcagcagcggcggcggcggcagcggctgcttcagcagcggcggcggcggcagcagcggcggcggcagcggctgcttcagcagcggcggcggcggcagcagcggcggcggcagcggctgcttcagcagcggcggcggcggcttcagcggccaggccgtgcagtgccagagctacggcggcgtgagcagcggcggcagcagcggcggcggcagcggctgcttcagcagcggcggcggcggcggcagcgtgtgcggctacagcggcggcggcagcggctgcggcggcggcagcagcggcggcagcggcagcggctacgtgagcagccagcaggtgacccagaccagctgcgccccccagcccagctacggcggcggcagcagcggcggcggcggcagcggcggcagcggctgcttcagcagcggcggcggcggcggcagcagcggctgcggcggcggcagcagcggcatcggcagcggctgcatcatcagcggcggcggcagcgtgtgcggcggcggcagcagcggcggcggcggcggcggcagcagcgtgggcggcagcggcagcggcaagggcgtgcccatctgccaccagacccagcagaagcaggcccccacctggcccagcaagtag

SEQ ID NO: 297992 - DNA, 1002 bp, Artificial Sequence
  derived and/or modified sequence
atgagctaccagaagaagcagcccaccccccagccccccgtggactgcgtgaagaccagcggcggcggcggcggcggcggcggcagcggcggcggcggctgcggcttcttcggcggcggcggcagcggcggcggcagcagcggcagcggctgcggctacagcggcggcggcggctacagcggcggcggctgcggcggcggcagcagcggcggcggcggcggcggcggcatcggcggctgcggcggcggcagcggcggcagcgtgaagtacagcggcggcggcggcagcagcggcggcggcagcggctgcttcagcagcggcggcggcggcagcggctgcttcagcagcggcggcggcggcagcagcggcggcggcagcggctgcttcagcagcggcggcggcggcagcagcggcggcggcagcggctgcttcagcagcggcggcggcggcttcagcggccaggccgtgcagtgccagagctacggcggcgtgagcagcggcggcagcagcggcggcggcagcggctgcttcagcagcggcggcggcggcggcagcgtgtgcggctacagcggcggcggcagcggctgcggcggcggcagcagcggcggcagcggcagcggctacgtgagcagccagcaggtgacccagaccagctgcgccccccagcccagctacggcggcggcgtgagaagaagaagacagagaagaaagagactgctgctgcagagaagaggcagaagagagctgagactgagaagaagactgctgagagactggcagagactgcaccaccagtggagaggcctgagactgagaagatggttcctgtggagaagaagaagaagactgctgagaggctggctgagagagtggcagggcagacccgacctgccccccgaccccgccgaggccggcgcctacctggccgtgcagatcgacccccccggctaccacggcggcgagggcgtgggcggcgtgttccagggccacagatgggcctag

SEQ ID NO: 297993 - protein, 740 aa, Artificial Sequence
  derived and/or modified sequence
MYHHWVQPLPLETLDLEFKVEEPLSRGLLSGDQAGLKYLLLAFLRLDFDDDGEGNSKFLRCDDDQMSNDKERFARENHSEIERRRRNKMTAYITELSDMVPTCSALARKPDKLTILRMAVSHMKSLRGTGNTSTDGSYKPSFLTDQELKHLILEAADGFLFIVSCETGRVVYVSDSVTPVLNQPQSEWFGSTLYDQVHPDDVDKLREQLSTSENALTGRILDLKTGTVKKEGQQSSMRMCMGSRRSFICRMRCGSSSVDPVSVNRLSFVRNRCRNGLGSVKDGEPHFVVVHCTGYIKAWPPAGVSLPDDDPEAGQGSKFCLVAIGRLQVTSSPNCTDMSNVCQPTEFISRHNIEGIFTFVDHRCVATVGYQPQELLGKNIVEFCHPEDQQLLRDSFQQVVKLKGQVLSVMFRFRSKNQEWLWMRTSSFTFQNPYSDEIEYIICTNTNVKPLTYRQQQQQTELDMVPGRDGLASYNHSQVVQPVTTTGPEHSKPLEKSDGLFAQDRDPRFSEIYHNINADQSKGISSSTVPATQQLFSQGNTFPPTPRPAENFRNSGLAPPVTIVQPSASAGQMLAQISRHSNPTQGATPTWTPTTRSGFSAQVATQATAKTRTSQFGVGSFQTPSSFSSMSLPGAPTASPGAAAYPSLTNRGSNFAPETGQTAGQFQTRTAEGVGVWPQWQGQQPHHRSSSSEQHVQQPPAQQPGQPEVFQEMLSMLGDQSNSYNNEEFPDLTMFPPFSE

SEQ ID NO: 297994 - DNA, 2223 bp, Artificial Sequence
  derived and/or modified sequence
atgtaccatcattgggtgcagcccttgcccctcgagacactcgatctggaattcaaggtcgaagagcccctctcccggggtttactatctggcgaccaggccggactcaagtatcttctcctcgccttcctgcggctagactttgatgatgacggagagggcaacagtaagtttttgcgttgtgatgatgatcaaatgtccaacgataaggagagattcgctagggagaaccactcagaaattgagagacggcgacggaacaagatgaccgcctatatcaccgagctctccgacatggttccaacgtgtagtgctctggcaagaaaacccgacaagctgaccattctgcggatggccgtgagtcatatgaagagcctgcgagggaccggcaacacaagcaccgatgggtcatacaaaccatcattcttaactgatcaggagctgaagcatctgatcctggaggccgccgatgggttcctcttcattgtctcttgcgagaccgggcgggtggtgtacgtatccgactcagtgactccggtgttaaatcaaccacagagcgagtggtttggtagtactctctatgaccaggtgcatcccgatgatgtggacaaactcagggagcagctgagcacttccgaaaacgctctgaccggcaggatccttgatctcaaaaccggtaccgtaaagaaagaagggcaacagagtagcatgcgaatgtgtatgggatctcgccgcagcttcatctgtaggatgcgatgcggctccagtagcgtcgaccctgtgagcgtgaacaggctatcgtttgtgaggaataggtgtcgaaacggcttaggctccgttaaagatggggagccacacttcgtcgttgtccactgtaccgggtacatcaaagcttggccgcccgctggggtatcacttcctgacgatgaccctgaggctggccaaggaagcaagttttgtctggttgccattgggcggctccaggtgacctcgtcccccaactgcaccgacatgtcgaacgtgtgtcagccaacagagtttatctcccgccataatatcgagggtatcttcacgttcgtggatcaccgatgcgtggccaccgtgggataccagccccaggagctactcgggaaaaatattgtggaattttgtcatcctgaggaccagcagctgttaagagactcatttcaacaggtggtgaagttgaaaggccaggtgctttccgtgatgtttagattccgatcaaaaaatcaggagtggttgtggatgaggacgagctcattcactttccagaacccctatagtgacgaaatcgagtatataatatgcactaatactaacgttaagcccttgacctatcgacaacaacagcagcagaccgaattagatatggttccaggccgcgacgggctagcttcttacaatcacagtcaggtcgtgcagccagttaccactaccggcccagaacattctaaaccactggagaaaagcgatgggcttttcgcccaggaccgggaccctcgctttagtgaaatttaccacaatatcaacgctgatcaatccaagggcatatcctccagcaccgtgcctgccacacagcagctgttctcacagggcaacactttccccccaacccctcgaccagctgaaaactttagaaatagtggtctggctccccccgtgactatcgtgcaaccaagcgcaagtgcaggacagatgctggcccaaatttccaggcacagcaaccctacccaaggcgctactcctacatggacccccacgaccaggagtggcttctccgcccaggtggcaactcaagccaccgccaaaacccgaacttcccagtttggggtgggatcctttcagactccatccagtttctcttctatgtcccttccaggtgctcctacagcctcacccggagccgctgcttacccatcgctaaccaaccggggctctaatttcgctcccgaaacaggccagaccgctggtcagtttcaaaccaggacggccgaaggcgtcggagtttggcctcaatggcaggggcagcagccccatcacagatcatcctcgtccgagcagcacgtgcagcagccacccgcacagcagcccggccaacctgaagtttttcaggagatgctgtcaatgctgggcgatcagtccaactcctacaacaatgaggaattcccagatctaacgatgtttcccccatttagcgaatag

SEQ ID NO: 297995 - DNA, 2223 bp, Artificial Sequence
  derived and/or modified sequence
atgtaccaccactgggtgcagcccctgcccctggagaccctggacctggagttcaaggtggaggagcccctgagccggggcctgctgagcggggaccaggccggcctgaagtacctgctgctggccttcctgcggctggactttgatgatgatggagagggcaacagcaagttcctgcgctgtgatgatgaccagatgagcaatgacaaggagagatttgcccgggagaaccacagcgagattgaaagaagaagaagaaacaagatgacagcctacatcacagagctgagtgacatggtgcccacctgcagcgccctggccaggaagccagacaagctgaccatcctgaggatggctgtgagccacatgaagagcctgcggggcactggaaacaccagcacagatggcagctacaagcccagcttcctgacagaccaggagctgaagcacctgatcctggaggccgcagatggcttcctgttcatcgtgtcctgtgaaacaggccgggtggtgtatgtgtctgacagcgtgacccctgtgctgaaccagccccagagcgagtggtttggcagcaccctgtatgaccaggtgcacccagatgatgtggacaagctgcgggagcagctgagcaccagtgaaaatgccctgaccggccgcatcctggacctgaagacaggaacagtgaagaaggagggccagcagagctccatgaggatgtgcatgggcagccgccgctccttcatctgcaggatgagatgtggcagcagctctgtggaccctgtgtctgtgaaccggctgagctttgtgaggaaccgctgcagaaatggcctgggctctgtgaaggatggagagccccactttgtggtggtgcactgcaccggctacatcaaggcctggcccccagctggggtgtccctgcctgatgatgatcctgaggccggccagggcagcaagttctgcctggtggccatcggccgcctgcaggtgaccagcagccccaactgcacagacatgagcaatgtgtgccagcccacagagttcatcagccgccacaacatcgagggcatcttcacctttgtggaccaccgctgtgtggccaccgtgggctaccagccccaggagctgctgggcaagaacatcgtggagttctgccaccctgaggaccagcagctgctgcgggacagcttccagcaggtggtgaagctgaagggccaggtgctgtctgtgatgttccgcttccgcagcaagaaccaggagtggctgtggatgaggaccagcagcttcaccttccagaacccctacagtgatgaaattgagtacatcatctgcaccaacaccaacgtgaagcccctgacctaccggcagcagcagcagcagacagagctggacatggtgcccggcagagatggcctggccagctacaaccacagccaggtggtgcagcctgtgaccaccaccggccctgagcacagcaagcccctggagaagagtgatggcctgtttgcccaggaccgggacccccgcttcagcgagatctaccacaacatcaatgctgaccagagcaagggcatcagcagcagcacagtgcctgccacccagcagctgttcagccagggcaacaccttcccccccacccccaggcctgctgagaacttcagaaattctggcctggcccctcctgtgaccatcgtgcagcccagcgccagcgctggccagatgctggcccagatcagccgccacagcaaccccacccagggcgccacccccacctggacccccaccaccaggagcggcttcagcgcccaggtggccacccaggccacagccaagaccaggaccagccagtttggagtgggcagcttccagacccccagcagcttcagctccatgagcctgcccggggcccccacagccagccctggagctgctgcctaccccagcctgaccaacagaggcagcaactttgcccctgagaccggccagacagctggccagttccagaccaggacagctgagggcgtgggcgtgtggccccagtggcagggccagcagccccaccacaggagcagcagcagcgagcagcacgtgcagcagcccccagcccagcagcccggccagcctgaggtgttccaggagatgctgtccatgctgggggaccagagcaacagctacaacaatgaggagttcccagacctgaccatgttcccccccttcagcgagtag

SEQ ID NO: 297996 - DNA, 2223 bp, Artificial Sequence
  derived and/or modified sequence
atgtaccaccactgggtgcagcccctgcccctggagaccctggacctcgaattcaaagtggaagagcctctctcacgcggtctgctgtctggtgatcaggcggggttgaagtacctccttctggccttcctgcggctggattttgacgatgacggcgaaggaaacagtaaatttctgcggtgcgacgatgaccagatgtcaaatgacaaggagaggtttgcacgtgaaaaccatagcgaaatcgaaaggagacgccggaacaaaatgactgcctatatcacagagctgtccgacatggtacccacctgctctgccctggccaggaagccggataaactgaccatactgcgtatggccgtctcacatatgaagagtctgcggggcacaggaaataccagcaccgacggtagttataaaccctctttcctgaccgatcaggagctaaagcaccttatcttagaggcagctgacggatttcttttcattgtgtcatgcgagacaggtagagttgtatacgtctcagacagcgtgactccggtgctgaaccaaccacaaagcgaatggtttggatctaccttgtacgatcaggtgcaccccgacgacgtggacaaactgcgcgaacagctgagcacgtccgagaacgccttaacaggaagaatactcgatctcaaaacaggtaccgtgaaaaaagagggccaacagtcgagcatgaggatgtgcatgggttcccggcggtcgttcatctgtcgaatgaggtgtgggagttcatccgttgacccagtgagtgttaacaggctgagcttcgtgaggaataggtgtcgcaacggattggggagtgtgaaggatggggagcctcacttcgttgtggtccattgcacaggctatatcaaggcctggcctccagcaggtgtgagtcttcctgatgacgacccagaggcaggacagggctctaagttctgcttggtcgccattgggaggttgcaggtgacaagctctccaaattgcacagacatgagcaacgtttgtcagccaactgagtttatctcacgccacaatattgaaggaatctttacctttgtagaccatcgctgcgttgcaacagtgggctaccagccgcaagagctcctgggtaaaaacattgtcgaattctgtcatccagaggatcagcagctactcagggactctttccagcaggtcgtgaagttaaagggacaagtgttaagtgttatgttcaggttccgcagtaagaaccaagagtggctatggatgcgcacttctagcttcactttccagaacccttactctgacgagatcgaatatataatctgtaccaatacaaacgttaaaccgttgacttataggcaacagcagcagcagacagaactggacatggtgccgggccgggatggactcgcttcatacaaccatagccaggtggtccaaccagtaaccactacgggtcctgagcacagcaaaccactcgagaagagcgacgggttgttcgcccaggatcgcgacccccggttctccgaaatttaccacaacattaatgctgaccagtccaagggaataagctctagcaccgtgccggccactcaacagctctttagtcagggtaacacattccctcccactcccagacccgccgaaaattttaggaattcaggacttgcacctcccgtaaccattgtccaaccctcagcctctgctggccagatgcttgcccagatttcacggcacagcaacccgactcagggggcaactcctacatggacgccaacaacaaggagcggcttcagcgctcaagtcgctacccaggccaccgctaagacccggacttcccagtttggcgtgggcagctttcagaccccctcttccttcagttcaatgtccctacctggcgcaccaaccgccagtcccggtgctgcggcttatccctccttaaccaatagggggtcaaacttcgcccctgaaacaggacaaaccgccggccaatttcagactcgtaccgccgagggagtcggggtttggccgcagtggcaggggcagcaacctcaccacaggtcttccagttccgaacagcatgtacagcaacctcccgcacaacagccgggacagcctgaagtttttcaggaaatgctttccatgctaggcgaccaatccaattcgtataataatgaggaatttccagatctgaccatgttccccccattctctgaatag

SEQ ID NO: 297997 - DNA, 2223 bp, Artificial Sequence
  derived and/or modified sequence
atgtatcaccactgggtacagccactcccactagagacactagatttggagttcaaagtcgaggaaccactgagccgcggactcttaagtggcgaccaggcgggactgaagtacctactgttggcattcctcaggctggatttcgacgacgacggtgaaggaaatagcaaattcctgcgctgcgacgatgaccagatgtcaaacgataaggaacgatttgcaagggagaatcactctgagatcgagagaagacgcaggaacaagatgaccgcttatatcacagagctcagtgacatggttccaacgtgcagcgcattagccagaaagcccgataagctgaccatcctgagaatggcagtgagtcacatgaagagcctgagaggaaccggtaatacatccaccgacggatcttacaagccgtcctttctgaccgaccaggagttgaaacaccttatcttggaagcggcagacggcttcctgttcatagtgtcatgcgagactggccgagtcgtgtacgtgtccgactcagtcaccccagtgcttaatcaaccacagtccgaatggtttggttccaccctgtatgaccaggtgcatccagatgacgtcgacaagcttcgagaacagctaagcacgagtgagaatgcattgactggcaggatactagatctgaagaccggcaccgtaaaaaaggaaggccagcagtcatcaatgcggatgtgcatgggctcaagacggagttttatttgccgaatgaggtgtgggtcttcttctgttgatcccgtttcagtgaaccggctttcttttgtccggaacagatgcagaaacggccttggatccgtgaaagacggggagccccatttcgtggttgtgcactgcaccgggtacattaaggcctggcccccagctggagtcagtctgccagacgacgaccccgaggctggccagggatctaaattctgtctggtcgctataggacgactccaggttacttcctctccgaattgcactgacatgtcaaacgtatgtcagccgacagagttcatcagcagacacaacattgaggggattttcacctttgtggatcacagatgcgtcgccacagtcggctatcagccacaggaactgctcggtaagaacatcgtggagttctgtcaccctgaagaccaacagctgctgcgagattcattccaacaagtggttaaattaaaagggcaggtcctcagcgttatgttccgtttccgtagcaaaaaccaggagtggttgtggatgcgcacatcatcatttacctttcagaatccctactccgacgagattgagtatatcatttgcactaatactaacgtgaagccgctgacctacaggcaacagcagcaacagacggagctggacatggtgccaggtcgcgatggactggctagctataatcatagtcaggtagtacagccggtcaccactaccggaccggagcattccaaacccctggagaagtccgatggtctatttgcacaggaccgagatccacggttctcagaaatctatcacaatataaacgcagatcaaagcaaagggataagctcgagcaccgtcccagccacgcagcagttgttctcccagggaaatacatttccacccacgcccagaccggctgaaaactttcgcaatagtggactcgcgccaccagtgactattgtgcagccgtccgcaagtgccggacaaatgctagcacagatttccaggcattctaatcccacccaaggggcaacgccaacctggacccccactacacgaagtggattctctgcgcaggtggcaacccaagccaccgctaagacccggaccagtcagttcggagtgggcagtttccagacacccagttcttttagctccatgtctctgccaggggctcctacagccagccccggtgccgctgcttacccctccctgaccaataggggatcgaatttcgctcctgagacagggcagactgcgggtcaattccagactaggaccgcagaaggagtcggtgtgtggcctcagtggcagggacagcagccccaccaccgctcgtcaagctctgagcagcacgtgcaacagccccctgcacagcagccgggtcagcctgaagtgtttcaggaaatgctttccatgttgggggatcagtccaatagttataataatgaggagtttccagacctgacaatgttcccgccattttccgagtag

SEQ ID NO: 297998 - DNA, 2542 bp, Artificial Sequence
  derived and/or modified sequence
catggcggcgactactgccaaccccgaaatgacatcagatgtaccatcactgggtccagccattgcctctggaaactctggacctggaattcaaggtggaggagccattgtccagagggctattaagcggcgaccaggcaggcttaaagtatttattgttggctttcctcaggctggattttgatgatgatggagaagggaacagtaaatttttgaggtgtgatgatgatcagatgtctaacgataaggagcggtttgccagggaaaatcacagtgaaattgaacggcggcgacggaacaagatgacagcctacatcacagaactgtcagatatggtacccacctgtagtgccctggctcgaaaaccagacaagctaaccatcttacgcatggcagtttctcacatgaagtccttgcggggaactggcaacacatccactgatggctcctataagccgtctttcctcactgatcaggaactgaaacatttgatcttggaggcagcagatggctttctgtttattgtctcatgtgagacaggcagggtggtgtatgtgtctgactccgtgactcctgttttgaaccagccacagtctgaatggtttggcagcacactctatgatcaggtgcacccagatgatgtggataaacttcgtgagcagctttccacttcagaaaatgccctgacagggcgtatcctggatctaaagactggaacagtgaaaaaggaaggtcagcagtcttccatgagaatgtgtatgggctcaaggagatcgtttatttgccgaatgaggtgtggcagtagctctgtggacccagtttctgtgaataggctgagctttgtgaggaacagatgcaggaatggacttggctctgtaaaggatggggaacctcacttcgtggtggtccactgcacaggctacatcaaggcctggcccccagcaggtgtttccctcccagatgatgacccagaggctggccagggaagcaagttttgcctagtggccattggcagattgcaggtaactagttctcccaactgtacagacatgagtaatgtttgtcaaccaacagagttcatctcccgacacaacattgagggtatcttcacttttgtggatcaccgctgtgtggctactgttggctaccagccacaggaactcttaggaaagaatattgtagaattctgtcatcctgaagaccagcagcttctaagagacagcttccaacaggtagtgaaattaaaaggccaagtgctgtctgtcatgttccggttccggtctaagaaccaagaatggctctggatgagaaccagctcctttactttccagaacccttactcagatgaaattgagtacatcatctgtaccaacaccaatgtgaagcctttgacatataggcagcagcaacagcaaacagaattggacatggtaccaggaagagatggactggccagctacaatcattcccaggtggttcagcctgtgacaaccacaggaccagaacacagcaagccccttgagaagtcagatggtttatttgcccaggatagagatccaagattttcagaaatctatcacaacatcaatgcggatcagagtaaaggcatctcctccagcactgtccctgccacccaacagctattctcccagggcaacacattccctcctaccccccggccggcagagaatttcaggaatagtggcctagcccctcctgtaaccattgtccagccatcagcttctgcaggacagatgttggcccagatttcccgccactccaaccccacccaaggagcaaccccaacttggacccctactacccgctcaggcttttctgcccaggtggctacccaggctactgctaagactcgtacttcccagtttggtgtgggcagctttcagactccatcctccttcagctccatgtccctccctggtgccccaactgcatcgcctggtgctgctgcctaccctagtctcaccaatcgtggatctaactttgctcctgagactggacagactgcaggacaattccagacacggacagcagagggtgtgggtgtctggccacagtggcagggccagcagcctcatcatcgttcaagttctagtgagcaacatgttcaacaaccgccagcacagcaacctggccagcctgaggtcttccaggagatgctgtccatgctgggagatcagagcaacagctacaacaatgaagaattccctgatctaactatgtttccccccttttcagaatagaactattggggtgaggataaggggtgggggagaaaaaatcactgtttgtttttaaaaagcaaatctttctgtaaacagaataaaagttcctctcccttcccttccctcacccctgacatgtaccccctttcccttctggctgttcccctgctctgttgcctctctaaggtaacatttatagaagaaatggaatgaatctccaaggcttttaggactgtctgaaaatttgaggctgggtgaagttaaaacacctttccttatgtctcctgacctgaaattgt

SEQ ID NO: 297999 - DNA, 2223 bp, Artificial Sequence
  derived and/or modified sequence
atgtaccaccactgggtgcagcccctgcccctggagaccctggacctggagttcaaggtggaggagcccctgagcagaggcctgctgagcggcgaccaggccggcctgaagtacctgctgctggccttcctgagactggacttcgacgacgacggcgagggcaacagcaagttcctgagatgcgacgacgaccagatgagcaacgacaaggagagattcgccagagagaaccacagcgagatcgagagaagaagaagaaacaagatgaccgcctacatcaccgagctgagcgacatggtgcccacctgcagcgccctggccagaaagcccgacaagctgaccatcctgagaatggccgtgagccacatgaagagcctgagaggcaccggcaacaccagcaccgacggcagctacaagcccagcttcctgaccgaccaggagctgaagcacctgatcctggaggccgccgacggcttcctgttcatcgtgagctgcgagaccggcagagtggtgtacgtgagcgacagcgtgacccccgtgctgaaccagccccagagcgagtggttcggcagcaccctgtacgaccaggtgcaccccgacgacgtggacaagctgagagagcagctgagcaccagcgagaacgccctgaccggcagaatcctggacctgaagaccggcaccgtgaagaaggagggccagcagagcagcatgagaatgtgcatgggcagcagaagaagcttcatctgcagaatgagatgcggcagcagcagcgtggaccccgtgagcgtgaacagactgagcttcgtgagaaacagatgcagaaacggcctgggcagcgtgaaggacggcgagccccacttcgtggtggtgcactgcaccggctacatcaaggcctggccccccgccggcgtgagcctgcccgacgacgaccccgaggccggccagggcagcaagttctgcctggtggccatcggcagactgcaggtgaccagcagccccaactgcaccgacatgagcaacgtgtgccagcccaccgagttcatcagcagacacaacatcgagggcatcttcaccttcgtggaccacagatgcgtggccaccgtgggctaccagccccaggagctgctgggcaagaacatcgtggagttctgccaccccgaggaccagcagctgctgagagacagcttccagcaggtggtgaagctgaagggccaggtgctgagcgtgatgttcagattcagaagcaagaaccaggagtggctgtggatgagaaccagcagcttcaccttccagaacccctacagcgacgagatcgagtacatcatctgcaccaacaccaacgtgaagcccctgacctacagacagcagcagcagcagaccgagctggacatggtgcccggcagagacggcctggccagctacaaccacagccaggtggtgcagcccgtgaccaccaccggccccgagcacagcaagcccctggagaagagcgacggcctgttcgcccaggacagagaccccagattcagcgagatctaccacaacatcaacgccgaccagagcaagggcatcagcagcagcaccgtgcccgccacccagcagctgttcagccagggcaacaccttcccccccacccccagacccgccgagaacttcagaaacagcggcctggccccccccgtgaccatcgtgcagcccagcgccagcgccggccagatgctggcccagatcagcagacacagcaaccccacccagggcgccacccccacctggacccccaccaccagaagcggcttcagcgcccaggtggccacccaggccaccgccaagaccagaaccagccagttcggcgtgggcagcttccagacccccagcagcttcagcagcatgagcctgcccggcgcccccaccgccagccccggcgccgccgcctaccccagcctgaccaacagaggcagcaacttcgcccccgagaccggccagaccgccggccagttccagaccagaaccgccgagggcgtgggcgtgtggccccagtggcagggccagcagccccaccacagaagcagcagcagcgagcagcacgtgcagcagccccccgcccagcagcccggccagcccgaggtgttccaggagatgctgagcatgctgggcgaccagagcaacagctacaacaacgaggagttccccgacctgaccatgttcccccccttcagcgagtag

SEQ ID NO: 298000 - protein, 602 aa, Artificial Sequence
  derived and/or modified sequence
MGLRASGKDSAPTVVSGILGGSVTLPLNISVDTEIENVIWIGPKNALAFARPKENVTIMVKSYLGRLDITKWSYSLCISNLTLNDAGSYKAQINQRNFEVTTEEEFTLFVYEQLQEPQVTMKSVKVSENFSCNITLMCSVKGAEKSVLYSWTPREPHASESNGGSILTVSRTPCDPDLPYICTAQNPVSQRSSLPVHVGQFCTDPGASRGGTTGETVVGVLGEPVTLPLALPACRDTEKVVWLFNTSIISKEREEAATADPLIKSRDPYKNRVWVSSQDCSLKISQLKIEDAGPYHAYVCSEASSVTSMTHVTLLIYRRLRKPKITWSLRHSEDGICRISLTCSVEDGGNTVMYTWTPLQKEAVVSQGESHLNVSWRSSENHPNLTCTASNPVSRSSHQFLSENICSGPERNTKLWIGLFLMVCLLCVGIFSWCIWKRKGRCSVPAFCSSQAEAPADTPGYEKLDTPLRPARQQPTPTSDSSSDSNLTTEEDEDRPEVHKPISGRYEVFDQVTQEGAGHDPAPEGQADYDPVTPYVTEVESVVGENTMYAQVFNLQGKTPVSQKEESSATIYCSIRKPQVVVPPPQQNDLEIPESPTYENFT

SEQ ID NO: 298001 - DNA, 1809 bp, Artificial Sequence
  derived and/or modified sequence
atgggcctgagagccagcggcaaggattccgcacccaccgtggtgagcggaatcctggggggctctgtcacgctgccactcaacattagcgtcgatacagagattgagaacgtgatctggataggtccaaagaatgctttagcctttgcgcgacccaaggaaaatgtgaccataatggtaaagagctatctcggcaggcttgatattacaaaatggtcatacagtttgtgtataagtaacttgacacttaacgacgcgggaagctacaaggcccagatcaatcagcgtaactttgaggtcaccactgaagaggaattcacacttttcgtttacgagcagctccaggaacctcaggtgaccatgaaatctgtgaaggtctctgaaaacttttcctgtaacattactttaatgtgtagtgtgaagggtgcagaaaagtcagttctttatagctggaccccacgcgagccacacgcctcagaatcaaacgggggcagtatccttaccgtatcacggacaccttgcgaccccgatctgccctatatttgtactgcccaaaatcctgtaagccagcgttccagcttgcctgtccacgtgggtcagttctgtacagatccaggagctagcagagggggtactacgggagaaactgtggtgggcgtgctaggagagcctgtcacccttcctttggcattgcccgcttgtagggacacagagaaggtggtctggttgttcaacacatcaattattagcaaagagcgggaggaggcagctacggccgatcccctcattaaatcaagagatccttacaagaacagagtctgggtatcctcccaggattgctctctgaaaatcagtcagctgaagattgaggatgctgggccgtaccacgcttacgtatgttcggaagctagctctgttactagtatgacgcatgtgaccctcctcatttataggagacttagaaagccaaagattacgtggtcactcaggcacagtgaggacgggatttgccgtattagcctgacctgtagcgtcgaagacggtggcaatacagtaatgtatacatggacaccattacagaaggaggccgttgtgtcccagggggaaagccatctcaatgtgtcttggagaagttctgagaatcatccaaacttaacctgcaccgctagcaatcccgtgagccgcagcagccaccaattcctcagcgagaatatctgctccggacctgaacggaacacaaaattgtggatcggcctgttccttatggtgtgcctcctgtgtgtcgggatattcagttggtgcatctggaaacgcaagggacgttgttctgttcccgccttctgctcctcacaggccgaagcccctgccgacacacccggctatgagaagcttgatacccctcttcggccagcccgccagcagcctacacccacctcggatagctcgtctgacagcaacctgaccacagaggaagacgaagatcgccctgaggtgcataaacctatttctgggagatacgaagtcttcgatcaggttacccaggagggggcaggccacgaccccgcccccgaaggccaggccgactacgatcctgtgactccatatgtgacagaggtcgagagcgtcgttggcgaaaacactatgtatgcccaggtgttcaacctccaggggaaaacccctgtgtcacagaaggaggagtcttcagctaccatctattgttccattaggaaaccgcaggtcgtggtcccccctccccaacagaacgacctggagatcccagagtcccccacatacgaaaactttacctag

SEQ ID NO: 298002 - DNA, 1809 bp, Artificial Sequence
  derived and/or modified sequence
atgggcctgcgggccagcggcaaggacagcgcccccaccgtggtgtctggcatcctgggcggctctgtgaccctgcccctgaacatctctgtggacacagaaattgaaaatgtcatctggattggccccaagaatgccctggcctttgcccggcccaaggaaaatgtgaccatcatggtgaagagctacctgggccgcctggacatcaccaagtggagctacagcctgtgcatcagcaacctgaccctgaatgatgctggcagctacaaggcccagatcaaccagaggaactttgaggtgaccacagaggaggagttcaccctgtttgtgtatgagcagctgcaggagccccaggtgaccatgaagtctgtgaaggtgtctgagaacttcagctgcaacatcaccctgatgtgcagcgtgaagggagctgagaagtctgtgctgtacagctggaccccccgggagccccacgccagcgagagcaatggaggcagcatcctgactgtgtccaggaccccctgtgaccctgacctgccctacatctgcacagcccagaaccctgtgtcccagaggagcagcctgcctgtgcacgtgggccagttctgcacagatcctggggccagccggggcggcaccactggagagaccgtggtgggcgtgctgggggagcctgtgaccctgcccctggccctgcctgcctgccgggacacagagaaggtggtgtggctgttcaacaccagcatcatcagcaaggagcgggaggaggccgccacagctgaccccctcatcaagagccgggacccctacaagaacagagtgtgggtgagcagccaggactgcagcctgaagatcagccagctgaagattgaagatgctggcccctaccacgcctacgtgtgcagcgaggccagctctgtgacctccatgacccacgtgaccctgctgatctaccgccgcctgaggaagcccaagatcacctggagcctgcggcacagtgaagatggcatctgccgcatcagcctgacctgcagcgtggaggatggcggcaacacagtgatgtacacctggacccccctgcagaaggaggccgtggtgtcccagggcgagagccacctgaatgtgtcctggaggagcagcgagaaccaccccaacctgacctgcacagccagcaaccctgtgagccgcagcagccaccagttcctgtctgagaacatctgcagcggccctgagaggaacaccaagctgtggattggcctcttcctgatggtgtgcctgctgtgtgtgggcatcttctcctggtgcatctggaagaggaagggccgctgcagcgtgcctgccttctgcagcagccaggccgaggccccagctgacaccccaggctatgagaagctggacacccccctgcggcctgcccggcagcagcccacccccaccagtgacagcagcagtgacagcaacctgaccacagaagaagatgaagatagacctgaggtgcacaagcccatcagcggccgctatgaggtgtttgaccaggtgacccaggagggcgccggccatgaccctgcccctgagggccaggccgactatgaccctgtgaccccctacgtgacagaggtggagagcgtggtgggggagaacaccatgtatgcccaggtgttcaacctgcagggcaagacccctgtgtcccagaaggaggagagcagcgccaccatctactgcagcatcaggaagccccaggtggtggtgcccccaccccagcagaatgacctggagatccctgagagccccacctatgagaacttcacctag

SEQ ID NO: 298003 - DNA, 1809 bp, Artificial Sequence
  derived and/or modified sequence
atgggcctgcgggccagcggcaaggacagcgcccccaccgtggtgagcggtattttgggcggatccgttactttgccccttaacatctccgtggatacagagattgaaaatgtgatttggatagggcctaaaaatgctttggcgtttgctcggcctaaggaaaacgtcactatcatggtgaagagctatctaggacggctggacatcaccaaatggtcttattccctctgcatttccaacttgactcttaacgacgccgggtcctacaaggcacagatcaaccaacggaattttgaagtcactacggaagaggagttcactctcttcgtgtatgaacagttgcaggagccacaagttacgatgaagtcggtaaaagtatctgaaaacttttcttgcaacattacactcatgtgctcagtgaaaggcgctgaaaaatccgttctctattcttggactcccagagagcctcacgcctccgagtccaatggaggcagcattctgactgtttctaggaccccttgcgaccccgatctcccatatatttgtactgctcaaaatcccgtttcccaaagaagctcattgccagtgcacgtgggccagttctgtactgacccaggagccagcagaggagggacaaccggagaaaccgttgtcggggttcttggggagcccgttaccctccctctagctctccccgcgtgccgagacaccgaaaaggtggtctggctattcaatacgtcaattattagcaaagagagggaagaggcagccaccgccgacccactgatcaaaagcagagatccgtataagaacagagtgtgggtctcttctcaggactgctctctgaagatctcccaacttaagatcgaagacgccgggccataccacgcgtacgtgtgtagtgaggcttcaagtgtgacttccatgacacacgttacgttactcatatataggaggctgcgtaagccaaagatcacatggtccttgcgacacagcgaagatggcatctgcagaatttctctcacctgctcagtggaggacgggggaaacaccgtcatgtacacatggacacctcttcagaaggaagccgttgtaagccaaggggagtcacacctcaacgtcagctggagaagctccgagaatcatcctaatctgacgtgcacagcctctaatcccgtcagcaggtctagtcaccaattcttgagcgagaacatctgtagtggtcccgagcggaataccaagttgtggatcggtctttttctgatggtgtgcctgttgtgcgtcgggatcttcagctggtgtatttggaagcgcaaaggaaggtgcagcgtccccgccttttgttcttcgcaagccgaagcccccgcagatacacccggctacgagaaattagacacaccacttaggcctgccaggcagcaacctactccaacttcagactcatcctccgactccaatctcaccacggaggaagatgaagaccgtcctgaggtgcataagccgataagtggtaggtatgaagtgttcgatcaagtgacgcaggagggtgcgggacacgatccagccccagaaggacaggctgactacgatccagtcaccccctacgttactgaagttgaatccgtagtgggcgagaataccatgtatgcacaggtcttcaatctgcagggaaagactcctgtcagccagaaagaggagtccagcgctactatctactgctccatacggaagccacaggttgtcgtgccccctccacaacagaacgacctcgagattccagagagccccacctatgaaaacttcacttag

SEQ ID NO: 298004 - DNA, 1809 bp, Artificial Sequence
  derived and/or modified sequence
atgggcctacgggcttccgggaaggatagcgctcccacagtcgtgagtggcattttgggaggctcagtgacactgcctctgaatatctcagtcgataccgagatcgaaaacgtgatttggattggacccaaaaatgctctggcttttgcaagacctaaagaaaatgtaaccatcatggttaaatcctacctgggccgtctggatatcaccaaatggagttattcgctgtgcattagcaacctcaccctcaatgatgcaggttcctacaaagctcaaatcaaccagcgcaatttcgaagtgacaactgaagaggagttcacgctatttgtttatgaacaactgcaggagccccaggttactatgaaaagcgtgaaggtgtccgagaacttcagttgcaatattacactgatgtgcagcgttaaaggggctgagaaaagcgtcctgtactcctggactccaagagaacctcacgcctcagaatccaacgggggtagcatcctcaccgtaagcaggacaccgtgcgaccctgatctgccttatatatgtactgctcagaaccccgtaagccagcgcagtagcctccccgttcatgtggggcagttttgcacagaccccggagcttctcgaggaggcacaaccggcgagaccgttgttggtgtcctcggagagcctgtgactttacctctcgctctgccagcctgtcgggataccgagaaggtggtatggctattcaacactagcatcattagtaaggagagagaagaggcagccaccgccgaccctctgattaaatctagagatccctacaagaatagagtctgggtcagcagtcaagattgtagcctgaaaatctctcaattgaaaatcgaggacgcaggaccatatcatgcctacgtctgcagcgaagccagttcggtcacaagtatgacccacgtcactctgctgatataccgccgactgcggaaacccaagataacttggtcactacgtcatagtgaggacggaatctgcaggatttcactgacttgcagcgtcgaagatggcggaaacacggtgatgtatacttggacacccctccagaaggaagccgttgtgagccagggagaatcccatctgaatgttagctggagaagcagtgagaatcaccctaatctcacctgcaccgcttccaaccccgtctccagatccagccaccaattcctgtccgagaacatatgtagcggacccgaaaggaataccaagctgtggatcggattgttcctgatggtttgtttgctatgtgtgggcatcttttcatggtgcatttggaagcgaaaaggtcggtgctccgtacccgctttctgttcaagccaggccgaagcccctgccgacacaccaggatatgaaaaactggatactcctctccgacctgcccgacagcagcctaccccaacgtccgattctagcagcgatagcaatttgacaaccgaggaggacgaggatcggcctgaagttcacaaacccatctctggacgctatgaagtcttcgaccaagttacccaagagggagctggacacgacccagctccagaaggtcaggccgattatgatcctgttaccccatatgtgactgaggtggagtcggttgtcggggagaataccatgtacgctcaggtgtttaatcttcagggaaagacacctgtgagtcagaaggaggagtcatcagccaccatctactgctcaataagaaagccccaggtggtggtcccacccccacagcaaaacgacctcgagatcccagagtcgccgacctatgaaaacttcacctag

SEQ ID NO: 298005 - DNA, 1809 bp, Artificial Sequence
  derived and/or modified sequence
atgggcctgagagccagcggcaaggacagcgcccccaccgtggtgagcggcatcctgggcggcagcgtgaccctgcccctgaacatcagcgtggacaccgagatcgagaacgtgatctggatcggccccaagaacgccctggccttcgccagacccaaggagaacgtgaccatcatggtgaagagctacctgggcagactggacatcaccaagtggagctacagcctgtgcatcagcaacctgaccctgaacgacgccggcagctacaaggcccagatcaaccagagaaacttcgaggtgaccaccgaggaggagttcaccctgttcgtgtacgagcagctgcaggagccccaggtgaccatgaagagcgtgaaggtgagcgagaacttcagctgcaacatcaccctgatgtgcagcgtgaagggcgccgagaagagcgtgctgtacagctggacccccagagagccccacgccagcgagagcaacggcggcagcatcctgaccgtgagcagaaccccctgcgaccccgacctgccctacatctgcaccgcccagaaccccgtgagccagagaagcagcctgcccgtgcacgtgggccagttctgcaccgaccccggcgccagcagaggcggcaccaccggcgagaccgtggtgggcgtgctgggcgagcccgtgaccctgcccctggccctgcccgcctgcagagacaccgagaaggtggtgtggctgttcaacaccagcatcatcagcaaggagagagaggaggccgccaccgccgaccccctgatcaagagcagagacccctacaagaacagagtgtgggtgagcagccaggactgcagcctgaagatcagccagctgaagatcgaggacgccggcccctaccacgcctacgtgtgcagcgaggccagcagcgtgaccagcatgacccacgtgaccctgctgatctacagaagactgagaaagcccaagatcacctggagcctgagacacagcgaggacggcatctgcagaatcagcctgacctgcagcgtggaggacggcggcaacaccgtgatgtacacctggacccccctgcagaaggaggccgtggtgagccagggcgagagccacctgaacgtgagctggagaagcagcgagaaccaccccaacctgacctgcaccgccagcaaccccgtgagcagaagcagccaccagttcctgagcgagaacatctgcagcggccccgagagaaacaccaagctgtggatcggcctgttcctgatggtgtgcctgctgtgcgtgggcatcttcagctggtgcatctggaagagaaagggcagatgcagcgtgcccgccttctgcagcagccaggccgaggcccccgccgacacccccggctacgagaagctggacacccccctgagacccgccagacagcagcccacccccaccagcgacagcagcagcgacagcaacctgaccaccgaggaggacgaggacagacccgaggtgcacaagcccatcagcggcagatacgaggtgttcgaccaggtgacccaggagggcgccggccacgaccccgcccccgagggccaggccgactacgaccccgtgaccccctacgtgaccgaggtggagagcgtggtgggcgagaacaccatgtacgcccaggtgttcaacctgcagggcaagacccccgtgagccagaaggaggagagcagcgccaccatctactgcagcatcagaaagccccaggtggtggtgccccccccccagcagaacgacctggagatccccgagagccccacctacgagaacttcacctag

SEQ ID NO: 298006 - protein, 270 aa, Artificial Sequence
  derived and/or modified sequence
MTHVTLLIYRRLRKPKITWSLRHSEDGICRISLTCSVEDGGNTVMYTWTPLQKEAVVSQGESHLNVSWRSSENHPNLTCTASNPVSRSSHQFLSENICSGPERNTKLWIGLFLMVCLLCVGIFSWCIWKRKGRCSVPAFCSSQAEAPADTPGYEKLDTPLRPARQQPTPTSDSSSDSNLTTEEDEDRPEVHKPISGRYEVFDQVTQEGAGHDPAPEGQADYDPVTPYVTEVESVVGENTMYAQVFNLQVVPPPQQNDLEIPESPTYENFT

SEQ ID NO: 298007 - DNA, 813 bp, Artificial Sequence
  derived and/or modified sequence
atgacccacgtgacacttctgatttatagaaggctcagaaaaccaaagatcacttggagtctgcggcacagtgaagatgggatttgtcggatttcacttacctgttccgttgaggatgggggaaatactgtgatgtatacatggaccccgctgcagaaagaagctgtggtgtcccagggcgagtctcacctaaacgttagttggcggtcttcagaaaatcaccctaacttgacttgtaccgcctcgaacccggtcagtcggtccagccaccagtttctgtcagaaaatatttgctcaggtccagagcgaaacacaaagctctggatcggccttttcctgatggtttgtttactttgtgttggtatatttagctggtgtatttggaaacggaaagggcgctgctctgttcctgccttctgcagcagtcaagctgaggcaccggccgacactcccgggtatgaaaagctggacactccccttcggcctgcccgccagcagcccacccccacttctgacagctcgtcagacagcaatctcacaaccgaagaagacgaagatcgcccagaggtccataagcccatttctgggcgatatgaagttttcgaccaggtgacccaggagggcgctgggcacgatccagcccctgagggtcaggcggactacgacccagtcacaccatacgtgactgaagtggagtccgtcgtaggcgaaaacaccatgtacgcacaggtgttcaatcttcaggttgtgcccccaccccagcagaacgatcttgagattcccgaatctcctacttatgaaaattttacatag

SEQ ID NO: 298008 - DNA, 813 bp, Artificial Sequence
  derived and/or modified sequence
atgacccatgtgacgctcttgatttacagaagattgagaaaaccaaaaatcacctggagccttcgccactctgaggatgggatttgccgaatatctctaacttgcagtgttgaggatgggggcaacacggttatgtacacctggactcccctgcagaaggaagctgttgtgagccagggcgagtcccatcttaacgtctcatggcgcagtagcgaaaatcatccaaacctgacatgtaccgccagcaaccccgttagccggagctctcatcagtttctctctgaaaacatctgctccggtccagaacgtaacactaaattgtggattggcttatttctcatggtttgtctcttgtgcgtgggcatcttttcttggtgcatttggaagcgcaagggtcgatgctcagtgcctgccttctgctctagtcaggctgaagcccccgctgacactcccggatacgaaaagctggacacacccctccgacctgcacggcagcagcccactcccacaagcgattcctccagtgatagtaatctcacgacagaagaagacgaagaccgccctgaggttcacaaaccaatttccggaaggtatgaggtttttgaccaggtgacccaggaaggcgcaggccacgacccagcaccagagggccaagctgactatgaccctgtcacaccctacgtcactgaggtggaatcggtagtaggggagaatacaatgtacgcccaggtgttcaacctacaggtggtgcccccaccgcaacagaatgacctcgagatccccgagagccccacctatgagaattttacttag

SEQ ID NO: 298009 - DNA, 813 bp, Artificial Sequence
  derived and/or modified sequence
atgacccacgtgaccctgctgatctaccgccgcctgaggaagcccaagatcacctggagcctgcggcacagtgaagatggcatctgccgcatcagcctgacctgcagcgtggaggatggcggcaacacagtgatgtacacctggacccccctgcagaaggaggccgtggtgtcccagggcgagagccacctgaatgtgtcctggaggagcagcgagaaccaccccaacctgacctgcacagccagcaaccctgtgagccgcagcagccaccagttcctgtctgagaacatctgcagcggccctgagaggaacaccaagctgtggattggcctcttcctgatggtgtgcctgctgtgtgtgggcatcttctcctggtgcatctggaagaggaagggccgctgcagcgtgcctgccttctgcagcagccaggccgaggccccagctgacaccccaggctatgagaagctggacacccccctgcggcctgcccggcagcagcccacccccaccagtgacagcagcagtgacagcaacctgaccacagaagaagatgaagatagacctgaggtgcacaagcccatcagcggccgctatgaggtgtttgaccaggtgacccaggagggcgccggccatgaccctgcccctgagggccaggccgactatgaccctgtgaccccctacgtgacagaggtggagagcgtggtgggggagaacaccatgtatgcccaggtgttcaacctgcaggtggtgcccccaccccagcagaatgacctggagatccctgagagccccacctatgagaacttcacctag

SEQ ID NO: 298010 - DNA, 1463 bp, Artificial Sequence
  derived and/or modified sequence
gaaggttgtctggttgtttaacacatccatcattagcaaagagagggaagaagcagcaacggcagatccactcattaaatccagggatccttacaagaacagggtgtgggtctccagccaggactgctccctgaagatcagccagctgaagatagaggacgccggcccctaccatgcctacgtgtgctcagaggcctccagcgtcaccagcatgacacatgtcaccctgctcatctaccgcaggctgaggaagcccaaaatcacgtggagcctcaggcacagtgaggatggcatctgcaggatcagcctgacctgctccgtggaggacgggggaaacactgtcatgtacacatggaccccgctgcagaaggaagctgttgtgtcccaaggggaatcacacctcaatgtctcatggagaagcagtgaaaatcaccccaacctcacatgcacagccagcaaccctgtcagcaggagttcccaccagtttctttctgagaacatctgttcaggacctgagagaaacacaaagctttggattgggttgttcctgatggtttgccttctgtgcgttgggatcttcagctggtgcatttggaagcgaaaaggacggtgttcagtcccagccttctgttccagccaagctgaggccccagcggatacaccaggatatgagaagctggacactcccctcaggcctgccaggcaacagcctacacccacctcagacagcagctctgacagcaacctcacaactgaggaggatgaggacaggcctgaggtgcacaagcccatcagtggaagatatgaggtatttgaccaggtcactcaggagggcgctggacatgacccagcccctgagggccaagcagactatgatcccgtcactccatatgtcacggaagttgagtctgtggttggagagaacaccatgtatgcacaagtgttcaacttacaggtggtgccaccaccacaacagaatgatcttgagattcctgaaagtcctacctatgaaaatttcacctgaaaggaaaagcagctgctgcctctctcctgggaccgtggggttggaaagtcagctggacctcatggggcctggggctcacagacagaagcacctcagaatttccttcagtgcctcagagatgcctggatgtggcccctccccctccttctcacccttaaggactcccaaacccattaatagttcagacacaggctccttcttggagcctatgggcttcagatgtctttgccccatttgtcacctcgcacacttatagcgtttcctcctcgaaattctaccaagactggtcaaatgttgctgaggggcctggaccagctgtcctttacaccaccttctcaacactgctgaaaagaacccaagagaattgtcacacatgacacaagatgtacataatatcatgctcactgcagtgttatttaaaataaaaggcaggaaataa

SEQ ID NO: 298011 - DNA, 813 bp, Artificial Sequence
  derived and/or modified sequence
atgacccacgtgaccctgctgatctaccggcggctgcggaagcccaagattacttggagcctgcggcatagcgaagacgggatttgccgcatcagcctaacctgcagcgtcgaagatggtggtaatacggttatgtacacgtggacacccctgcagaaggaagctgttgtctcgcagggggagtcgcacctgaacgtgtcctggcgctccagcgaaaatcaccccaacttgacatgtaccgcctctaaccccgtcagcaggagcagccatcagtttcttagcgagaatatctgttcaggtcctgagagaaacaccaagctctggattggactgttcctgatggtctgtttactgtgcgttggaattttcagttggtgtatctggaagaggaaaggccggtgctcagttccagctttctgctcctcgcaggctgaagcgccagcggacacacctggatacgagaagctggacacccccttacggccagctaggcagcagccaaccccaacatccgactcaagctcggactcaaacctgacaaccgaggaggatgaagaccgtcccgaggttcacaagccgatctccggccgctatgaggtgtttgaccaggtcacacaggagggggctggacatgatcctgcccccgagggtcaggcagattatgatcccgttacaccctacgttacggaggtggagtcagttgtaggggagaatacaatgtacgcccaggtcttcaatttgcaggtggtgccccccccccagcagaatgatttggagatccctgagtccccaacctacgaaaactttacttag

SEQ ID NO: 298012 - DNA, 813 bp, Artificial Sequence
  derived and/or modified sequence
atgacccacgtgaccctgctgatctaccggcggctgcggaagcccaaaattacatggtctctccggcacagcgaagacgggatttgtcgtatatcattgacatgctccgtggaggacggaggaaacacggtgatgtatacctggactcctctacagaaggaagcagtggtgagccagggggaatcccacctgaatgtgagttggagaagttcagagaaccatcccaatctaacatgtactgcatctaaccccgtgtctcgatcctcacaccagtttctcagcgagaacatctgcagtggccctgagcggaacacaaagctttggattgggctgttcctgatggtgtgtctgctgtgtgttggcatcttcagttggtgtatctggaagaggaagggccgttgctccgttccagccttctgcagcagccaagccgaagccccagccgatactcctggatatgaaaagctggatacaccgctaagaccagcacggcagcagcccactcctacgagtgattcttcatctgactccaatttaacaacagaagaagacgaggaccggcccgaagtgcacaagccaatttctggaagatatgaggtgtttgatcaggtaactcaggagggggcagggcacgacccagcacccgaaggccaagcagactacgaccctgttaccccgtacgtaacagaagttgaatctgtcgttggcgaaaacacaatgtacgcccaggtctttaatttacaggtggtgcctcctccacagcagaacgatctagagattcccgagagtccaacctatgagaacttcacatag

SEQ ID NO: 298013 - DNA, 813 bp, Artificial Sequence
  derived and/or modified sequence
atgacacacgtgaccctcctaatctaccgacgcctgcgcaagcccaagattacttggagcctgcgacattccgaggacgggatatgccgtatcagtttgacctgttccgtggaagacggaggcaacaccgttatgtatacttggacgccgctacagaaagaagctgtggtcagccagggggaaagccacctgaatgtctcatggcggtctagtgaaaaccacccaaatctgacatgcaccgcctccaatccagtctcaagatcctcgcaccagtttttgagtgaaaatatttgctctggccctgagagaaacacaaaattgtggattgggctcttcttgatggtttgcctcctgtgtgtgggtatcttctcttggtgtatttggaagcgcaagggacggtgcagtgtccccgcattttgcagttcgcaggcagaggcgcctgccgatacccccggatatgagaaactggataccccactccggccagcaaggcagcaacctactcctaccagtgacagctcgtccgattctaatctgacgacggaggaggacgaagaccgtccagaagttcacaagcccatcagcggcaggtacgaggtattcgatcaggtgacccaagagggcgcaggacacgatcccgcacccgagggacaggccgattacgacccagtgactccatatgtcacagaagtcgaatccgtcgtaggggagaatacgatgtacgctcaggtcttcaatctgcaggttgtgccaccaccccagcagaacgatctggagataccagaaagcccaacgtacgaaaattttacttag

SEQ ID NO: 298014 - DNA, 813 bp, Artificial Sequence
  derived and/or modified sequence
atgactcacgtgaccctactaatctatcggcgtctccgtaaacccaaaattacctggagcttgcgccactccgaagatggcatctgcaggattagtctgacttgctcagttgaagacggagggaataccgtgatgtatacttggactcctctgcagaaggaagccgttgttagccagggagagtcccatctcaatgtgtcctggcgcagcagcgagaaccatccgaatctcacttgcactgcatctaaccccgtaagcaggagctcccaccaattcctctccgagaatatttgctccgggccagagaggaacacaaagctctggattgggctgttcctcatggtgtgcctcttgtgtgtgggaattttcagttggtgtatttggaaacggaagggaaggtgttccgtcccagcattttgtagttcccaggccgaggctccagccgatactcccggttatgaaaaactagacactcccctgcgcccagcccgacagcaaccgactcccacatccgactcaagctccgattccaatctgaccactgaggaggacgaagaccgccctgaggtccacaagcctatttcaggcagatatgaggtgttcgatcaggtgacgcaagagggggcaggccacgaccctgcgccagagggtcaagctgattacgacccggtaacaccatatgttacagaggtggagagcgttgtgggtgagaacaccatgtatgcccaagtgttcaatttacaagtggttcctccacctcagcagaacgatctggagatccccgaaagtcccacctatgaaaatttcacctag

SEQ ID NO: 298015 - DNA, 813 bp, Artificial Sequence
  derived and/or modified sequence
atgacccacgtgaccctgctgatctacagaagactgagaaagcccaagatcacctggagcctgagacacagcgaggacggcatctgcagaatcagcctgacctgcagcgtggaggacggcggcaacaccgtgatgtacacctggacccccctgcagaaggaggccgtggtgagccagggcgagagccacctgaacgtgagctggagaagcagcgagaaccaccccaacctgacctgcaccgccagcaaccccgtgagcagaagcagccaccagttcctgagcgagaacatctgcagcggccccgagagaaacaccaagctgtggatcggcctgttcctgatggtgtgcctgctgtgcgtgggcatcttcagctggtgcatctggaagagaaagggcagatgcagcgtgcccgccttctgcagcagccaggccgaggcccccgccgacacccccggctacgagaagctggacacccccctgagacccgccagacagcagcccacccccaccagcgacagcagcagcgacagcaacctgaccaccgaggaggacgaggacagacccgaggtgcacaagcccatcagcggcagatacgaggtgttcgaccaggtgacccaggagggcgccggccacgaccccgcccccgagggccaggccgactacgaccccgtgaccccctacgtgaccgaggtggagagcgtggtgggcgagaacaccatgtacgcccaggtgttcaacctgcaggtggtgccccccccccagcagaacgacctggagatccccgagagccccacctacgagaacttcacctag

SEQ ID NO: 298016 - protein, 656 aa, Artificial Sequence
  derived and/or modified sequence
MVAPKSHTDDWAPGPFSSKPQRSQLQIFSSVLQTSLLFLLMGLRASGKDSAPTVVSGILGGSVTLPLNISVDTEIENVIWIGPKNALAFARPKENVTIMVKSYLGRLDITKWSYSLCISNLTLNDAGSYKAQINQRNFEVTTEEEFTLFVYEQLQEPQVTMKSVKVSENFSCNITLMCSVKGAEKSVLYSWTPREPHASESNGGSILTVSRTPCDPDLPYICTAQNPVSQRSSLPVHVGQFCTDPGASRGGTTGETVVGVLGEPVTLPLALPACRDTEKVVWLFNTSIISKEREEAATADPLIKSRDPYKNRVWVSSQDCSLKISQLKIEDAGPYHAYVCSEASSVTSMTHVTLLIYRRLRKPKITWSLRHSEDGICRISLTCSVEDGGNTVMYTWTPLQKEAVVSQGESHLNVSWRSSENHPNLTCTASNPVSRSSHQFLSENICSGPERNTKLWIGLFLMVCLLCVGIFSWCIWKRKGRCSVPAFCSSQAEAPADTPEPTAGHTLYSVLSQGYEKLDTPLRPARQQPTPTSDSSSDSNLTTEEDEDRPEVHKPISGRYEVFDQVTQEGAGHDPAPEGQADYDPVTPYVTEVESVVGENTMYAQVFNLQGKTPVSQKEESSATIYCSIRKPQVVVPPPQQNDLEIPESPTYENFT

SEQ ID NO: 298017 - DNA, 1971 bp, Artificial Sequence
  derived and/or modified sequence
atggtagccccgaagtctcatactgacgactgggctccaggtcctttttcttccaaaccccaacggagccagttacagatatttagttctgtgttacagacatctcttctcttcctacttatgggactgagagcaagcggcaaagacagtgcaccaactgtggtatcgggcattctcggcggatctgtaacactacccctgaacatctcagttgatactgagatcgaaaatgtgatatggatcggtcccaagaatgccttggcatttgccagacccaaggaaaatgtcaccattatggtcaagagctacttaggccgcctggatatcaccaagtggagctacagcttgtgcatatctaacctgactttgaacgacgccggtagctataaagcccagattaaccagcgtaatttcgaagtgaccacagaagaggaatttacactgttcgtctacgaacaattgcaagagcctcaggttaccatgaagtcggtcaaagtaagcgagaactttagttgcaacattaccctgatgtgcagcgtgaagggagcagagaaatctgtgctgtactcttggacccctcgcgagccacacgcctccgaaagtaacgggggctccatccttacagtgagtaggactccctgtgatcctgatttgccctacatatgtactgcacagaatccagtgtcacaacgaagcagcctgccggtccacgttggccagttctgcacagatcccggcgcctcaaggggtgggactaccggggaaaccgtggtcggagtcttaggagagcccgtgactcttccgctcgctctgccagcctgccgggacacagaaaaagtggtgtggttatttaatacatctatcatttccaaggagcgggaagaagccgctaccgccgatccactgattaagagccgtgatccttacaaaaatagagtttgggtgtccagccaggactgttctctaaaaatcagccagctgaagatcgaggatgcaggaccttaccatgcatacgtctgtagcgaagcttctagcgtaaccagcatgacccatgtaacattgctcatctatcgacgcctccggaaacctaagattacttggtccctgcgtcattcagaggacggaatctgccgcatctccctcacctgctccgtggaggatggaggtaatacagttatgtacacgtggacccccctgcagaaagaggcagttgtgtcacagggggaaagtcacttgaacgtgtcttggaggtcttcagagaaccaccctaatctcacttgtactgctagcaaccccgtaagcagaagctcccatcagtttcttagcgagaatatatgttctggaccagaaaggaacactaagttgtggataggactgttcttaatggtgtgccttctgtgtgtcggaatcttctcttggtgcatctggaaacgtaaggggcggtgctcagtgcctgccttttgctcaagtcaggccgaggcacctgccgatacacccgagccaaccgcaggccacaccctttatagcgtcctgagccagggttatgagaaattggacacccctctccgaccagccaggcagcagcctaccccgacctcagactcatctagcgatagcaatctcaccactgaggaagatgaggataggccggaagtgcacaaacccatctctggtaggtacgaggtgttcgaccaggtgactcaggaaggagccggacacgaccccgctcctgagggacaggctgattatgacccagtgaccccttacgtgaccgaggttgaaagcgtcgtcggtgaaaatacaatgtatgcgcaggtttttaatttgcagggaaagacccctgttagtcagaaggaggaaagcagcgcgacaatttattgttctatccgcaagcctcaagtagtcgtgcccccaccgcaacaaaacgacctggaaatccccgaatcacctacatacgaaaactttacctag

SEQ ID NO: 298018 - DNA, 1971 bp, Artificial Sequence
  derived and/or modified sequence
atggtggcccccaagagccacacagatgactgggcccctggccccttcagcagcaagccccagaggagccagctgcagatcttcagctctgtgctgcagaccagcctgctcttcctgctgatgggcctgcgggccagcggcaaggacagcgcccccaccgtggtgtctggcatcctgggcggctctgtgaccctgcccctgaacatctctgtggacacagaaattgaaaatgtcatctggattggccccaagaatgccctggcctttgcccggcccaaggaaaatgtgaccatcatggtgaagagctacctgggccgcctggacatcaccaagtggagctacagcctgtgcatcagcaacctgaccctgaatgatgctggcagctacaaggcccagatcaaccagaggaactttgaggtgaccacagaggaggagttcaccctgtttgtgtatgagcagctgcaggagccccaggtgaccatgaagtctgtgaaggtgtctgagaacttcagctgcaacatcaccctgatgtgcagcgtgaagggagctgagaagtctgtgctgtacagctggaccccccgggagccccacgccagcgagagcaatggaggcagcatcctgactgtgtccaggaccccctgtgaccctgacctgccctacatctgcacagcccagaaccctgtgtcccagaggagcagcctgcctgtgcacgtgggccagttctgcacagatcctggggccagccggggcggcaccactggagagaccgtggtgggcgtgctgggggagcctgtgaccctgcccctggccctgcctgcctgccgggacacagagaaggtggtgtggctgttcaacaccagcatcatcagcaaggagcgggaggaggccgccacagctgaccccctcatcaagagccgggacccctacaagaacagagtgtgggtgagcagccaggactgcagcctgaagatcagccagctgaagattgaagatgctggcccctaccacgcctacgtgtgcagcgaggccagctctgtgacctccatgacccacgtgaccctgctgatctaccgccgcctgaggaagcccaagatcacctggagcctgcggcacagtgaagatggcatctgccgcatcagcctgacctgcagcgtggaggatggcggcaacacagtgatgtacacctggacccccctgcagaaggaggccgtggtgtcccagggcgagagccacctgaatgtgtcctggaggagcagcgagaaccaccccaacctgacctgcacagccagcaaccctgtgagccgcagcagccaccagttcctgtctgagaacatctgcagcggccctgagaggaacaccaagctgtggattggcctcttcctgatggtgtgcctgctgtgtgtgggcatcttctcctggtgcatctggaagaggaagggccgctgcagcgtgcctgccttctgcagcagccaggccgaggccccagctgacaccccagagcccacagctggccacaccctgtacagcgtgctgagccagggctatgagaagctggacacccccctgcggcctgcccggcagcagcccacccccaccagtgacagcagcagtgacagcaacctgaccacagaagaagatgaagatagacctgaggtgcacaagcccatcagcggccgctatgaggtgtttgaccaggtgacccaggagggcgccggccatgaccctgcccctgagggccaggccgactatgaccctgtgaccccctacgtgacagaggtggagagcgtggtgggggagaacaccatgtatgcccaggtgttcaacctgcagggcaagacccctgtgtcccagaaggaggagagcagcgccaccatctactgcagcatcaggaagccccaggtggtggtgcccccaccccagcagaatgacctggagatccctgagagccccacctatgagaacttcacctag

SEQ ID NO: 298019 - DNA, 2440 bp, Artificial Sequence
  derived and/or modified sequence
cttcagtctcagttctgaaaatagatcatcatggtggcaccaaagagtcacacagatgactgggctcctgggcctttctccagtaagccacagaggagtcagctgcaaatattctcttctgttctacagacctctctcctcttcctgctcatgggactaagagcctctggaaaggactcagccccaacagtggtgtcagggatcctagggggttccgtgactctccccctaaacatctcagtagacacagagattgagaacgtcatctggattggtcccaaaaatgctcttgctttcgcacgtcccaaagaaaatgtaaccattatggtcaaaagctacctgggccgactagacatcaccaagtggagttactccctgtgcatcagcaatctgactctgaatgatgcaggatcctacaaagcccagataaaccaaaggaattttgaagtcaccactgaggaggaattcaccctgttcgtctatgagcagctgcaggagccccaagtcaccatgaagtctgtgaaggtgtctgagaacttctcctgtaacatcactctaatgtgctccgtgaagggggcagagaaaagtgttctgtacagctggaccccaagggaaccccatgcttctgagtccaatggaggctccattcttaccgtctcccgaacaccatgtgacccagacctgccatacatctgcacagcccagaaccccgtcagccagagaagctccctccctgtccatgttgggcagttctgtacagatccaggagcctccagaggaggaacaacgggggagactgtggtaggggtcctgggagagccagtcaccctgccacttgcactcccagcctgccgggacacagagaaggttgtctggttgtttaacacatccatcattagcaaagagagggaagaagcagcaacggcagatccactcattaaatccagggatccttacaagaacagggtgtgggtctccagccaggactgctccctgaagatcagccagctgaagatagaggacgccggcccctaccatgcctacgtgtgctcagaggcctccagcgtcaccagcatgacacatgtcaccctgctcatctaccgcaggctgaggaagcccaaaatcacgtggagcctcaggcacagtgaggatggcatctgcaggatcagcctgacctgctccgtggaggacgggggaaacactgtcatgtacacatggaccccgctgcagaaggaagctgttgtgtcccaaggggaatcacacctcaatgtctcatggagaagcagtgaaaatcaccccaacctcacatgcacagccagcaaccctgtcagcaggagttcccaccagtttctttctgagaacatctgttcaggacctgagagaaacacaaagctttggattgggttgttcctgatggtttgccttctgtgcgttgggatcttcagctggtgcatttggaagcgaaaaggacggtgttcagtcccagccttctgttccagccaagctgaggccccagcggatacaccagaacccacagctggccacacgctatactctgtgctctcccaaggatatgagaagctggacactcccctcaggcctgccaggcaacagcctacacccacctcagacagcagctctgacagcaacctcacaactgaggaggatgaggacaggcctgaggtgcacaagcccatcagtggaagatatgaggtatttgaccaggtcactcaggagggcgctggacatgacccagcccctgagggccaagcagactatgatcccgtcactccatatgtcacggaagttgagtctgtggttggagagaacaccatgtatgcacaagtgttcaacttacagggaaagaccccagtttctcagaaggaagagagctcagccacaatctactgctccatacggaaacctcaggtggtggtgccaccaccacaacagaatgatcttgagattcctgaaagtcctacctatgaaaatttcacctgaaaggaaaagcagctgctgcctctctcctgggaccgtggggttggaaagtcagctggacctcatggggcctggggctcacagacagaagcacctcagaatttccttcagtgcctcagagatgcctggatgtggcccctccccctccttctcacccttaaggactcccaaacccattaatagttcagacacaggctccttcttggagcctatgggcttcagatgtctttgccccatttgtcacctcgcacacttatagcgtttcctcctcgaaattctaccaagactggtcaaatgttgctgaggggcctggaccagctgtcctttacaccaccttctcaacactgctgaaaagaacccaagagaattgtcacacatgacacaagatgtacataatatcatgctcactgcagtgttatttaaaataaaaggcaggaaataa

SEQ ID NO: 298020 - DNA, 1971 bp, Artificial Sequence
  derived and/or modified sequence
atggtggcccccaagagccacaccgacgactgggcccccggcccctttagcagcaagccacagcgtagccaactccagatcttcagcagtgtgctgcaaacctctttgctgttcttactcatgggcttgcgggcatcaggaaaggattcagcgcccacagtggtctctggcattctgggagggtcagtcactctgcctctcaatatttccgttgacaccgaaatcgagaatgtgatctggataggccctaagaatgcactagcctttgcacgacccaaggagaacgtcactatcatggtaaaaagctatctggggcgcctcgacattaccaaatggtcatactccctgtgcatctccaacctgacactgaacgatgccggcagctacaaagcccagatcaatcagagaaattttgaggtcaccacagaggaagaatttaccttgtttgtgtatgaacaactccaggagccacaggtcacaatgaagagcgtcaaggtttccgaaaatttctcatgcaatatcaccttaatgtgctctgtgaaaggcgctgagaagagtgtgctgtactcttggacccctagagaaccccacgctagcgagagcaacggcggcagcatactcaccgtgtcccgcaccccatgcgacccggacctgccctacatctgtaccgctcaaaaccccgtctcccagcgctcgtcactccctgtccacgtgggccaattctgcactgacccaggagccagcagaggcggcaccacaggcgaaaccgttgtgggcgtcttaggcgaaccagtgacccttccattagcactccctgcctgccgggatacagagaaggtggtttggctttttaacacctcaataatctctaaggaaagagaggaagcagccacagcagaccccctgatcaagtctcgggacccctacaaaaatagggtttgggtctcttctcaggattgcagcctcaagattagtcaactgaaaatcgaggatgcaggcccctaccatgcatatgtgtgctccgaagcatctagcgtcacctccatgactcacgtcacccttctaatatatagaaggctacgaaagccaaaaattacttggtctctcagacactccgaggacggaatatgccgcatttctctgacatgttcggtggaagatggtggtaatacggtcatgtacacctggaccccgctgcagaaagaggccgttgtatcccagggggaaagtcatctgaacgtttcctggagaagctctgagaaccatccaaacctgacctgcacagcctccaacccagtgtcccgctcgagccatcagttccttagcgaaaatatctgtagcggcccagagaggaacacaaagttgtggattggtcttttcttaatggtctgcctgctttgcgtaggcatcttcagctggtgtatttggaaacggaagggtaggtgttcagtaccagccttctgctcatcccaagccgaagcccctgcggacacgcccgaaccaaccgccggtcacacactctatagcgtgctgagccaggggtatgagaaactggacacccccctgagacccgctagacagcagcccacgccaacgagcgattcatcttctgattcgaacctcactactgaggaggacgaagacaggcctgaggtccacaaaccaatctccggaaggtacgaggtattcgatcaagtgactcaggaaggtgctggccacgatcccgccccagagggtcaggccgactatgaccccgtcaccccttatgtgaccgaagtggagagtgtcgtgggggagaatactatgtatgcacaggttttcaatcttcaaggaaagaccccggtctctcagaaagaggagtcctcggccacaatctactgttcaatcagaaaaccacaagtggtagttcctcccccccaacagaacgaccttgagataccggagagcccaacttacgaaaattttacatag

SEQ ID NO: 298021 - DNA, 1971 bp, Artificial Sequence
  derived and/or modified sequence
atggtggcacccaaatctcataccgatgactgggcgcctggtccttttagctcaaagcctcagcgcagtcagctgcagatcttctccagcgttctccagaccagtctgctatttctgcttatgggtctccgcgcatccggaaaggattccgcgccaacagtggtgtctgggatactgggcggatcagttactcttccccttaatatctccgtcgatacagaaatcgagaacgttatttggatcggtcccaagaatgctctcgccttcgcccgtcccaaagaaaacgtaactattatggtgaagagttacctcggcaggctggacatcactaagtggagctattccctctgtatttcaaatctcaccctcaatgatgcaggttcttacaaggcccagattaaccagagaaactttgaagttacgaccgaggaggaattcacattgttcgtgtacgagcagctgcaggaaccccaggtcacaatgaagagcgttaaggtgagcgagaatttcagctgcaacatcactctgatgtgttccgtgaaaggggcagaaaaatctgtcttgtacagttggactccacgggagccgcacgcctccgaatcaaacggaggcagcattctcaccgtctcaaggacaccgtgtgaccccgatcttccctatatttgcactgcccagaatccagtgtcccagcgctcctctttgccggtgcacgtggggcagttttgtacagaccccggagcttcccgcggtggtaccacgggcgaaactgttgtgggcgtcctgggcgagcctgtgaccctgcccctggccctacccgcatgtagggataccgagaaagtcgtgtggctattcaacactagcattatttctaaagagcgcgaggaggctgcgaccgcagacccccttataaagagcagggacccatacaaaaatagagtgtgggtgagttcccaagattgctccttgaaaatttctcagttgaagatcgaagacgccggtccatatcacgcatacgtctgttccgaggcttcgtctgtgaccagtatgacgcatgtgaccctactgatttatcggaggctgcggaaaccgaaaatcacgtggtctctgcgtcactccgaggatggcatatgtcggatcagcctgacttgcagtgtggaggatggaggaaacaccgtgatgtatacatggacaccgctgcaaaaagaggccgtggtaagccaaggtgaatcgcatctcaatgtgagctggcggagttccgagaatcatcccaacctcacttgcacagcgtctaatccagtgagtagaagtagtcatcaatttttgtctgagaatatatgttccggcccagaacgcaacaccaaattatggatcggtctctttcttatggtgtgtctgctatgtgtgggaattttttcctggtgtatttggaagagaaaaggaaggtgtagtgtccctgctttttgctcctctcaagctgaggcaccagcggatactcctgaaccgacggcaggacatactctctatagtgtgctgtcgcaaggctatgagaagctcgatactcccctgcggcctgcccgtcagcagcccacaccaacctctgacagctctagcgattctaacctaacaaccgaagaggatgaggaccgcccagaagtgcacaaacccatcagtgggaggtatgaggtttttgaccaagtgacacaggaaggggcaggacacgatcccgctcccgagggacaagctgactacgatcctgtgaccccatacgtcacagaggtagaaagcgtggtcggcgagaatacaatgtacgcccaggtgttcaatttacaaggaaaaactccggtgtcacagaaagaggagtcgtccgctacaatctactgcagtatccggaaacctcaggtggtggtgccccctcctcagcagaacgacttagagatccccgagtctccaacctacgagaatttcacgtag

SEQ ID NO: 298022 - DNA, 1971 bp, Artificial Sequence
  derived and/or modified sequence
atggtggcccccaagagccacaccgacgactgggcccccggccccttcagcagcaagccccagagaagccagctgcagatcttcagcagcgtgctgcagaccagcctgctgttcctgctgatgggcctgagagccagcggcaaggacagcgcccccaccgtggtgagcggcatcctgggcggcagcgtgaccctgcccctgaacatcagcgtggacaccgagatcgagaacgtgatctggatcggccccaagaacgccctggccttcgccagacccaaggagaacgtgaccatcatggtgaagagctacctgggcagactggacatcaccaagtggagctacagcctgtgcatcagcaacctgaccctgaacgacgccggcagctacaaggcccagatcaaccagagaaacttcgaggtgaccaccgaggaggagttcaccctgttcgtgtacgagcagctgcaggagccccaggtgaccatgaagagcgtgaaggtgagcgagaacttcagctgcaacatcaccctgatgtgcagcgtgaagggcgccgagaagagcgtgctgtacagctggacccccagagagccccacgccagcgagagcaacggcggcagcatcctgaccgtgagcagaaccccctgcgaccccgacctgccctacatctgcaccgcccagaaccccgtgagccagagaagcagcctgcccgtgcacgtgggccagttctgcaccgaccccggcgccagcagaggcggcaccaccggcgagaccgtggtgggcgtgctgggcgagcccgtgaccctgcccctggccctgcccgcctgcagagacaccgagaaggtggtgtggctgttcaacaccagcatcatcagcaaggagagagaggaggccgccaccgccgaccccctgatcaagagcagagacccctacaagaacagagtgtgggtgagcagccaggactgcagcctgaagatcagccagctgaagatcgaggacgccggcccctaccacgcctacgtgtgcagcgaggccagcagcgtgaccagcatgacccacgtgaccctgctgatctacagaagactgagaaagcccaagatcacctggagcctgagacacagcgaggacggcatctgcagaatcagcctgacctgcagcgtggaggacggcggcaacaccgtgatgtacacctggacccccctgcagaaggaggccgtggtgagccagggcgagagccacctgaacgtgagctggagaagcagcgagaaccaccccaacctgacctgcaccgccagcaaccccgtgagcagaagcagccaccagttcctgagcgagaacatctgcagcggccccgagagaaacaccaagctgtggatcggcctgttcctgatggtgtgcctgctgtgcgtgggcatcttcagctggtgcatctggaagagaaagggcagatgcagcgtgcccgccttctgcagcagccaggccgaggcccccgccgacacccccgagcccaccgccggccacaccctgtacagcgtgctgagccagggctacgagaagctggacacccccctgagacccgccagacagcagcccacccccaccagcgacagcagcagcgacagcaacctgaccaccgaggaggacgaggacagacccgaggtgcacaagcccatcagcggcagatacgaggtgttcgaccaggtgacccaggagggcgccggccacgaccccgcccccgagggccaggccgactacgaccccgtgaccccctacgtgaccgaggtggagagcgtggtgggcgagaacaccatgtacgcccaggtgttcaacctgcagggcaagacccccgtgagccagaaggaggagagcagcgccaccatctactgcagcatcagaaagccccaggtggtggtgccccccccccagcagaacgacctggagatccccgagagccccacctacgagaacttcacctag

SEQ ID NO: 298023 - protein, 526 aa, Artificial Sequence
  derived and/or modified sequence
MGLRASGKDSAPTVVSGILGGSVTLPLNISVDTEIENVIWIGPKNALAFARPKENVTIMVKSYLGRLDITKWSYSLCISNLTLNDAGSYKAQINQRNFEVTTEEEFTLFVYEQLQEPQVTMKSVKVSENFSCNITLMCSVKGAEKSVLYSWTPREPHASESNGGSILTVSRTPCDPDLPYICTAQNPVSQRSSLPVHVGQFCTDPGASRGGTTGETVVGVLGEPVTLPLALPACRDTEKVVWLFNTSIISKEREEAATADPLIKSRDPYKNRVWVSSQDCSLKISQLKIEDAGPYHAYVCSEASSVTSMTHVTLLIYRPERNTKLWIGLFLMVCLLCVGIFSWCIWKRKGRCSVPAFCSSQAEAPADTPEPTAGHTLYSVLSQGYEKLDTPLRPARQQPTPTSDSSSDSNLTTEEDEDRPEVHKPISGRYEVFDQVTQEGAGHDPAPEGQADYDPVTPYVTEVESVVGENTMYAQVFNLQGKTPVSQKEESSATIYCSIRKPQVVVPPPQQNDLEIPESPTYENFT

SEQ ID NO: 298024 - DNA, 1581 bp, Artificial Sequence
  derived and/or modified sequence
atggggttgagggccagcgggaaagatagtgctccaacagtggtgtctggtatcctaggcggatcagttacactgcccctgaacattagcgttgatacagagattgaaaacgttatctggataggacccaaaaacgccctcgcctttgcgcggcccaaggagaacgtgacaatcatggtgaaatcctatttgggcagactcgatattactaaatggtcttactccctgtgcataagcaatcttacgttgaacgatgctggctcttacaaggcccaaatcaatcagcgtaactttgaggtgactaccgaagaagagtttacacttttcgtctatgagcagctgcaggaaccccaggtcacaatgaaaagtgttaaagtgtcggaaaacttttcctgcaacataacacttatgtgctccgtcaagggagcggagaaatctgtcctctactcgtggaccccccgagaaccacacgcctcagagtcgaatggaggatctatacttactgtcagcaggacaccatgcgacccggacctgccttatatctgcacagctcagaaccccgtgagccagcgcagttcactgccggtccacgtgggacaattctgcacagatccgggcgcaagcaggggagggactaccggggagaccgtggtgggcgtgctcggggagccagtgacccttcccttggcgctgcctgcttgcagggacaccgaaaaagtggtttggttgttcaatacaagtataatcagtaaagaaagagaagaggccgccaccgctgatccactgattaaaagcagggatccctataagaatcgcgtctgggtgtcttcccaggattgttcactcaagatttctcagctgaaaattgaggacgccggaccgtatcacgcctacgtttgcagtgaagcgtcctccgttacaagtatgacacacgttactctgctcatttatcgcccggagaggaatacgaaactgtggatcggcctcttccttatggtctgtctgctgtgtgtaggaattttctcctggtgcatctggaagaggaagggaaggtgttctgtgccagctttctgctccagccaggcggaggcacctgctgatacacctgagcccacggcgggacacactctctatagcgttctatcccaaggctatgaaaaactggatacgcctttgcgcccagctcggcagcagcctacccccacatcagacagtagttccgatagtaatctgacaaccgaagaagatgaagatcgaccggaggtgcacaagcctatatcaggccggtacgaggtctttgatcaggtcacccaagagggagccggccatgacccagcacctgagggccaagccgattacgaccccgtaaccccttacgtgactgaagtggaaagcgttgtgggcgaaaacaccatgtacgcgcaggtattcaatttgcagggaaagactcctgtgtctcagaaagaggagtcctcagcaaccatttactgctctattcggaaaccccaggttgtagtgccaccaccgcagcagaacgacttggaaattcccgagagcccaacgtacgagaattttacatag

SEQ ID NO: 298025 - DNA, 1581 bp, Artificial Sequence
  derived and/or modified sequence
atgggcctgcgggccagcggcaaggacagcgcccccaccgtggtgtctggcatcctgggcggctctgtgaccctgcccctgaacatctctgtggacacagaaattgaaaatgtcatctggattggccccaagaatgccctggcctttgcccggcccaaggaaaatgtgaccatcatggtgaagagctacctgggccgcctggacatcaccaagtggagctacagcctgtgcatcagcaacctgaccctgaatgatgctggcagctacaaggcccagatcaaccagaggaactttgaggtgaccacagaggaggagttcaccctgtttgtgtatgagcagctgcaggagccccaggtgaccatgaagtctgtgaaggtgtctgagaacttcagctgcaacatcaccctgatgtgcagcgtgaagggagctgagaagtctgtgctgtacagctggaccccccgggagccccacgccagcgagagcaatggaggcagcatcctgactgtgtccaggaccccctgtgaccctgacctgccctacatctgcacagcccagaaccctgtgtcccagaggagcagcctgcctgtgcacgtgggccagttctgcacagatcctggggccagccggggcggcaccactggagagaccgtggtgggcgtgctgggggagcctgtgaccctgcccctggccctgcctgcctgccgggacacagagaaggtggtgtggctgttcaacaccagcatcatcagcaaggagcgggaggaggccgccacagctgaccccctcatcaagagccgggacccctacaagaacagagtgtgggtgagcagccaggactgcagcctgaagatcagccagctgaagattgaagatgctggcccctaccacgcctacgtgtgcagcgaggccagctctgtgacctccatgacccacgtgaccctgctgatctacagacctgagaggaacaccaagctgtggattggcctcttcctgatggtgtgcctgctgtgtgtgggcatcttctcctggtgcatctggaagaggaagggccgctgcagcgtgcctgccttctgcagcagccaggccgaggccccagctgacaccccagagcccacagctggccacaccctgtacagcgtgctgagccagggctatgagaagctggacacccccctgcggcctgcccggcagcagcccacccccaccagtgacagcagcagtgacagcaacctgaccacagaagaagatgaagatagacctgaggtgcacaagcccatcagcggccgctatgaggtgtttgaccaggtgacccaggagggcgccggccatgaccctgcccctgagggccaggccgactatgaccctgtgaccccctacgtgacagaggtggagagcgtggtgggggagaacaccatgtatgcccaggtgttcaacctgcagggcaagacccctgtgtcccagaaggaggagagcagcgccaccatctactgcagcatcaggaagccccaggtggtggtgcccccaccccagcagaatgacctggagatccctgagagccccacctatgagaacttcacctag

SEQ ID NO: 298026 - DNA, 1581 bp, Artificial Sequence
  derived and/or modified sequence
atgggcctgcgggccagcggcaaggacagcgcccccaccgtggtgtcgggcattttgggggggagcgtcactctgcccctgaacatcagcgtggacacagaaatagagaatgttatatggatcgggcctaagaatgccctggcctttgctaggcctaaagagaatgtgacaatcatggtgaaatcttatttagggagactggatattaccaagtggagctattcactctgtattagcaatctcactctaaacgatgcaggctcttataaagctcagattaatcagaggaactttgaggttactacggaggaggaattcaccctctttgtatacgagcagcttcaagaaccgcaagtcacaatgaaatccgttaaagtgagcgagaactttagctgcaatattacgcttatgtgctccgtaaagggtgccgagaaaagcgtactatattcttggacaccccgcgagcctcacgcttcagaatctaacggtggcagcattttaaccgtatcccgaacaccttgcgaccccgaccttccctacatctgcactgcgcagaaccctgtgagtcagagatcctccctgccagtccatgtaggccagttttgcaccgaccccggagcctctcggggcggtactaccggagagacagtggtcggagtgttgggagagcccgtcaccctacctctggccctgcccgcctgccgcgataccgagaaggtggtctggctgttcaacacatctatcataagtaaggagcgggaggaagctgcgacagctgatcctctgattaagagtcgcgacccctataaaaatcgagtgtgggtgagttcccaagactgttctcttaaaatctctcaattgaagattgaagacgctggaccctaccacgcttatgtgtgctccgaagcttcgagcgttacatcaatgacacatgtgactttgctgatttaccggcctgagcggaataccaaactctggattggtctgtttcttatggtgtgtctgctctgtgtcggtatcttttcttggtgcatctggaagcgtaaaggccggtgctccgtccctgccttctgcagttcacaggctgaagctcctgcagacacaccagagcctacagccggacataccctgtactcagtcctgagtcaaggctacgagaaattggacactcctcttaggcccgcaaggcaacagccgacaccgaccagcgattcatccagtgacagcaatctgaccacagaggaagacgaagataggccagaggttcacaagcccataagcgggcgctacgaagttttcgaccaggtgacacaggagggagccggacacgatccagcccccgagggccaagccgattatgaccccgttactccttacgtgaccgaagttgagagtgttgtgggggagaatactatgtatgctcaggtctttaacttacagggcaaaactcctgttagccaaaaggaggagagttcggctactatatactgcagcatccgaaagccacaggttgtagtcccccctccccaacagaatgacctcgagatccctgaatcaccaacttacgagaacttcacatag

SEQ ID NO: 298027 - DNA, 1581 bp, Artificial Sequence
  derived and/or modified sequence
atgggcctgagagcatccggaaaagactcagccccaacagtggttagtgggattctggggggttcagtcaccttgcctttaaatatcagcgtagacactgaaatcgaaaacgtgatatggatcggcccaaaaaacgctctcgcttttgctcgtcctaaggaaaacgttactatcatggtgaaaagctatctcgggagactggacataaccaaatggagttactccctctgcattagtaacctgactctgaatgatgccggttcctacaaagcccagatcaatcaacggaacttcgaggtgaccacagaggaggaatttactctgttcgtgtacgagcagctccaggaaccccaggtcactatgaaaagtgtcaaagtgtccgagaacttcagttgtaacatcaccctgatgtgctccgtgaagggagcagagaagtccgttctgtatagctggacccctcgcgagccccatgcttctgaaagtaatgggggaagcattctgactgtctctcgcactccttgcgaccctgacctgccttacatatgtaccgctcagaacccagtctctcagagatcaagtcttccagtacacgtcggccagttctgcactgatccaggcgctagtagaggcggtaccacaggcgagaccgtggttggggttctgggcgaacctgttaccctccctctcgcgctgcctgcctgccgagatactgagaaggtggtatggctcttcaatacaagcatcatcagtaaggaaagagaggaggcggctaccgcagatcctcttattaagtcgagggacccatacaagaatcgcgtgtgggtttctagccaagactgcagcctgaaaatcagccaactcaagatagaggacgcgggaccttaccacgcctatgtttgcagcgaggcgtcatccgtaacttccatgacgcatgtgacactcttgatttacagacccgagagaaataccaagctgtggattgggctgtttcttatggtttgtctgctgtgcgtgggcattttcagctggtgtatctggaaaagaaaaggacgctgcagcgtaccagcgttctgcagctcccaggctgaagcgccagcggatactccggagcctacagcgggacatacgctctactctgtgctgtcgcaaggttatgaaaaactcgatacccctctccgaccagctcgccagcagccaacgccaaccagcgacagctcttctgacagtaatctgacaactgaagaagacgaggatcgcccagaagtgcataagccaattagcgggcgatatgaggtgtttgaccaggtgacacaggagggagccggtcacgatccagcacctgaggggcaggcagattatgatccagttacgccttacgtaactgaggtggagtcagtggtgggagaaaacacaatgtacgcacaggtctttaatctgcagggaaaaacccctgtgagccagaaggaagagagctctgccaccatttactgttctattagaaaaccccaggtagtggttccgcctccccaacaaaatgacctggagattcccgagtcccccacctacgaaaactttacctag

SEQ ID NO: 298028 - DNA, 1581 bp, Artificial Sequence
  derived and/or modified sequence
atgggcctgagagccagcggcaaggacagcgcccccaccgtggtgagcggcatcctgggcggcagcgtgaccctgcccctgaacatcagcgtggacaccgagatcgagaacgtgatctggatcggccccaagaacgccctggccttcgccagacccaaggagaacgtgaccatcatggtgaagagctacctgggcagactggacatcaccaagtggagctacagcctgtgcatcagcaacctgaccctgaacgacgccggcagctacaaggcccagatcaaccagagaaacttcgaggtgaccaccgaggaggagttcaccctgttcgtgtacgagcagctgcaggagccccaggtgaccatgaagagcgtgaaggtgagcgagaacttcagctgcaacatcaccctgatgtgcagcgtgaagggcgccgagaagagcgtgctgtacagctggacccccagagagccccacgccagcgagagcaacggcggcagcatcctgaccgtgagcagaaccccctgcgaccccgacctgccctacatctgcaccgcccagaaccccgtgagccagagaagcagcctgcccgtgcacgtgggccagttctgcaccgaccccggcgccagcagaggcggcaccaccggcgagaccgtggtgggcgtgctgggcgagcccgtgaccctgcccctggccctgcccgcctgcagagacaccgagaaggtggtgtggctgttcaacaccagcatcatcagcaaggagagagaggaggccgccaccgccgaccccctgatcaagagcagagacccctacaagaacagagtgtgggtgagcagccaggactgcagcctgaagatcagccagctgaagatcgaggacgccggcccctaccacgcctacgtgtgcagcgaggccagcagcgtgaccagcatgacccacgtgaccctgctgatctacagacccgagagaaacaccaagctgtggatcggcctgttcctgatggtgtgcctgctgtgcgtgggcatcttcagctggtgcatctggaagagaaagggcagatgcagcgtgcccgccttctgcagcagccaggccgaggcccccgccgacacccccgagcccaccgccggccacaccctgtacagcgtgctgagccagggctacgagaagctggacacccccctgagacccgccagacagcagcccacccccaccagcgacagcagcagcgacagcaacctgaccaccgaggaggacgaggacagacccgaggtgcacaagcccatcagcggcagatacgaggtgttcgaccaggtgacccaggagggcgccggccacgaccccgcccccgagggccaggccgactacgaccccgtgaccccctacgtgaccgaggtggagagcgtggtgggcgagaacaccatgtacgcccaggtgttcaacctgcagggcaagacccccgtgagccagaaggaggagagcagcgccaccatctactgcagcatcagaaagccccaggtggtggtgccccccccccagcagaacgacctggagatccccgagagccccacctacgagaacttcacctag

SEQ ID NO: 298029 - protein, 385 aa, Artificial Sequence
  derived and/or modified sequence
MEPPGRRECPFPSWRFPGLLLAAMVLLLYSFSDACEEPPTFEAMELIGKPKPYYEIGERVDYKCKKGYFYIPPLATHTICDRNHTWLPVSDDACYRETCPYIRDPLNGQAVPANGTYEFGYQMHFICNEGYYLIGEEILYCELKGSVAIWSGKPPICEKVLCTPPPKIKNGKHTFSEVEVFEYLDAVTYSCDPAPGPDPFSLIGESTIYCGDNSVWSRAAPECKVVKCRFPVVENGKQISGFGKKFYYKATVMFECDKGFYLDGSDTIVCDSNSTWDPPVPKCLKVLPPSSTKPPALSHSVSTSSTTKSPASSASGYPKPEEGILDSLDVWVIAVIVIAIVVGVAVICVVPYRYLQRRKKKGKADGGAEYATYQTKSTTPAEQRG

SEQ ID NO: 298030 - DNA, 1158 bp, Artificial Sequence
  derived and/or modified sequence
atggagccccctggaagaagagaatgtccattccctagctggcgtttccccggtttactcctggctgctatggtgctactgttgtattctttctctgacgcctgtgaggaaccacctactttcgaagccatggagctgatcggtaaaccgaagccgtactatgagatcggggagagggtggactacaagtgcaaaaaggggtatttctatatcccaccccttgccacccacacaatttgcgatcggaatcatacctggcttcccgtgagtgatgatgcatgctatagagagacttgtccctacatacgagatccactgaacggccaggccgtgcctgcgaatgggacatacgaatttggctaccagatgcactttatttgcaacgagggctattatctgatcggcgaggagatactttactgcgagctgaaaggctccgttgccatttggtctggcaagccgccgatttgtgagaaggtgctgtgcacccccccacctaagatcaagaacgggaagcacaccttctccgaagtggaagtgttcgagtacctagatgccgtgacgtactcctgtgatcctgcgccggggcctgacccattctcactcatcggagaatcgacaatttactgcggcgacaacagcgtctggagccgggctgcacccgagtgtaaggtggtgaagtgcaggtttcctgtggtggagaatgggaagcagatcagtggctttggtaaaaaattttactacaaggctacagtgatgttcgaatgtgacaagggcttctatcttgatggtagcgataccattgtgtgcgactctaactcaacctgggatccacccgttcctaaatgtttgaaggttctccccccctctagcacaaaaccccccgctctttcccatagtgtcagcacatcttccactacaaaatctccggcatcctctgcaagtggataccccaagccggaggaaggaatactggattcactcgatgtatgggtcatcgctgtcatcgttatcgcaatcgtagtcggggtggcagttatttgcgtcgtgccttatagatatctccagagaagaaaaaagaaggggaaggctgatggaggggccgagtacgctacataccaaacaaaatctactaccccagcggaacaaagggggtag

SEQ ID NO: 298031 - DNA, 1158 bp, Artificial Sequence
  derived and/or modified sequence
atggagcccccaggccggcgggagtgccccttccccagctggaggtttcctggcctgctgctggccgccatggtgctgctgctgtacagcttcagtgatgcctgtgaggagccccccacctttgaggccatggagctgattggcaagcccaagccctactatgagatcggggagcgggtggactacaagtgcaagaagggctacttctacatcccccccctggccacccacaccatctgtgacaggaaccacacctggctgcctgtgtctgatgatgcctgctaccgggagacctgcccctacatccgggaccccctgaatggccaggccgtgcctgccaacggcacctatgaatttggctaccagatgcacttcatctgcaatgaaggctactacctgattggagaggagatcctgtactgtgagctgaagggctctgtggccatctggagcggcaagccacccatctgtgagaaggtgctgtgcaccccaccacccaagatcaagaatggcaagcacaccttcagcgaggtggaggtgtttgagtacctggatgctgtgacctacagctgtgaccctgcccctggccctgaccccttcagcctgattggagagagcaccatctactgtggggacaacagcgtgtggagcagagctgcccctgagtgcaaggtggtgaagtgccgcttccctgtggtggagaatggcaagcagatcagcggctttgggaagaagttctactacaaggccaccgtgatgtttgaatgtgacaagggcttctacctggatggcagtgacaccatcgtgtgtgacagcaacagcacctgggacccccctgtgcccaagtgcctgaaggtgctgccccccagcagcaccaagcccccagccctgagccacagcgtgtccaccagcagcaccaccaagagccctgccagcagcgccagcggctaccccaagccagaggagggcatcctggacagcctggatgtgtgggtgattgctgtgattgtcatcgccatcgtggtgggcgtggccgtcatctgtgtggtgccctaccgctacctgcagaggaggaagaagaagggcaaggcagatggaggagcagaatatgccacctaccagaccaagagcaccaccccagctgagcagaggggctag

SEQ ID NO: 298032 - DNA, 1158 bp, Artificial Sequence
  derived and/or modified sequence
atggagccccccggccggcgggagtgccccttccccagctggcggtttccagggctgctcttggcagcaatggtcctgttactgtactccttctcggacgcctgcgaggaaccgccgacttttgaggctatggagttaattggtaagcccaaaccatactatgagataggagagcgagttgattacaaatgcaaaaagggatatttttacatacctccactcgccacccataccatttgcgacaggaaccatacttggctgccggtttcagatgacgcttgctatcgagaaacttgtccgtacatccgtgatcctctcaatgggcaggccgtgcccgccaacggcacttatgagttcggataccagatgcatttcatctgcaacgaaggctattacctgatcggcgaagaaatcctctactgcgaattgaagggttctgtcgccatatggtcaggaaagcccccaatctgcgagaaagtactatgtacgcccccaccaaaaatcaaaaatggaaagcacaccttcagcgaagttgaagtgtttgagtacctcgacgccgttacctatagctgtgaccccgctcccgggcctgacccctttagtcttatcggagagagcactatctattgcggcgacaatagcgtttggtcccgcgctgcccccgaatgcaaggttgtcaaatgtcgatttcctgtcgtggaaaacggtaaacaaattagcggattcggcaaaaagttctattataaggctactgtgatgtttgagtgtgataaaggcttctacctcgatggatcagacaccattgtgtgcgattccaacagtacatgggatccccccgttcctaaatgccttaaggtgctccccccttccagcaccaaaccccctgccctctctcatagcgtttctacctccagtacaactaagtccccagcttcgagcgctagcggttatcccaaacctgaggaagggatcctggattctcttgacgtgtgggtgattgccgtgatcgttattgctatagtcgtgggagtggccgtcatctgtgttgtgccataccgttacttgcagaggcggaagaaaaaaggcaaagccgacggcggagctgagtatgcgacctatcaaaccaaatctacgactccggctgagcaacgcggctag

SEQ ID NO: 298033 - DNA, 1158 bp, Artificial Sequence
  derived and/or modified sequence
atggaacctcccggacgcagagagtgtcctttcccaagttggcggttcccaggactactgctggctgccatggttctgctgctgtattccttcagcgatgcgtgcgaggagccgccaaccttcgaagccatggaactgatcggaaaacctaagccctattacgaaattggggaaagagtcgattataagtgcaagaaaggatatttttacattcctcctctcgcaactcacactatttgtgacagaaaccatacttggctgcctgtcagcgacgatgcatgctatcgcgaaacctgcccttacataagagatccactcaacggacaagcggtgccagccaacggtacctacgagtttgggtaccagatgcatttcatttgcaatgagggctactacctgatcggagaggagattctgtactgcgagctcaaaggttccgtggctatctggtccggcaagcccccaatttgtgagaaagtgctctgcactccgccacccaagatcaagaatgggaaacacacgttttccgaagtggaggtattcgagtatctggatgcggtgacctatagctgcgatcctgcacccggaccagaccccttttccctcatcggtgagagtactatctattgcggagacaattcagtgtggtcacgcgctgccccagagtgcaaggtggttaaatgccgttttcccgtagttgagaacggaaaacagatatcaggcttcggtaaaaagttctattataaggcaacggtgatgttcgaatgcgataagggtttctaccttgatggctctgatactatcgtttgtgacagcaatagcacctgggacccaccagtgcccaagtgtctgaaggttctcccaccaagctctaccaagccacctgccctgagtcattcagtctcaactagcagtaccaccaagagtcccgcatctagcgcctctggataccccaagcctgaggaaggcatactggattcccttgatgtgtgggtgatagccgtgatagtgatcgccattgtggtgggcgtagctgttatatgcgttgtcccatatagatatttgcagcgcaggaaaaagaagggcaaagcggacggtggcgctgagtatgccacctaccagacaaaatcgactacaccggcagagcaacgaggatag

SEQ ID NO: 298034 - DNA, 3236 bp, Artificial Sequence
  derived and/or modified sequence
gctcgggccacgcccacctgtcctgcagcactggatgctttgtgagttggggattgttgcgtcccatatctggacccagaagggacttccctgctcggctggctctcggtttctctgctttcctccggagaaataacagcgtcttccgcgccgcgcatggagcctcccggccgccgcgagtgtccctttccttcctggcgctttcctgggttgcttctggcggccatggtgttgctgctgtactccttctccgatgcctgtgaggagccaccaacatttgaagctatggagctcattggtaaaccaaaaccctactatgagattggtgaacgagtagattataagtgtaaaaaaggatacttctatatacctcctcttgccacccatactatttgtgatcggaatcatacatggctacctgtctcagatgacgcctgttatagagaaacatgtccatatatacgggatcctttaaatggccaagcagtccctgcaaatgggacttacgagtttggttatcagatgcactttatttgtaatgagggttattacttaattggtgaagaaattctatattgtgaacttaaaggatcagtagcaatttggagcggtaagcccccaatatgtgaaaaggttttgtgtacaccacctccaaaaataaaaaatggaaaacacacctttagtgaagtagaagtatttgagtatcttgatgcagtaacttatagttgtgatcctgcacctggaccagatccattttcacttattggagagagcacgatttattgtggtgacaattcagtgtggagtcgtgctgctccagagtgtaaagtggtcaaatgtcgatttccagtagtcgaaaatggaaaacagatatcaggatttggaaaaaaattttactacaaagcaacagttatgtttgaatgcgataagggtttttacctcgatggcagcgacacaattgtctgtgacagtaacagtacttgggatcccccagttccaaagtgtcttaaagtgctgcctccatctagtacaaaacctccagctttgagtcattcagtgtcgacttcttccactacaaaatctccagcgtccagtgcctcaggatatcctaaacctgaggaaggaatacttgacagtttggatgtttgggtcattgctgtgattgttattgccatagttgttggagttgcagtaatttgtgttgtcccgtacagatatcttcaaaggaggaagaagaaagggaaagcagatggtggagctgaatatgccacttaccagactaaatcaaccactccagcagagcagagaggctgaatagattccacaacctggtttgccagttcatcttttgactctattaaaatcttcaatagttgttattctgtagtttcactctcatgagtgcaactgtggcttagctaatattgcaatgtggcttgaatgtaggtagcatcctttgatgcttctttgaaacttgtatgaatttgggtatgaacagattgcctgctttcccttaaataacacttagatttattggaccagtcagcacagcatgcctggttgtattaaagcagggatatgctgtattttataaaattggcaaaattagagaaatatagttcacaatgaaattatattttctttgtaaagaaagtggcttgaaatcttttttgttcaaagattaatgccaactcttaagattattctttcaccaactatagaatgtattttatatatcgttcattgtaaaaagcccttaaaaatatgtgtatactactttggctcttgtgcataaaaacaagaacactgaaaattgggaatatgcacaaacttggcttctttaaccaagaatattattggaaaattctctaaaagttaatagggtaaattctctattttttgtaatgtgttcggtgatttcagaaagctagaaagtgtatgtgtggcatttgttttcactttttaaaacatccctaactgatcgaatatatcagtaatttcagaatcagatgcatcctttcataagaagtgagaggactctgacagccataacaggagtgccacttcatggtgcgaagtgaacactgtagtcttgttgttttcccaaagagaactccgtatgttctcttaggttgagtaacccactctgaattctggttacatgtgtttttctctccctccttaaataaagagaggggttaaacatgccctctaaaagtaggtggttttgaagagaataaattcatcagataacctcaagtcacatgagaatcttagtccatttacattgccttggctagtaaaagccatctatgtatatgtcttacctcatctcctaaaaggcagagtacaaagtaagccatgtatctcaggaaggtaacttcattttgtctatttgctgttgattgtaccaagggatggaagaagtaaatatagctcaggtagcactttatactcaggcagatctcagccctctactgagtcccttagccaagcagtttctttcaaagaagccagcaggcgaaaagcagggactgccactgcatttcatatcacactgttaaaagttgtgttttgaaattttatgtttagttgcacaaattgggccaaagaaacattgccttgaggaagatatgattggaaaatcaagagtgtagaagaataaatactgttttactgtccaaagacatgtttatagtgctctgtaaatgttcctttcctttgtagtctctggcaagatgctttaggaagataaaagtttgaggagaacaaacaggaattctgaattaagcacagagttgaagtttatacccgtttcacatgcttttcaagaatgtcgcaattactaagaagcagataatggtgttttttagaaacctaattgaagtatattcaaccaaatactttaatgtataaaataaatattatacaatatacttgtatagcagtttctgcttcacatttgattttttcaaatttaatatttatattagagatctatatatgtataaatatgtattttgtcaaatttgttacttaaatatatagagaccagttttctctggaagtttgtttaaatgacagaagcgtatatgaattcaagaaaatttaagctgcaaaaatgtatttgctataaaatgagaagtctcactgatagaggttctttattgctcattttttaaaaaatggactcttgaaatctgttaaaataaaattgtacatttggagatgtttca

SEQ ID NO: 298035 - DNA, 1158 bp, Artificial Sequence
  derived and/or modified sequence
atggagccccccggcagaagagagtgccccttccccagctggagattccccggcctgctgctggccgccatggtgctgctgctgtacagcttcagcgacgcctgcgaggagccccccaccttcgaggccatggagctgatcggcaagcccaagccctactacgagatcggcgagagagtggactacaagtgcaagaagggctacttctacatcccccccctggccacccacaccatctgcgacagaaaccacacctggctgcccgtgagcgacgacgcctgctacagagagacctgcccctacatcagagaccccctgaacggccaggccgtgcccgccaacggcacctacgagttcggctaccagatgcacttcatctgcaacgagggctactacctgatcggcgaggagatcctgtactgcgagctgaagggcagcgtggccatctggagcggcaagccccccatctgcgagaaggtgctgtgcacccccccccccaagatcaagaacggcaagcacaccttcagcgaggtggaggtgttcgagtacctggacgccgtgacctacagctgcgaccccgcccccggccccgaccccttcagcctgatcggcgagagcaccatctactgcggcgacaacagcgtgtggagcagagccgcccccgagtgcaaggtggtgaagtgcagattccccgtggtggagaacggcaagcagatcagcggcttcggcaagaagttctactacaaggccaccgtgatgttcgagtgcgacaagggcttctacctggacggcagcgacaccatcgtgtgcgacagcaacagcacctgggacccccccgtgcccaagtgcctgaaggtgctgccccccagcagcaccaagccccccgccctgagccacagcgtgagcaccagcagcaccaccaagagccccgccagcagcgccagcggctaccccaagcccgaggagggcatcctggacagcctggacgtgtgggtgatcgccgtgatcgtgatcgccatcgtggtgggcgtggccgtgatctgcgtggtgccctacagatacctgcagagaagaaagaagaagggcaaggccgacggcggcgccgagtacgccacctaccagaccaagagcaccacccccgccgagcagagaggctag

SEQ ID NO: 298036 - protein, 370 aa, Artificial Sequence
  derived and/or modified sequence
MEPPGRRECPFPSWRFPGLLLAAMVLLLYSFSDACEEPPTFEAMELIGKPKPYYEIGERVDYKCKKGYFYIPPLATHTICDRNHTWLPVSDDACYRETCPYIRDPLNGQAVPANGTYEFGYQMHFICNEGYYLIGEEILYCELKGSVAIWSGKPPICEKVLCTPPPKIKNGKHTFSEVEVFEYLDAVTYSCDPAPGPDPFSLIGESTIYCGDNSVWSRAAPECKVVKCRFPVVENGKQISGFGKKFYYKATVMFECDKGFYLDGSDTIVCDSNSTWDPPVPKCLKVSTSSTTKSPASSASGYPKPEEGILDSLDVWVIAVIVIAIVVGVAVICVVPYRYLQRRKKKGKADGGAEYATYQTKSTTPAEQRG

SEQ ID NO: 298037 - DNA, 1113 bp, Artificial Sequence
  derived and/or modified sequence
atggaacctcctgggagaagagagtgtccattcccaagttggaggtttcccgggctgttgcttgcggccatggtactgcttttatatagctttagcgacgcctgtgaagaaccccccactttcgaggcgatggaactcataggaaagccaaagccctactatgagatcggcgagcgagtggactataagtgtaagaagggatatttttacatccctcccctcgcgactcacactatatgcgatcggaatcacacatggttgcctgtaagtgacgatgcatgctacagggagacttgcccctacatcagagacccccttaacggtcaagccgtgccagccaacgggacttacgagtttggctatcagatgcattttatatgtaacgaagggtactacttgattggagaggagattctgtactgtgagctcaagggctcagtggccatctggagcggtaaacctccaatttgtgagaaagtgctctgtactccccctcccaagatcaagaatggtaaacataccttttctgaggtggaagtcttcgagtaccttgatgctgtcacttactcctgtgaccccgcgccagggcccgatcctttttccttgattggggagtcaacaatttactgtggtgacaattctgtgtggtctcgggcggcaccagaatgcaaggtagtgaagtgtagattcccagtagtggaaaatggcaagcaaatttctggcttcggcaagaagttttactataaggctaccgtgatgtttgagtgcgataaaggcttttacctggacgggtccgatacaatcgtttgcgactcaaatagtacttgggatcctccggtgccaaagtgtctgaaggtgagcacaagcagtaccactaagtctcctgcctcgtcggcctcagggtacccaaagcccgaggagggcatcctagatagtcttgatgtctgggtcatcgcagtcatagtaattgccatcgtcgtgggtgtggccgtcatctgcgtagtcccctaccgctacctgcagaggcgcaagaagaagggcaaagctgatggcggcgccgagtatgccacctatcagaccaagtctacaactcctgctgaacagcgcggttag

SEQ ID NO: 298038 - DNA, 1113 bp, Artificial Sequence
  derived and/or modified sequence
atggagcccccaggccggcgggagtgccccttccccagctggaggtttcctggcctgctgctggccgccatggtgctgctgctgtacagcttcagtgatgcctgtgaggagccccccacctttgaggccatggagctgattggcaagcccaagccctactatgagatcggggagcgggtggactacaagtgcaagaagggctacttctacatcccccccctggccacccacaccatctgtgacaggaaccacacctggctgcctgtgtctgatgatgcctgctaccgggagacctgcccctacatccgggaccccctgaatggccaggccgtgcctgccaacggcacctatgaatttggctaccagatgcacttcatctgcaatgaaggctactacctgattggagaggagatcctgtactgtgagctgaagggctctgtggccatctggagcggcaagccacccatctgtgagaaggtgctgtgcaccccaccacccaagatcaagaatggcaagcacaccttcagcgaggtggaggtgtttgagtacctggatgctgtgacctacagctgtgaccctgcccctggccctgaccccttcagcctgattggagagagcaccatctactgtggggacaacagcgtgtggagcagagctgcccctgagtgcaaggtggtgaagtgccgcttccctgtggtggagaatggcaagcagatcagcggctttgggaagaagttctactacaaggccaccgtgatgtttgaatgtgacaagggcttctacctggatggcagtgacaccatcgtgtgtgacagcaacagcacctgggacccccctgtgcccaagtgcctgaaggtgtccaccagcagcaccaccaagagccctgccagcagcgccagcggctaccccaagccagaggagggcatcctggacagcctggatgtgtgggtgattgctgtgattgtgattgccatcgtggtgggcgtggccgtcatctgtgtggtgccctaccgctacctgcagaggaggaagaagaagggcaaggcagatggcggcgcagaatatgccacctaccagaccaagagcaccaccccagctgagcagaggggctag

SEQ ID NO: 298039 - DNA, 1113 bp, Artificial Sequence
  derived and/or modified sequence
atggagccccccggccggcgggagtgccccttccccagctggcggttccccggtctgctgctggccgctatggtcctcttactttactctttttctgatgcatgtgaagaaccccccacatttgaagctatggagctgatagggaaaccgaagccctactacgagatcggcgagagggtcgactacaaatgtaaaaagggttatttctatatcccgcctctcgcgactcacactatttgtgacaggaaccacacctggctgcctgtgtcagacgatgcttgctatcgtgaaacatgcccatacatcagggaccccttaaacgggcaggccgtgcccgctaacggaacatacgagtttggctatcagatgcattttatttgtaacgaggggtattacctaattggcgaagagatcctatactgtgagttaaaaggttcagtcgctatctggtccggaaagcccccaatttgcgagaaagtgctgtgcacaccacctcctaagattaaaaacgggaagcatacctttagtgaggtggaggtgttcgaatatctggacgctgtaacctactcctgcgatccggcccctgggcctgatcccttctcgttaattggggaaagtaccatatattgcggggacaactctgtgtggagtagagccgctccagagtgcaaggtagttaaatgccggtttccagtggtggaaaatgggaagcaaatctccggctttgggaagaaattctactataaggcaacagtgatgttcgaatgtgataagggtttctatctcgacggctctgacactattgtgtgtgactcgaactcaacatgggacccgccagtcccgaaatgtttaaaggtgtcgacttcatcgacaaccaagtcccctgccagttccgcatccggataccctaagccggaggaagggattcttgactctctggacgtctgggtgattgcagtgatagttattgctatcgtggtgggcgtcgcggtgatctgtgtggtcccttaccggtacctacaacggagaaagaagaaggggaaagccgatggcggggccgagtatgccacgtatcagactaagtcgacaactcctgcagaacagcggggctag

SEQ ID NO: 298040 - DNA, 1113 bp, Artificial Sequence
  derived and/or modified sequence
atggagccacccggacgtagagagtgcccttttccatcatggagatttccaggcttacttctagcggctatggtgctgttgctttacagcttctcagacgcatgcgaggagccacctacctttgaggctatggagttgattggcaagccaaaaccctactacgagatcggtgagagggtggattacaaatgtaaaaagggttacttttacattcccccattggccacgcatacaatctgcgacaggaaccatacctggctaccagtttcagatgatgcctgttacagggagacctgcccatacatcagagatcccctgaatggtcaggcagtgccagccaacggaacatacgagttcggatatcagatgcacttcatctgcaacgaggggtactatctcataggtgaagagattctgtactgcgagctgaagggctccgttgccatctggtccgggaaaccacctatttgcgagaaggtcctttgtacgcctccaccgaagataaaaaacggaaagcatactttttcagaagtggaggttttcgaatacttggatgccgtgacctattcttgcgacccagctcccggtcccgacccattttccctgatcggcgaatccacaatctattgcggtgataactcagtgtggagtagagcagcaccggagtgtaaggttgtcaaatgtcgcttccccgttgtggagaacggcaagcagataagcgggtttggcaaaaagttttactacaaggctactgtgatgtttgaatgtgacaaagggttttatctggatggctcagataccattgtctgcgactcaaactctacatgggaccccccagtgccaaaatgcttgaaggtttcaaccagctcaacaaccaagtcaccggcatcttcggcatcaggatatccaaaacccgaggaaggtattcttgattcgctcgatgtgtgggttattgccgtcatagtgattgcaattgtcgtgggggttgctgtcatctgtgtagtaccctatagatatctccagcggcgaaaaaaaaagggcaaggccgatgggggagctgagtacgcaacctaccaaacaaaatctactactcccgcagagcagaggggctag

SEQ ID NO: 298041 - DNA, 1258 bp, Artificial Sequence
  derived and/or modified sequence
tatctggacccagaagggacttccctgctcggctggctctcggtttctctgctttcctccggagaaataacagcgtcttccgcgccgcgcatggagcctcccggccgccgcgagtgtccctttccttcctggcgctttcctgggttgcttctggcggccatggtgttgctgctgtactccttctccgatgcctgtgaggagccaccaacatttgaagctatggagctcattggtaaaccaaaaccctactatgagattggtgaacgagtagattataagtgtaaaaaaggatacttctatatacctcctcttgccacccatactatttgtgatcggaatcatacatggctacctgtctcagatgacgcctgttatagagaaacatgtccatatatacgggatcctttaaatggccaagcagtccctgcaaatgggacttacgagtttggttatcagatgcactttatttgtaatgagggttattacttaattggtgaagaaattctatattgtgaacttaaaggatcagtagcaatttggagcggtaagcccccaatatgtgaaaaggttttgtgtacaccacctccaaaaataaaaaatggaaaacacacctttagtgaagtagaagtatttgagtatcttgatgcagtaacttatagttgtgatcctgcacctggaccagatccattttcacttattggagagagcacgatttattgtggtgacaattcagtgtggagtcgtgctgctccagagtgtaaagtggtcaaatgtcgatttccagtagtcgaaaatggaaaacagatatcaggatttggaaaaaaattttactacaaagcaacagttatgtttgaatgcgataagggtttttacctcgatggcagcgacacaattgtctgtgacagtaacagtacttgggatcccccagttccaaagtgtcttaaagtgtcgacttcttccactacaaaatctccagcgtccagtgcctcaggatatcctaaacctgaggaaggaatacttgacagtttggatgtttgggtcattgctgtgattgttattgccatagttgttggagttgcagtaatttgtgttgtcccgtacagatatcttcaaaggaggaagaagaaagggaaagcagatggtggagctgaatatgccacttaccagactaaatcaaccactccagcagagcagagaggctgaatagattccacaacctggtttgccagttcatcttttgactctattaaaatcttca

SEQ ID NO: 298042 - DNA, 1113 bp, Artificial Sequence
  derived and/or modified sequence
atggagccccccggcagaagagagtgccccttccccagctggagattccccggcctgctgctggccgccatggtgctgctgctgtacagcttcagcgacgcctgcgaggagccccccaccttcgaggccatggagctgatcggcaagcccaagccctactacgagatcggcgagagagtggactacaagtgcaagaagggctacttctacatcccccccctggccacccacaccatctgcgacagaaaccacacctggctgcccgtgagcgacgacgcctgctacagagagacctgcccctacatcagagaccccctgaacggccaggccgtgcccgccaacggcacctacgagttcggctaccagatgcacttcatctgcaacgagggctactacctgatcggcgaggagatcctgtactgcgagctgaagggcagcgtggccatctggagcggcaagccccccatctgcgagaaggtgctgtgcacccccccccccaagatcaagaacggcaagcacaccttcagcgaggtggaggtgttcgagtacctggacgccgtgacctacagctgcgaccccgcccccggccccgaccccttcagcctgatcggcgagagcaccatctactgcggcgacaacagcgtgtggagcagagccgcccccgagtgcaaggtggtgaagtgcagattccccgtggtggagaacggcaagcagatcagcggcttcggcaagaagttctactacaaggccaccgtgatgttcgagtgcgacaagggcttctacctggacggcagcgacaccatcgtgtgcgacagcaacagcacctgggacccccccgtgcccaagtgcctgaaggtgagcaccagcagcaccaccaagagccccgccagcagcgccagcggctaccccaagcccgaggagggcatcctggacagcctggacgtgtgggtgatcgccgtgatcgtgatcgccatcgtggtgggcgtggccgtgatctgcgtggtgccctacagatacctgcagagaagaaagaagaagggcaaggccgacggcggcgccgagtacgccacctaccagaccaagagcaccacccccgccgagcagagaggctag

SEQ ID NO: 298043 - protein, 127 aa, Artificial Sequence
  derived and/or modified sequence
MTSFSTSAQCSTSDSACRISPGQINQVRPKLPLLKILHAAGAQGEMFTVKEVMHYLGQYIMVKQLYDQQEQHMVYCGGDLLGELLGRQSFSVKDPSPLYDMLRKNLVTLATATTGCQRRVNGPQRAW

SEQ ID NO: 298044 - protein, 153 aa, Artificial Sequence
  derived and/or modified sequence
MTSFSTSAQCSTSDSACRISPGQINQVRPKLPLLKILHAAGAQGEMFTVKEVMHYLGQYIMVKQLYDQQEQHMVYCGGDLLGELLGRQSFSVKDPSPLYDMLRKNLVTLATATTGSQYGYSKSRPTEAKCRGKFHFQKKNYRRRYPHTAYLRA

SEQ ID NO: 298045 - DNA, 384 bp, Artificial Sequence
  derived and/or modified sequence
atgaccagcttcagcaccagcgcccagtgcagcaccagcgacagcgcctgcagaatcagccccggccagatcaaccaggtgagacccaagctgcccctgctgaagatcctgcacgccgccggcgcccagggcgagatgttcaccgtgaaggaggtgatgcactacctgggccagtacatcatggtgaagcagctgtacgaccagcaggagcagcacatggtgtactgcggcggcgacctgctgggcgagctgctgggcagacagagcttcagcgtgaaggaccccagccccctgtacgacatgctgagaaagaacctggtgaccctggccaccgccaccaccggctgccagagaagagtgaacggcccccagagagcctggtag

SEQ ID NO: 298046 - DNA, 462 bp, Artificial Sequence
  derived and/or modified sequence
atgaccagcttcagcaccagcgcccagtgcagcaccagcgacagcgcctgcagaatcagccccggccagatcaaccaggtgagacccaagctgcccctgctgaagatcctgcacgccgccggcgcccagggcgagatgttcaccgtgaaggaggtgatgcactacctgggccagtacatcatggtgaagcagctgtacgaccagcaggagcagcacatggtgtactgcggcggcgacctgctgggcgagctgctgggcagacagagcttcagcgtgaaggaccccagccccctgtacgacatgctgagaaagaacctggtgaccctggccaccgccaccaccggcagccagtacggctacagcaagagcagacccaccgaggccaagtgcagaggcaagttccacttccagaagaagaactacagaagaagatacccccacaccgcctacctgagagcctag

SEQ ID NO: 298047 - DNA, 384 bp, Artificial Sequence
  derived and/or modified sequence
atgacctcattctccaccagcgcacagtgtagtacgtctgatagtgcttgcagaatttcccccggtcagattaaccaggtccgaccaaagcttccactgcttaagatccttcatgcagcgggagcccagggtgagatgtttaccgtgaaagaagtcatgcactatctggggcagtacattatggtgaaacagttatacgatcagcaggaacagcatatggtttactgcgggggcgacctcctgggagagttgctcggtcggcaaagtttctcggtgaaggatccgagccccctgtatgacatgctgcggaaaaatttggttacgctcgcgacagcgaccacagggtgtcagagacgagtcaatggaccgcagagggcatggtag

SEQ ID NO: 298048 - DNA, 462 bp, Artificial Sequence
  derived and/or modified sequence
atgaccagctttagtacctcagcccaatgttccaccagcgattcagcgtgtcgcatttcccccggccaaatcaatcaagtgcgacctaagctgcctttgctcaagatcctccatgcagcaggggcacagggcgagatgttcacggtgaaggaggtcatgcattacctggggcaatatattatggttaaacagctttacgaccagcaggaacaacatatggtttactgtggaggagacctccttggtgaactgcttggccgacagtcgttctctgtgaaagatccttcccctctgtacgatatgctcaggaagaatcttgtcactttggctacggcaactacaggctcccagtacggctattcgaagtcaagacctacagaggcaaaatgcagaggaaaattccactttcagaaaaaaaattataggcgccggtacccccacaccgcttacctgcgggcatag

SEQ ID NO: 298049 - DNA, 384 bp, Artificial Sequence
  derived and/or modified sequence
atgaccagcttcagcaccagcgcccagtgcagcaccagtgacagcgcctgccgcatcagccctggccagatcaaccaggtgcggcccaagctgcccctgctgaagatcctgcatgctgctggggcccagggcgagatgttcaccgtgaaggaggtgatgcactacctgggccagtacatcatggtgaagcagctgtatgaccagcaggagcagcacatggtgtactgcggcggggacctgctgggggagctgctgggccggcagagcttctctgtgaaggaccccagccccctgtatgacatgctgaggaagaacctggtgaccctggccacagccaccaccggctgccagaggagagtgaatggcccccagagggcctggtag

SEQ ID NO: 298050 - DNA, 462 bp, Artificial Sequence
  derived and/or modified sequence
atgaccagcttcagcaccagcgcccagtgcagcaccagtgacagcgcctgccgcatcagccctggccagatcaaccaggtgcggcccaagctgcccctgctgaagatcctgcatgctgctggggcccagggcgagatgttcaccgtgaaggaggtgatgcactacctgggccagtacatcatggtgaagcagctgtatgaccagcaggagcagcacatggtgtactgcggcggggacctgctgggggagctgctgggccggcagagcttctctgtgaaggaccccagccccctgtatgacatgctgaggaagaacctggtgaccctggccacagccaccaccggcagccagtatggctacagcaagagccggcccacagaggccaagtgccggggcaagttccacttccagaagaagaactacagaagacgctacccccacacagcctacctgcgggcctag

SEQ ID NO: 298051 - DNA, 863 bp, Artificial Sequence
  derived and/or modified sequence
attactcgccatttcaaaatgctgccgaggccctaggatctgtgactgccacccctccccccacccgggctcggcgggggagcgactcatggagctgccgtaagttttaccaacagactgcagtttcttcactaccaaaatgacatcattttccacctctgctcagtgttcaacatctgacagtgcttgcaggatctctcctggacaaatcaatcaggtacgaccaaaactgccgcttttgaagattttgcatgcagcaggtgcgcaaggtgaaatgttcactgttaaagaggtcatgcactatttaggtcagtacataatggtgaagcaactttatgatcagcaggagcagcatatggtatattgtggtggagatcttttgggagaactactgggacgtcagagcttctccgtgaaagacccaagccctctctatgatatgctaagaaagaatcttgtcactttagccactgctactacaggatgccaaagaagagtgaatggcccacaaagagcctggtagcacatacgcttttcaaaaggtcatgcacttacagctaaagccattaagggtctcactctgtcaccaggctggagtgcagtggcacaatctaggctcactgcagcctcgacctcccaggttcaagcaatcctcccacctcagcctcccggttagctgggactatagctatgcgccaccatgtccctatgttgcccagcctcggtgtctggatgcccagcctaaccaagtcagcttcccatctttggctgagacaaggagaaccctgctgggctaggggacccagatagtgaccaggttctgcatgtgatttccctgtggaattccaaccaaggacagacag

SEQ ID NO: 298052 - DNA, 384 bp, Artificial Sequence
  derived and/or modified sequence
atgaccagcttcagcaccagcgcccagtgcagcaccagcgacagcgcctgccgtataagccctggccagatcaaccaggtccggcctaagttgcctctcctgaagattctacacgctgcaggcgctcagggagaaatgtttacagtgaaggaagtaatgcactacctcgggcagtatatcatggtaaaacaactgtacgatcagcaggagcaacatatggtgtactgcggcggggacctgctgggggaactgttgggccgacaatcattttctgtgaaagatccctctcccctgtatgacatgttgcgcaaaaacttggtgaccctggccaccgcgacaactggatgccagaggagagtgaatgggccccagagggcttggtag

SEQ ID NO: 298053 - DNA, 462 bp, Artificial Sequence
  derived and/or modified sequence
atgaccagcttcagcaccagcgcccagtgcagcaccagcgacagcgcctgtcgaatctcaccaggccagatcaaccaggtccgccctaaactccctttgctaaagatccttcatgcagcaggggctcagggagaaatgtttacagtgaaggaggtcatgcactacctggggcagtacattatggttaaacagctctacgatcagcaggagcagcacatggtttattgtggcggggacctgcttggcgaactgcttggccgtcagagcttctcagtgaaggatccatcccctctgtacgacatgctaaggaagaacttagtgactctggccacagcgactacaggcagccaatacggctacagtaagtcccgtcctactgaggcgaagtgtcgcggcaagtttcacttccagaaaaagaattaccgacggagatacccacacactgcctatttgcgggcctag

SEQ ID NO: 298054 - DNA, 384 bp, Artificial Sequence
  derived and/or modified sequence
atgacttccttctcaacttctgcccagtgctccacaagcgactctgcatgtagaatttcccctgggcagattaatcaggttagaccgaagctgccactgctaaaaatactgcacgcagcgggtgcccagggcgagatgtttactgttaaggaagtaatgcactatcttgggcagtacattatggtgaagcagctgtatgaccagcaggagcagcatatggtctattgtgggggagatttgctgggggagctactgggacggcagtctttctcggtgaaggacccgtctcccctttatgatatgttgaggaagaatttagtgactctggccaccgccacgacaggttgtcagcgcagggtgaacgggccacagagagcctggtag

SEQ ID NO: 298055 - DNA, 462 bp, Artificial Sequence
  derived and/or modified sequence
atgactagtttctcaacctccgctcagtgctccaccagcgattccgcctgcaggatatctccgggacagatcaatcaagtgcggccaaaactacctctgttaaaaatcttacacgccgctggcgcacagggggagatgtttaccgtgaaagaggtgatgcactacctggggcagtatatcatggttaagcagctgtatgatcagcaagagcagcatatggtgtactgcggtggagatcttcttggcgagctgttgggtcgacagagcttctcggtaaaggacccaagccctctttatgacatgctcaggaagaacctcgtgacactggctacggccaccacggggtctcagtacggttacagcaaaagtaggccaacagaagccaaatgtcggggaaagttccattttcagaaaaagaattatcgcagacgatacccgcatacagcatacctccgtgcatag

SEQ ID NO: 298056 - protein, 131 aa, Artificial Sequence
  derived and/or modified sequence
MTSFSTSAQCSTSDSACRISPGQINQVRPKLPLLKILHAAGAQGEMFTVKEVMHYLGQYIMVKQLYDQQEQHMVYCGGDLLGELLGRQSFSVKDPSPLYDMLRKNLVTLATATTEMGHLFCRISHALELAD

SEQ ID NO: 298057 - DNA, 396 bp, Artificial Sequence
  derived and/or modified sequence
atgaccagcttcagcaccagcgcccagtgcagcaccagcgacagcgcctgcagaatcagccccggccagatcaaccaggtgagacccaagctgcccctgctgaagatcctgcacgccgccggcgcccagggcgagatgttcaccgtgaaggaggtgatgcactacctgggccagtacatcatggtgaagcagctgtacgaccagcaggagcagcacatggtgtactgcggcggcgacctgctgggcgagctgctgggcagacagagcttcagcgtgaaggaccccagccccctgtacgacatgctgagaaagaacctggtgaccctggccaccgccaccaccgagatgggccacctgttctgcagaatcagccacgccctggagctggccgactag

SEQ ID NO: 298058 - DNA, 396 bp, Artificial Sequence
  derived and/or modified sequence
atgacctccttctcaacatccgcgcagtgcagcacttccgacagcgcgtgtcgtatctcccccggccagataaaccaggtgcggcctaaactgccactgctcaaaatcttgcacgctgcaggagctcaaggcgaaatgttcactgttaaggaggtcatgcactatttgggtcagtacattatggttaaacaactttacgaccagcaagaacagcacatggtctactgtggcggtgatctgctcggagagctgctaggcagacaatcatttagtgttaaagatccttcacccctctacgacatgctgcgcaagaatcttgtgaccctggctaccgcgacgaccgaaatgggccacttattctgtcgcataagccacgccttggaattggccgactag

SEQ ID NO: 298059 - DNA, 396 bp, Artificial Sequence
  derived and/or modified sequence
atgaccagcttcagcaccagcgcccagtgcagcaccagtgacagcgcctgccgcatcagccctggccagatcaaccaggtgcggcccaagctgcccctgctgaagatcctgcatgctgctggggcccagggcgagatgttcaccgtgaaggaggtgatgcactacctgggccagtacatcatggtgaagcagctgtatgaccagcaggagcagcacatggtgtactgcggcggggacctgctgggggagctgctgggccggcagagcttctctgtgaaggaccccagccccctgtatgacatgctgaggaagaacctggtgaccctggccacagccaccacagagatgggccacctgttctgccgcatcagccacgccctggagctggccgactag

SEQ ID NO: 298060 - DNA, 547 bp, Artificial Sequence
  derived and/or modified sequence
caacagactgcagtttcttcactaccaaaatgacatcattttccacctctgctcagtgttcaacatctgacagtgcttgcaggatctctcctggacaaatcaatcaggtacgaccaaaactgccgcttttgaagattttgcatgcagcaggtgcgcaaggtgaaatgttcactgttaaagaggtcatgcactatttaggtcagtacataatggtgaagcaactttatgatcagcaggagcagcatatggtatattgtggtggagatcttttgggagaactactgggacgtcagagcttctccgtgaaagacccaagccctctctatgatatgctaagaaagaatcttgtcactttagccactgctactacagaaatgggtcatttgttctgtagaatttcccacgctctagagttggcagattaatgtcgctttagatgaagatgctattgttttatgaagcaaacggggaaaaatccagatttcaagatcccataaccctgtatgacttaacacttgaaagttgaaattaaatgtaaaaagccata

SEQ ID NO: 298061 - DNA, 396 bp, Artificial Sequence
  derived and/or modified sequence
atgaccagcttcagcaccagcgcccagtgcagcaccagcgacagcgcctgccggattagtcctgggcagatcaaccaggttcggcctaaactcccattgctgaagatactccacgcggctggagcgcaaggtgagatgttcactgtgaaggaggtaatgcattatctcggacaatatatcatggtcaagcagctctacgaccaacaggaacagcacatggtgtactgtggtggggatctgttaggcgaattactggggaggcagtcattcagcgttaaggatcccagtcccctttacgatatgctgcgcaagaatctggtgacactggcgacggctactactgagatggggcatctgttctgccggatcagtcatgctcttgagctcgctgattag

SEQ ID NO: 298062 - DNA, 396 bp, Artificial Sequence
  derived and/or modified sequence
atgacatctttctcgacatccgctcagtgttcaacctctgattcagcttgcaggattagccctgggcaaatcaaccaggtgaggcccaaacttccccttctcaagatcctgcacgcagcgggagctcagggggagatgtttacagtgaaggaggtaatgcactacctgggccagtacataatggttaagcagctgtacgaccagcaggagcaacatatggtgtactgcggtggagatcttttgggggagctacttgggcgtcaaagcttcagcgtcaaagacccttcaccactatacgatatgttaaggaaaaatttagtgaccctggctacggctaccacagagatgggacatcttttctgccgaatcagccacgccctggagctcgcagactag

SEQ ID NO: 298063 - protein, 140 aa, Artificial Sequence
  derived and/or modified sequence
MTSFSTSAQCSTSDSACRISPGQINQVRPKLPLLKILHAAGAQGEMFTVKEVMHYLGQYIMVKQLYDQQEQHMVYCGGDLLGELLGRQSFSVKDPSPLYDMLRKNLVTLATATTAKCRGKFHFQKKNYRRRYPHTAYLRA

SEQ ID NO: 298064 - DNA, 423 bp, Artificial Sequence
  derived and/or modified sequence
atgaccagcttcagcaccagcgcccagtgcagcaccagcgacagcgcctgcagaatcagccccggccagatcaaccaggtgagacccaagctgcccctgctgaagatcctgcacgccgccggcgcccagggcgagatgttcaccgtgaaggaggtgatgcactacctgggccagtacatcatggtgaagcagctgtacgaccagcaggagcagcacatggtgtactgcggcggcgacctgctgggcgagctgctgggcagacagagcttcagcgtgaaggaccccagccccctgtacgacatgctgagaaagaacctggtgaccctggccaccgccaccaccgccaagtgcagaggcaagttccacttccagaagaagaactacagaagaagatacccccacaccgcctacctgagagcctag

SEQ ID NO: 298065 - DNA, 423 bp, Artificial Sequence
  derived and/or modified sequence
atgacctcattttctactagtgcccagtgttccacttcagattctgcttgtagaatcagccctggacaaatcaaccaggtgcgtcctaaattgcccctcctgaagatcctccacgcagctggggctcagggcgaaatgtttaccgttaaggaggtaatgcactacttaggccagtatataatggtaaagcagctttatgatcagcaggaacagcacatggtatactgcggcggagacttactaggggagctattggggcgccagtcattcagcgtgaaagacccttccccgctatacgatatgcttcggaagaacctggtcaccctggccactgcaactactgccaagtgccgaggaaaatttcattttcagaagaaaaattatcgcagaaggtaccctcatacggcttatttacgtgcatag

SEQ ID NO: 298066 - DNA, 423 bp, Artificial Sequence
  derived and/or modified sequence
atgaccagcttcagcaccagcgcccagtgcagcaccagtgacagcgcctgccgcatcagccctggccagatcaaccaggtgcggcccaagctgcccctgctgaagatcctgcatgctgctggggcccagggcgagatgttcaccgtgaaggaggtgatgcactacctgggccagtacatcatggtgaagcagctgtatgaccagcaggagcagcacatggtgtactgcggcggggacctgctgggggagctgctgggccggcagagcttctctgtgaaggaccccagccccctgtatgacatgctgaggaagaacctggtgaccctggccacagccaccacagccaagtgccggggcaagttccacttccagaagaagaactacagaagacgctacccccacacagcctacctgcgggcctag

SEQ ID NO: 298067 - DNA, 423 bp, Artificial Sequence
  derived and/or modified sequence
atgaccagcttcagcaccagcgcccagtgcagcaccagcgacagcgcctgcagaatatcaccgggccaaatcaaccaggtccggcccaaactgcctctgctgaagatcctgcacgccgcaggcgcccaaggggagatgtttacggtgaaggaagtaatgcattaccttggccaatatattatggttaagcaactgtatgatcagcaagaacagcatatggtctattgtggtggcgacctgctcggagagctgctggggcgccagagttttagtgtaaaagaccccagcccattgtatgatatgcttaggaagaatctcgtcacgcttgcaacagccacgacggcgaagtgcaggggcaagtttcactttcagaagaaaaactatcggagacgataccctcacaccgcctacctgcgcgcatag

SEQ ID NO: 298068 - DNA, 423 bp, Artificial Sequence
  derived and/or modified sequence
atgacttccttcagcacttctgcgcagtgctccacaagcgatagtgcgtgccgaattagccctggacaaataaaccaggtgaggcctaaactcccccttctgaagattctgcacgcagctggcgctcaaggagaaatgttcactgtgaaggaggtgatgcattatctgggacagtacatcatggtcaaacaattgtacgaccagcaggagcaacatatggtgtactgcgggggagacctgttgggtgagcttttggggaggcagagcttctcagtgaaggacccatcccctctgtacgatatgctcaggaagaatctcgtgaccctggcaacagcaaccacagccaaatgtaggggaaagttccacttccaaaagaagaactaccggagacgatacccccacacagcgtacctgcgtgcttag

SEQ ID NO: 298069 - DNA, 420 bp, Artificial Sequence
  derived and/or modified sequence
atggggcgcaaaaaaattcagattcagagaattactgacgagcggaatcgccaggtcacctttactaagcgcaagttcggactcatgaagaaagcttatgaactgagtgtcctctgcgattgtgagatcgccttgattatctttaaccactcaaataaactgttccagtatgcttcgactgacatggacaaagtcctgctgaaatacacagagtacaatgagccccacgagtcgcgtacgaatgcagatattatagaaactttacgaaaaaaaggattcaacgggtgcgattcccccgaacccgatggcgaggactccctggagcagagcccactgttagaggacaaataccggcgggcgtccgaggagttggatggactcttccggcgatacggcggcccctgctggggagtgacttag

SEQ ID NO: 298070 - DNA, 420 bp, Artificial Sequence
  derived and/or modified sequence
atgggcaggaagaagatccagatccagaggatcacagatgaaagaaaccggcaggtgaccttcaccaagaggaagtttggcctgatgaagaaggcctatgagctgtctgtgctgtgtgactgtgaaattgccctgatcatcttcaaccacagcaacaagctgttccagtatgccagcacagacatggacaaggtgctgctgaagtacacagagtacaatgagccccatgagagcaggaccaatgctgacatcatcgagaccctgaggaagaagggcttcaacggctgtgacagccctgagccagatggagaggacagcctggagcagagccccctgctggaggacaagtaccgccgggccagcgaggagctggatggcctcttcagaagatatggaggcccctgctggggcgtgacctag

SEQ ID NO: 298071 - DNA, 1905 bp, Artificial Sequence
  derived and/or modified sequence
ggaggaaggaagcaaaatatcaacaacagccgaggcggctcaggcgctcggccccggttccccgcttgcctgccgcccgcctgctggcccccgcgcccacgacgggggcccaggcctcacggcgccgcccagggcccgcgcggacgccggcctcatttattattctccccgcccggagctgcggcttcccggtgttgaagatcccccggaccaggggcgagggctacccgctctttgccgtgacaacaccgttcccccagccgggctggaggctgtgcagaaggtatcctgcagaccatgaactgagcactgttcccagaccgttcatgagcacagtgtaaggtgtgccgagacccaccacccagcgagcccctcccctccgtagcactgaggacccccggagaagatggggaggaaaaagattcagatccagcgaatcaccgacgagcggaaccgacaggtgactttcaccaagcggaagtttggcctgatgaagaaggcgtatgagctgagcgtgctatgtgactgcgagatcgcactcatcatcttcaaccactccaacaagctgttccagtacgccagcaccgacatggacaaggtgctgctcaagtacacggagtacaatgagccacacgagagccgcaccaacgccgacatcatcgagaccctgaggaagaagggcttcaacggctgcgacagccccgagcccgacggggaggactcgctggaacagagccccctgctggaggacaagtaccgacgcgccagcgaggagctcgacgggctcttccggcgctatggggggccatgctggggggtgacctgaacagtgctaacggagcctgccccagccctgttgggaatggctacgtcagtgctcgggcttcccctggcctcctccctgtggccaatggcaacagcctaaacaaggtcatccctgccaagtctccacccccacctacccacagcacccagcttggagcccccagccgcaagcccgacctgcgagtcatcacttcccaggcaggaaaggggttaatgcatcacttgattaccagttgaccagtgcagagctctcctccttaccagcctttagttcacctggggggctgtcgctaggcaatgtcactgcctggcaacagccacagcagccccagcagccgcagcagccacagcctccacagcagcagccaccgcagccacagcagccacagccacagcagcctcagcagccgcaacagccacctcagcaacagtcccacctggtccctgtatctctcagcaacctcatcccgggcagccccctgccccacgtgggtgctgccctcacagtcaccacccacccccacatcagcatcaagtcagaaccggtgtccccaagccgtgagcgcagccctgcgcctccccctccagctgtgttcccagctgcccgccctgagcctggcgatggtctcagcagcccagccgggggatcctatgagacgggagaccgggatgacggacggggggacttcgggcccacactgggcctgctgcgcccagccccagagcctgaggctgagggctcagctgtgaagaggatgcggcttgatacctggacattaaagtgacgattcccactcccctctccctagcttctcctgttagctccttctgctcctgaccccacctccttgctcttggcgcccctattgtctctggctacctccttgtcccaccacctccaggctgcatcccaccttccctcttggctactgtaattgtaaatagcgacctttggaaaacgttagcggtgtaacagtccaggaaactgtttttttttgttgttgttgtattgatatgaaatgagattctatttttgtcaaagtatattgtaataataatgactcaaacggcccgtactgt

SEQ ID NO: 298072 - DNA, 420 bp, Artificial Sequence
  derived and/or modified sequence
atgggccggaagaagatccagatccagcggatcaccgacgagcggaatagacaggtgaccttcacaaagcgtaagtttggcctcatgaagaaagcctatgagttgtctgtgctgtgtgattgcgagatcgcactcatcatatttaatcactctaataagctgttccagtatgcttcaaccgacatggacaaagtgttgctcaaatacacggagtacaacgagccccatgaatcccgcacaaacgctgacatcattgagactcttcggaaaaaaggtttcaacggctgtgattctcctgaacccgacggggaggattcactggagcagtcgcctttgctcgaggataaataccggcgggcaagcgaagaactagatggactgttccggagatacggggggccttgttggggagtcacctag

SEQ ID NO: 298073 - DNA, 420 bp, Artificial Sequence
  derived and/or modified sequence
atggggagaaagaagattcagatacagaggataaccgacgaacgtaatcgccaggtgactttcactaaacgtaagtttgggcttatgaaaaaagcctacgaactctctgtgctctgtgattgtgaaatcgctctgattatatttaatcacagtaacaaattattccagtacgcatctacagatatggataaggtcctgctaaagtatacggagtataatgaaccacatgaaagccggaccaacgccgatatcattgaaactctgagaaagaaagggtttaacggatgcgacagtcctgaaccagatggcgaagactcacttgaacagtcaccgttactggaagataagtatcggagagcaagcgaagagctggatggactctttcggaggtatggcggaccatgttggggggtcacatag

SEQ ID NO: 298074 - DNA, 420 bp, Artificial Sequence
  derived and/or modified sequence
atgggcagaaagaagatccagatccagagaatcaccgacgagagaaacagacaggtgaccttcaccaagagaaagttcggcctgatgaagaaggcctacgagctgagcgtgctgtgcgactgcgagatcgccctgatcatcttcaaccacagcaacaagctgttccagtacgccagcaccgacatggacaaggtgctgctgaagtacaccgagtacaacgagccccacgagagcagaaccaacgccgacatcatcgagaccctgagaaagaagggcttcaacggctgcgacagccccgagcccgacggcgaggacagcctggagcagagccccctgctggaggacaagtacagaagagccagcgaggagctggacggcctgttcagaagatacggcggcccctgctggggcgtgacctag

SEQ ID NO: 298075 - protein, 181 aa, Artificial Sequence
  derived and/or modified sequence
MMLQHPGQVSASEVSASAIVPCLSPPGSLVFEDFANLTPFVKEELRFAIQNKHLCHRMSSALESVTVSDRPLGVSITKAEVAPEEDERKKRRRERNKIAAAKCRNKKKEKTECLQKESEKLESVNAELKAQIEELKNEKQHLIYMLNLHRPTCIVRAQNGRTPEDERNLFIQQIKEGTLQS

SEQ ID NO: 298076 - protein, 175 aa, Artificial Sequence
  derived and/or modified sequence
MMLQHPGQVSASEVSASAIVPCLSPPGSLVFEDFANLTPFVKEELRFAIQNKHLCHRMSSALESVTVSDRPLGVSITKAEVAPEEDERKKRRRERNKIAAAKCRNKKKEKTECLQKESEKLESVNAELKAQIEELKNEKQHLIYMLNLHRPTCIVRAQNGRTPEDERNLFIQQIK

SEQ ID NO: 298077 - DNA, 2049 bp, Artificial Sequence
  derived and/or modified sequence
cgggaagctattaatagcattacgtcagcctgggactggcaacacggagtaaacgaccgcgccgccagcctgagggctataaaaggggtgatgcaacgctctccaagccacagtcgcacgcagccaggcgcgcactgcacagctctcttctctcgccgccgcccgagcgcacccttcagcccgcgcgccggccgtgagtcctcggtgctcgcccgccggccagacaaacagcccgcccgaccccgtcccgaccctggccgccccgagcggagcctggagcaaaatgatgcttcaacacccaggccaggtctctgcctcggaagtgagtgcttctgccatcgtcccctgcctgtcccctcctgggtcactggtgtttgaggattttgctaacctgacgccctttgtcaaggaagagctgaggtttgccatccagaacaagcacctctgccaccggatgtcctctgcgctggaatcagtcactgtcagcgacagacccctcggggtgtccatcacaaaagccgaggtagcccctgaagaagatgaaaggaaaaagaggcgacgagaaagaaataagattgcagctgcaaagtgccgaaacaagaagaaggagaagacggagtgcctgcagaaagagtcggagaagctggaaagtgtgaatgctgaactgaaggctcagattgaggagctcaagaacgagaagcagcatttgatatacatgctcaaccttcatcggcccacgtgtattgtccgggctcagaatgggaggactccagaagatgagagaaacctctttatccaacagataaaagaaggaacattgcagagctaagcagtcgtggtatgggggcgactggggagtcctcattgaatcctcattttatacccaaaaccctgaagccattggagagctgtcttcctgtgtacctctagaatcccagcagcagagaaccatcaaggcgggagggcctgcagtgattcagcaggcccttcccattctgccccagagtgggtcttggaccagggcaagtgcatctttgcctcaactccaggatttaggccttaacacactggccattcttatgttccagatggcccccagctggtgtcctgcccgcctttcatctggattctacaaaaaaccaggatgcccaccgttaggattcaggcagcagtgtctgtacctcgggtgggagggatggggccatctccttcaccgtggctaccattgtcactcgtaggggatgtggagtgagaacagcatttagtgaagttgtgcaacggccagggttgtgctttctagcaaatatgctgttatgtccagaaattgtgtgtgcaagaaaactaggcaatgtactcttccgatgtttgtgtcacacaacactgatgtgacttttatatgctttttctcagatctggtttctaagagttttggggggcggggctgtcaccacgtgcagtatctcaagatattcaggtggccagaagagcttgtcagcaagaggaggacagaattctcccagcgttaacacaaaatccatgggcagtatgatggcaggtcctctgttgcaaactcagttccaaagtcacaggaagaaagcagaaagttcaacttccaaagggttaggactctccactcaatgtcttaggtcaggagttgtgtctaggctggaagagccaaagaatattccattttcctttccttgtggttgaaaaccacagtcagtggagagatgtttggaaaccacagtcagtggagcctgggtggtacccaggctttagcattattggatgtcaatagcattgtttttgtcatgtagctgttttaagaaatctggcccagggtgtttgcagctgtgagaagtcactcacactggccacaaggacgctggctactgtctattaaaattctgatgtttctgtgaaattctcagagtgtttaattgtactcaatggtatcattacaattttctgtaagagaaaatattacttatttatcctagtattcctaacctgtcagaataataaatattggaaccaagacatggtaaa

SEQ ID NO: 298078 - DNA, 546 bp, Artificial Sequence
  derived and/or modified sequence
atgatgctacagcaccctggccaggtgtcggcctcagaagtgagcgcctcagccatcgtcccttgcctgagtccaccaggctctctggtgtttgaagacttcgctaatctcacaccctttgtgaaggaagagctgagatttgcaattcagaacaaacacctgtgtcacaggatgtcttccgccctcgagtccgtgaccgtgagtgatcgtccgctaggcgtttctatcaccaaggccgaggtggccccagaagaggacgaacggaagaagaggagaagagaacggaacaagatcgccgccgcgaagtgccgaaataaaaagaaggaaaaaacagaatgcctccagaaagaatcagaaaaactggagtccgttaatgcagagctgaaggcacagattgaagagctgaagaatgagaagcagcaccttatctacatgctgaaccttcataggccgacatgcattgtgagggcacagaacggtaggactccagaggatgaaagaaatctcttcatccagcagattaaggaaggtacactgcagagttag

SEQ ID NO: 298079 - DNA, 528 bp, Artificial Sequence
  derived and/or modified sequence
atgatgttacaacacccagggcaagtatcggcttctgaggtctctgcttcagcgatagtgccctgcctgtcaccacctggttcactcgtgtttgaggattttgccaacttgacaccctttgtgaaggaggagttacgtttcgccatccagaataaacatctgtgtcacagaatgagttctgccttggagtctgtgactgtgtcagaccgccctcttggggtgtcaataacgaaagcagaagttgcacctgaggaggatgagcggaagaaacgaagacgggaacgaaacaaaattgcggctgctaaatgtcggaacaaaaaaaaggagaagacagagtgcctccaaaaagaatcagagaaactcgagtctgttaatgctgagctgaaggcacaaatcgaggagctcaagaatgaaaaacagcatctgatctatatgttaaaccttcaccggcccacgtgcattgtccgcgcccaaaacggacggaccccggaggatgagcgcaatttgttcatccagcaaataaagtag

SEQ ID NO: 298080 - DNA, 546 bp, Artificial Sequence
  derived and/or modified sequence
atgatgctgcagcaccccggccaggtttccgcctcagaagtgagtgccagcgcaattgtcccctgcctcagtccgcccggaagcctggtcttcgaggacttcgcaaatctaaccccgttcgtcaaagaagaactcagattcgctattcagaataagcatctgtgtcatagaatgtctagtgccttggagtccgtgacagtgtccgatcgacccctcggagtttcgattactaaggccgaagtggctcccgaggaggatgagcgcaagaagcgcaggcgggagcgaaataagatcgctgctgcaaaatgccgcaacaaaaagaaggagaagacagaatgcctgcagaaggaaagcgagaaactagagtccgtgaatgccgaacttaaagctcagatcgaggagctgaaaaacgaaaagcaacacctgatctacatgctgaatcttcaccggcccacgtgcatcgttcgcgcacagaatggacgtacacccgaagacgagcgtaatctctttatccagcaaatcaaggagggaacgctgcaatcgtag

SEQ ID NO: 298081 - DNA, 546 bp, Artificial Sequence
  derived and/or modified sequence
atgatgctgcagcaccctggccaggtgtctgccagcgaggtgtctgccagcgccatcgtgccctgcctgagccccccaggcagcctggtgtttgaggactttgccaacctgaccccatttgtgaaggaggagctgcgctttgccatccagaacaagcacctgtgccacaggatgagcagcgccctggagagcgtgacagtgtctgaccggcccctgggcgtgtccatcaccaaggccgaggtggccccagaagaagatgagaggaagaagagaagaagagaaagaaacaagattgctgctgccaagtgcaggaacaagaagaaggagaagacagagtgcctgcagaaggagagcgagaagctggagagcgtgaatgctgagctgaaggcccagatcgaggagctgaagaatgagaagcagcacctgatctacatgctgaacctgcaccggcccacctgcatcgtgcgggcccagaatggaagaacaccagaagatgaaagaaacctcttcatccagcagatcaaggagggcaccctgcagagctag

SEQ ID NO: 298082 - DNA, 528 bp, Artificial Sequence
  derived and/or modified sequence
atgatgctgcagcaccctggccaggtgtctgccagcgaggtgtctgccagcgccatcgtgccctgcctgagccccccaggcagcctggtgtttgaggactttgccaacctgaccccatttgtgaaggaggagctgcgctttgccatccagaacaagcacctgtgccacaggatgagcagcgccctggagagcgtgacagtgtctgaccggcccctgggcgtgtccatcaccaaggccgaggtggccccagaagaagatgagaggaagaagagaagaagagaaagaaacaagattgctgctgccaagtgcaggaacaagaagaaggagaagacagagtgcctgcagaaggagagcgagaagctggagagcgtgaatgctgagctgaaggcccagatcgaggagctgaagaatgagaagcagcacctgatctacatgctgaacctgcaccggcccacctgcatcgtgcgggcccagaatggaagaacaccagaagatgaaagaaacctcttcatccagcagatcaagtag

SEQ ID NO: 298083 - DNA, 546 bp, Artificial Sequence
  derived and/or modified sequence
atgatgctgcagcaccccggccaggtgagcgccagcgaggtgagcgcatccgctatcgtgccatgtctctcccctccggggtcactggtgttcgaagacttcgccaatttgaccccctttgtcaaggaggagctgcgcttcgccatacagaacaagcacctgtgccacaggatgtcctctgcattggaaagcgtgaccgtgtctgaccggccattgggggtatccattactaaggccgaggtagctcccgaagaggatgaacgaaagaagcgccggagggagcgaaacaaaatcgctgccgccaaatgccggaataaaaaaaaggagaagacagagtgcctacagaaagaatcagagaaactggagagcgttaatgcggaactgaaagcgcagattgaagagctgaaaaacgagaagcagcacttgatatacatgcttaacctgcaccgacccacctgtatcgtgcgcgctcaaaatggtcgaacccctgaagatgaaaggaatctttttatccaacagatcaaggagggcacactgcagtcctag

SEQ ID NO: 298084 - DNA, 528 bp, Artificial Sequence
  derived and/or modified sequence
atgatgctgcagcaccccggccaggtgagcgccagcgaggtgagcgcttctgcaatcgtcccttgtcttagccctccaggctctctggtctttgaagactttgcaaaccttactcctttcgttaaagaagagttgagatttgcgatacaaaataaacacctctgccaccgcatgagctccgccctggagtctgttactgtttccgaccgaccccttggtgtttctataaccaaagcagaggtggcccccgaggaggacgagcgcaagaagcgtaggagagagcgtaacaagatcgccgctgccaagtgtcgcaacaagaaaaaagagaagactgaatgtctccaaaaggagagtgagaagctggagtctgtcaatgctgaacttaaagcacagattgaagagttgaaaaacgagaaacagcaccttatctacatgctcaatctgcacagacccacgtgtatagttcgggcccaaaatggccggacgcctgaagacgagcggaacttatttattcaacaaattaaatag

SEQ ID NO: 298085 - DNA, 546 bp, Artificial Sequence
  derived and/or modified sequence
atgatgctgcagcaccccggccaggtgagcgccagcgaggtgagcgcttccgccatcgttccatgcttgtcacctccaggctccctcgtgtttgaagatttcgctaatctgacccccttcgtgaaggaggagcttaggttcgccatacagaataagcatttgtgccaccgtatgtcctccgccctcgagagcgtgacagtgtcggataggccgcttggagtctctatcacaaaagccgaggttgctccggaagaggacgaacgtaagaagagacgcagagaaaggaacaaaatcgccgctgccaagtgccggaacaaaaaaaaggaaaagactgagtgtttgcagaaggaatcagagaagcttgagagtgttaacgccgagctgaaggcccagatcgaggaattgaagaatgaaaagcagcaccttatctatatgctgaacctgcacagacccacatgcatcgttcgtgcgcagaacgggagaaccccggaggacgaaagaaatctgttcattcaacagattaaggagggcactctgcagagctag

SEQ ID NO: 298086 - DNA, 546 bp, Artificial Sequence
  derived and/or modified sequence
atgatgctccaacacccgggacaggtcagcgcgtcggaagtatcagctagtgctattgtgccctgcttgagcccaccagggtcattggtgttcgaagatttcgctaatcttacgccatttgtcaaggaggaattgagatttgccattcagaacaaacacctctgccatcgcatgagctcggccctagagtctgtgacagtgtcggaccgtcctttaggtgtgtctattacaaaagccgaggtggcccctgaagaagacgagcggaaaaagaggaggcgcgagagaaataagatcgccgctgcaaagtgtcggaacaaaaagaaagaaaagactgagtgcttacaaaaggagagcgaaaaactggagagcgttaatgctgagctgaaagcacaaatagaagaactgaaaaacgaaaaacagcacctgatttacatgcttaatttgcacaggcctacatgtatagtccgcgcacagaatggtagaacacctgaggacgagcgcaatttgttcattcagcagattaaggagggcaccctgcagtcttag

SEQ ID NO: 298087 - DNA, 528 bp, Artificial Sequence
  derived and/or modified sequence
atgatgctccagcaccccggtcaagtttcagcttctgaggtgagtgcatcggccattgtgccctgcctgtctccgccagggtccttggtgtttgaagattttgcaaacctcacgccatttgtaaaggaggagctccggttcgcgatacagaacaagcatctgtgccaccggatgtcatccgcccttgagtctgtgactgtctccgaccgccctttgggggtgtcgataactaaggctgaagtggctcctgaagaggacgagcggaaaaagcggagaagggagagaaataaaatcgcagccgcaaagtgtcgcaacaaaaaaaaggaaaagactgagtgtctgcagaaggagtcggagaaactggaatcagtcaacgccgaattgaaagctcagatcgaggagttgaagaacgagaagcaacacttgatttatatgctgaatctgcacagaccgacatgtatcgttagggcccaaaatgggcgtacaccagaggatgagcgcaatctctttatccaacagatcaagtag

SEQ ID NO: 298088 - DNA, 546 bp, Artificial Sequence
  derived and/or modified sequence
atgatgctgcagcaccccggacaggtttcagcgagtgaggtaagcgcctctgctatcgttccttgtctcagccctcctggctcccttgtatttgaggatttcgccaatcttactccatttgtgaaggaggagctgcgtttcgccatccaaaataaacatctgtgtcaccggatgtccagcgcacttgagtcggtgacagtgtctgaccgaccacttggcgtcagcatcacgaaggccgaagtggctcctgaagaggacgagcggaagaagcgcaggcgcgagcgcaacaaaattgctgcagcaaagtgtcggaacaagaagaaggaaaagaccgaatgtctccagaaggaatcagagaaattggagagcgtgaacgccgaactgaaagcccagatagaggaacttaagaatgaaaagcagcacctcatctatatgctaaaccttcatcgtccaacttgcattgtacgcgcacagaacggccgaaccccagaagacgagagaaacctatttatccagcagattaaggaaggcacactccagtcttag

SEQ ID NO: 298089 - DNA, 2033 bp, Artificial Sequence
  derived and/or modified sequence
attacgtcagcctgggactggcaacacggagtaaacgaccgcgccgccagcctgagggctataaaaggggtgatgcaacgctctccaagccacagtcgcacgcagccaggcgcgcactgcacagctctcttctctcgccgccgcccgagcgcacccttcagcccgcgcgccggccgtgagtcctcggtgctcgcccgccggccagacaaacagcccgcccgaccccgtcccgaccctggccgccccgagcggagcctggagcaaaatgatgcttcaacacccaggccaggtctctgcctcggaagtgagtgcttctgccatcgtcccctgcctgtcccctcctgggtcactggtgtttgaggattttgctaacctgacgccctttgtcaaggaagagctgaggtttgccatccagaacaagcacctctgccaccggatgtcctctgcgctggaatcagtcactgtcagcgacagacccctcggggtgtccatcacaaaagccgaggtagcccctgaagaagatgaaaggaaaaagaggcgacgagaaagaaataagattgcagctgcaaagtgccgaaacaagaagaaggagaagacggagtgcctgcagaaagagtcggagaagctggaaagtgtgaatgctgaactgaaggctcagattgaggagctcaagaacgagaagcagcatttgatatacatgctcaaccttcatcggcccacgtgtattgtccgggctcagaatgggaggactccagaagatgagagaaacctctttatccaacagataaaagaaggaacattgcagagctaagcagtcgtggtatgggggcgactggggagtcctcattgaatcctcattttatacccaaaaccctgaagccattggagagctgtcttcctgtgtacctctagaatcccagcagcagagaaccatcaaggcgggagggcctgcagtgattcagcaggcccttcccattctgccccagagtgggtcttggaccagggcaagtgcatctttgcctcaactccaggatttaggccttaacacactggccattcttatgttccagatggcccccagctggtgtcctgcccgcctttcatctggattctacaaaaaaccaggatgcccaccgttaggattcaggcagcagtgtctgtacctcgggtgggagggatggggccatctccttcaccgtggctaccattgtcactcgtaggggatgtggagtgagaacagcatttagtgaagttgtgcaacggccagggttgtgctttctagcaaatatgctgttatgtccagaaattgtgtgtgcaagaaaactaggcaatgtactcttccgatgtttgtgtcacacaacactgatgtgacttttatatgctttttctcagatctggtttctaagagttttggggggcggggctgtcaccacgtgcagtatctcaagatattcaggtggccagaagagcttgtcagcaagaggaggacagaattctcccagcgttaacacaaaatccatgggcagtatgatggcaggtcctctgttgcaaactcagttccaaagtcacaggaagaaagcagaaagttcaacttccaaagggttaggactctccactcaatgtcttaggtcaggagttgtgtctaggctggaagagccaaagaatattccattttcctttccttgtggttgaaaaccacagtcagtggagagatgtttggaaaccacagtcagtggagcctgggtggtacccaggctttagcattattggatgtcaatagcattgtttttgtcatgtagctgttttaagaaatctggcccagggtgtttgcagctgtgagaagtcactcacactggccacaaggacgctggctactgtctattaaaattctgatgtttctgtgaaattctcagagtgtttaattgtactcaatggtatcattacaattttctgtaagagaaaatattacttatttatcctagtattcctaacctgtcagaataataaatattggaaccaagacatggtaaaca

SEQ ID NO: 298090 - DNA, 680 bp, Artificial Sequence
  derived and/or modified sequence
ggcggaggtggggttagcttcagttgaccaaccatgccttgaggataaattggatgggatcagatgggaagatgtgacaagaagagaaatcctcctctatataggatgctctgctgtttcctaaggattttcagcaccttgccccaaaatcaaaatgatgcttcaacacccaggccaggtctctgcctcggaagtgagtgcttctgccatcgtcccctgcctgtcccctcctgggtcactggtgtttgaggattttgctaacctgacgccctttgtcaaggaagagctgaggtttgccatccagaacaagcacctctgccaccggatgtcctctgcgctggaatcagtcactgtcagcgacagacccctcggggtgtccatcacaaaagccgaggtagcccctgaagaagatgaaaggaaaaagaggcgacgagaaagaaataagattgcagctgcaaagtgccgaaacaagaagaaggagaagacggagtgcctgcagaaagagtcggagaagctggaaagtgtgaatgctgaactgaaggctcagattgaggagctcaagaacgagaagcagcatttgatatacatgctcaaccttcatcggcccacgtgtattgtccgggctcagaatgggaggactccagaagatgagagaaacctctttatccaacagataaaag

SEQ ID NO: 298091 - DNA, 516 bp, Artificial Sequence
  derived and/or modified sequence
cgagcggagcctggagcaaaatgatgcttcaacacccaggccagagctgaggtttgccatccagaacaagcacctctgccaccggatgtcctctgcgctggaatcagtcactgtcagcgacagacccctcggggtgtccatcacaaaagccgaggtagcccctgaagaagatgaaaggaaaaagaggcgacgagaaagaaataagattgcagctgcaaagtgccgaaacaagaagaaggagaagacggagtgcctgcagaaagagtcggagaagctggaaagtgtgaatgctgaactgaaggctcagattgaggagctcaagaacgagaagcagcatttgatatacatgctcaaccttcatcggcccacgtgtattgtccgggctcagaatgggaggactccagaagatgagagaaacctctttatccaacagataaaagaaggaacattgcagagctaagcagtcgtggtatgggggcgactggggagtcctcattgaatcctcattttataccc

SEQ ID NO: 298092 - DNA, 1896 bp, Artificial Sequence
  derived and/or modified sequence
agttgaccaaccatgccttgaggataaattggatgggatcagatgggaagatgtgacaagaagagaaatcctcctctatataggatgctctgctgtttcctaaggattttcagcaccttgccccaaaatcaaaatgatgcttcaacacccaggccaggtctctgcctcggaagtgagtgcttctgccatcgtcccctgcctgtcccctcctgggtcactggtgtttgaggattttgctaacctgacgccctttgtcaaggaagagctgaggtttgccatccagaacaagcacctctgccaccggatgtcctctgcgctggaatcagtcactgtcagcgacagacccctcggggtgtccatcacaaaagccgaggtagcccctgaagaagatgaaaggaaaaagaggcgacgagaaagaaataagattgcagctgcaaagtgccgaaacaagaagaaggagaagacggagtgcctgcagaaagagtcggagaagctggaaagtgtgaatgctgaactgaaggctcagattgaggagctcaagaacgagaagcagcatttgatatacatgctcaaccttcatcggcccacgtgtattgtccgggctcagaatgggaggactccagaagatgagagaaacctctttatccaacagataaaagaaggaacattgcagagctaagcagtcgtggtatgggggcgactggggagtcctcattgaatcctcattttatacccaaaaccctgaagccattggagagctgtcttcctgtgtacctctagaatcccagcagcagagaaccatcaaggcgggagggcctgcagtgattcagcaggcccttcccattctgccccagagtgggtcttggaccagggcaagtgcatctttgcctcaactccaggatttaggccttaacacactggccattcttatgttccagatggcccccagctggtgtcctgcccgcctttcatctggattctacaaaaaaccaggatgcccaccgttaggattcaggcagcagtgtctgtacctcgggtgggagggatggggccatctccttcaccgtggctaccattgtcactcgtaggggatgtggagtgagaacagcatttagtgaagttgtgcaacggccagggttgtgctttctagcaaatatgctgttatgtccagaaattgtgtgtgcaagaaaactaggcaatgtactcttccgatgtttgtgtcacacaacactgatgtgacttttatatgctttttctcagatctggtttctaagagttttggggggcggggctgtcaccacgtgcagtatctcaagatattcaggtggccagaagagcttgtcagcaagaggaggacagaattctcccagcgttaacacaaaatccatgggcagtatgatggcaggtcctctgttgcaaactcagttccaaagtcacaggaagaaagcagaaagttcaacttccaaagggttaggactctccactcaatgtcttaggtcaggagttgtgtctaggctggaagagccaaagaatattccattttcctttccttgtggttgaaaaccacagtcagtggagagatgtttggaaaccacagtcagtggagcctgggtggtacccaggctttagcattattggatgtcaatagcattgtttttgtcatgtagctgttttaagaaatctggcccagggtgtttgcagctgtgagaagtcactcacactggccacaaggacgctggctactgtctattaaaattctgatgtttctgtgaaattctcagagtgtttaattgtactcaatggtatcattacaattttctgtaagagaaaatattacttatttatcctagtattcctaacctgtcagaataataaatattggaaccaagacatggt

SEQ ID NO: 298093 - DNA, 546 bp, Artificial Sequence
  derived and/or modified sequence
atgatgctgcagcaccccggccaggtgagcgccagcgaggtgagcgccagcgccatcgtgccctgcctgagcccccccggcagcctggtgttcgaggacttcgccaacctgacccccttcgtgaaggaggagctgagattcgccatccagaacaagcacctgtgccacagaatgagcagcgccctggagagcgtgaccgtgagcgacagacccctgggcgtgagcatcaccaaggccgaggtggcccccgaggaggacgagagaaagaagagaagaagagagagaaacaagatcgccgccgccaagtgcagaaacaagaagaaggagaagaccgagtgcctgcagaaggagagcgagaagctggagagcgtgaacgccgagctgaaggcccagatcgaggagctgaagaacgagaagcagcacctgatctacatgctgaacctgcacagacccacctgcatcgtgagagcccagaacggcagaacccccgaggacgagagaaacctgttcatccagcagatcaaggagggcaccctgcagagctag

SEQ ID NO: 298094 - DNA, 528 bp, Artificial Sequence
  derived and/or modified sequence
atgatgctgcagcaccccggccaggtgagcgccagcgaggtgagcgccagcgccatcgtgccctgcctgagcccccccggcagcctggtgttcgaggacttcgccaacctgacccccttcgtgaaggaggagctgagattcgccatccagaacaagcacctgtgccacagaatgagcagcgccctggagagcgtgaccgtgagcgacagacccctgggcgtgagcatcaccaaggccgaggtggcccccgaggaggacgagagaaagaagagaagaagagagagaaacaagatcgccgccgccaagtgcagaaacaagaagaaggagaagaccgagtgcctgcagaaggagagcgagaagctggagagcgtgaacgccgagctgaaggcccagatcgaggagctgaagaacgagaagcagcacctgatctacatgctgaacctgcacagacccacctgcatcgtgagagcccagaacggcagaacccccgaggacgagagaaacctgttcatccagcagatcaagtag

SEQ ID NO: 298095 - protein, 526 aa, Artificial Sequence
  derived and/or modified sequence
MSLVEAISLWNEGVLAADKKDWKGALDAFSAVQDPHSRICFNIGCMYTILKNMTEAEKAFTRSINRDKHLAVAYFQRGMLYYQTEKYDLAIKDLKEALIQLRGNQLIDYKILGLQFKLFACEVLYNIAFMYAKKEEWKKAEEQLALATSMKSEPRHSKIDKAMECVWKQKLYEPVVIPVGKLFRPNERQVAQLAKKDYLGKATVVASVVDQDSFSGFAPLQPQAAEPPPRPKTPEIFRALEGEAHRVLFGFVPETKEELQVMPGNIVFVLKKGNDNWATVMFNGQKGLVPCNYLEPVELRIHPQQQPQEESSPQSDIPAPPSSKAPGRPQLSPGQKQKEEPKEVKLSVPMPYTLKVHYKYTVVMKTQPGLPYSQVRDMVSKKLELRLEHTKLSYRPRDSNELVPLSEDSMKDAWGQVKNYCLTLWCENTVGDQGFPDEPKESEKADANNQTTEPQLKKGSQVEALFSYEATQPEDLEFQEGDIILVLSKVNEEWLEGECKGKVGIFPKVFVEDCATTDLESTRREV

SEQ ID NO: 298096 - protein, 598 aa, Artificial Sequence
  derived and/or modified sequence
GSPARGDAPTCLLSVSWQLSWPPSFYLIMSLVEAISLWNEGVLAADKKDWKGALDAFSAVQDPHSRICFNIGCMYTILKNMTEAEKAFTRSINRDKHLAVAYFQRGMLYYQTEKYDLAIKDLKEALIQLRGNQLIDYKILGLQFKLFACEVLYNIAFMYAKKEEWKKAEEQLALATSMKSEPRHSKIDKAMECVWKQKLYEPVVIPVGKLFRPNERQVAQLAKKDYLGKATVVASVVDQDSFSGFAPLQPQVRQSDLLGAQAGSVSSRQLQLDVELEPGWSQVPGSKFSVFAPWHHVRGWGLDLVSILCRALEGEAHRVLFGFVPETKEELQVMPGNIVFVLKKGNDNWATVMFNGQKGLVPCNYLEPVELRIHPQQQPQEESSPQSDIPAPPSSKAPGRPQLSPGQKQKEEPKEVKLSVPMPYTLKVHYKYTVVMKTQPGLPYSQVRDMVSKKLELRLEHTKLSYRPRDSNELVPLSEDSMKDAWGQVKNYCLTLWCENTVGDQGFPDEPKESEKADANNQTTEPQLKKGSQVEALFSYEATQPEDLEFQEGDIILVLSKVNEEWLEGECKGKVGIFPKVFVEDCATTDLESTRREV

SEQ ID NO: 298097 - DNA, 1581 bp, Artificial Sequence
  derived and/or modified sequence
atgagcctggtagaggcaatcagcctttggaatgaaggcgttcttgccgccgataagaaggattggaaaggcgctctggatgcattttctgccgtccaggatccacactctagaatctgcttcaatatagggtgtatgtatactattctgaagaacatgaccgaggccgaaaaggcgtttactagaagtattaatcgtgacaaacaccttgccgtcgcctacttccaaagaggcatgctgtattaccagaccgaaaagtacgatttggccataaaggatctgaaagaggccctgatccagttgagaggaaatcagctgatcgattacaaaatcctcggcttgcaatttaaactcttcgcctgtgaggtactttacaatattgcattcatgtacgcaaagaaagaagagtggaaaaaagctgaggaacaacttgctctggcgacgtctatgaaaagcgagccgcggcatagcaagattgacaaagcgatggagtgcgtttggaagcaaaagctatatgagccagtggttattccggtgggcaagttgtttcgccccaacgaaagacaggtggctcagctggccaaaaaagattacctggggaaggccaccgtggtggcctctgtcgtcgaccaggacagcttttctggttttgcaccccttcagccacaggccgcggagccgcctccccggccgaagactccagaaatatttcgcgcactagagggcgaagcacatcgcgtgctgttcggattcgtgccagaaaccaaggaagagctgcaggtaatgccaggcaatattgtcttcgtgctgaagaagggaaatgacaattgggccactgtgatgtttaacgggcaaaaaggactagttccctgcaactatctggaacccgtcgagctaaggatccacccccagcagcagccacaggaggagtcgtcaccacagagtgacattccggctcccccatctagcaaggctcccggtcgaccccagctcagccccggccagaaacaaaaggaggagccgaaggaggtgaaattgtcagtcccgatgccgtataccctcaaggtccactacaaatatacggtagtgatgaagactcagccgggtttgccgtactcccaggtgcgggatatggtgagcaaaaaacttgagctgaggttagagcatactaaactttcctatcgaccacgcgattctaacgaactcgtacctttgtccgaggactcgatgaaagatgcatggggacaagtgaagaactattgcctgactttatggtgcgaaaacacagtcggggatcaaggtttcccggatgagcccaaggagagtgagaaagcagacgcgaataaccagactactgaaccacagctgaagaaaggaagtcaagtggaggctctcttttcttacgaggctactcaaccagaagacttggaatttcaggagggcgatattatactggtgctgtccaaagtaaatgaagagtggcttgagggcgagtgtaagggaaaggtaggtatttttccgaaggtcttcgtggaggattgtgctacgaccgacctggaaagtactaggcgcgaggtttag

SEQ ID NO: 298098 - DNA, 1581 bp, Artificial Sequence
  derived and/or modified sequence
atgtccctggtcgaagctattagtctgtggaatgaaggcgttctggcggctgataaaaaagattggaaaggcgccttggacgccttctctgctgtccaggacccacactcgcgtatatgcttcaatattggctgtatgtacactatccttaaaaatatgaccgaggccgagaaagctttcaccaggtcaatcaatcgtgacaaacacctggcagtcgcgtattttcagagggggatgctttattaccaaaccgaaaagtatgatctcgccataaaggacctgaaagaggccctgattcagttgcggggaaaccagctgatagattacaagatccttggcctccagttcaaactgtttgcatgtgaagtgctgtataacattgcatttatgtatgctaaaaaggaggaatggaaaaaggcggaggagcagctggcattagccacttcaatgaagagcgagccacgacactctaaaatagacaaggcaatggaatgtgtctggaagcagaagctttatgaacctgtggtcattccagtgggcaaactgttccgaccaaatgagaggcaagtggctcaactggcaaaaaaagactacctggggaaggccacagttgtggcctccgtagtcgatcaggatagtttttccgggtttgccccactgcaaccacaggccgccgagccgcctccccgacccaagacccccgagattttcagagccctcgagggggaagcgcacagagtgttgttcggcttcgtaccagagaccaaggaggaactgcaggtgatgcctgggaatatagtatttgttctcaaaaagggaaatgataattgggccacagttatgttcaacggacagaagggactggtgccatgcaattacctggaaccagtcgagctccggatccatccccagcaacagccacaagaagaatccagcccccagtctgacatcccggcaccaccaagtagcaaggcccccggccggccccaactgagcccggggcagaaacagaaggaggagccgaaagaagttaagctttctgtgcccatgccttataccctgaaggtacactataaatatacagttgtaatgaaaacccaacctggccttccatactcccaagtgagagacatggtgagtaagaaactggagttgagacttgagcacaccaaattgtcatatcgcccacgtgactccaacgagctcgtgcctctctccgaagactctatgaaggacgcgtggggacaggtgaagaactattgcctcacactttggtgtgaaaacaccgtgggagaccaaggctttccagacgaaccaaaggagtccgaaaaggccgacgcaaacaaccagactactgagccgcagctgaaaaagggatcccaggtcgaggcccttttctcctacgaggccacccaaccagaggatctagagtttcaggaaggtgatataatcctggtcctttccaaggtgaatgaggagtggctggagggagaatgcaaagggaaggtcgggatttttcccaaggtgttcgtggaggactgcgccaccacagatctcgaatctacccggagggaggtgtag

SEQ ID NO: 298099 - DNA, 1797 bp, Artificial Sequence
  derived and/or modified sequence
ggctcccccgcccgaggcgatgccccaacatgtctgctcagcgtgagttggcaactgtcctggccacccagcttctacctcattatgtctctggtggaagcaatttccttatggaacgagggcgtgctcgccgcggacaagaaggattggaagggcgcattagatgccttttcagccgtccaggacccgcactcgagaatttgctttaacatcggatgcatgtacacaatattaaagaacatgaccgaggctgagaaagctttcacccggagcatcaatcgtgataagcacttggccgtcgcgtacttccaacggggcatgctgtactatcagacagaaaaatatgatctagctatcaaagacctaaaagaggccctgattcagcttaggggcaatcaactgatcgattataaaattttggggcttcagttcaagctgtttgcttgcgaggtgctctacaacatagcctttatgtacgccaagaaggaagagtggaaaaaggctgaagaacagctggccctggccacctcaatgaagagtgagccacgccacagtaaaatcgacaaagccatggagtgcgtgtggaaacaaaaactatacgagccagtggttatccctgtggggaagttgtttaggccaaatgagagacaggtggcccagctggctaagaaagactacctcggtaaagcgaccgttgtggctagtgtcgttgaccaggatagcttcagcggatttgctcccctccagccccaggtgcgtcaatctgatctgttgggagctcaggcgggctctgtgagctctaggcaactgcagcttgacgtggaactggaaccagggtggtctcaagtgcctggcagcaagttcagcgttttcgctccttggcatcacgtgaggggatgggggctggacctggtctctatcctgtgcagggcgttggagggtgaggcccaccgcgtcttgttcggatttgtaccggaaaccaaagaagaactccaggtgatgccagggaacatcgtttttgtgttaaagaaaggcaacgataattgggccacggtgatgttcaatggtcagaagggactggtcccttgtaactacctggaaccagtggagctgaggattcatccccaacagcagccccaggaggaatcttcgcctcagagtgatattcccgcgcctccatcttctaaggcgccgggcagaccacaattaagtcctggccagaaacagaaagaagagcctaaggaggtgaagctgagtgtgcccatgccctacactctcaaggtgcactacaagtacacggtagtgatgaagacccagccaggactcccttacagccaagtgagggacatggtgagtaagaagcttgaactgcgcttggaacacactaagctgagctacaggccacgggactccaacgaattagtccctctgtccgaggatagtatgaaggatgcttggggccaagtaaagaactactgtcttacactgtggtgtgaaaacacagtaggagaccaaggcttccctgacgagcccaaagagagcgagaaagccgacgctaataaccagacaacggaacctcagctgaagaaaggtagccaggtggaggcgcttttctcatacgaggctacccagccagaggacctggagtttcaggaaggagacattattctcgtgctaagtaaagtaaatgaagagtggcttgaaggcgagtgcaaaggaaaggtggggattttcccaaaggtctttgttgaggattgtgcaaccactgatctcgaatctacccggagagaagtgtag

SEQ ID NO: 298100 - DNA, 1581 bp, Artificial Sequence
  derived and/or modified sequence
atgagcctggtggaggccatcagcctgtggaatgaaggagtgctggccgctgacaagaaggactggaagggggccctggatgccttctctgctgtgcaggacccccacagccgcatctgcttcaacatcggctgcatgtacaccatcctgaagaacatgacagaggccgagaaggccttcaccaggagcatcaacagagacaagcacctggccgtggcctacttccagaggggcatgctgtactaccagacagagaagtatgacctggccatcaaggacctgaaggaggccctgatccagctgcggggcaaccagctgattgactacaagatcctgggcctgcagttcaagctgtttgcctgtgaggtgctgtacaacatcgccttcatgtatgccaagaaggaggagtggaagaaggccgaggagcagctggccctggccacctccatgaagtctgagcccaggcacagcaagattgacaaggccatggagtgtgtgtggaagcagaagctgtatgagcctgtggtgattcctgtgggcaagctgttccggcccaatgaaaggcaggtggcccagctggccaagaaggactacctgggcaaggccaccgtggtggcctctgtggtggaccaggacagcttcagcggctttgcccccctgcagccccaggccgctgagcccccaccccggcccaagaccccagagatcttccgggccctggagggggaggcccaccgggtgctgtttggatttgtgcctgagaccaaggaggagctgcaggtgatgcctggcaacatcgtgtttgtgctgaagaagggaaatgacaactgggccaccgtgatgtttaatggccagaagggcctggtgccctgcaactacctggagcctgtggagctgcgcatccacccccagcagcagccccaggaggagagcagcccccagagcgacatcccagccccacccagcagcaaggcccctggccggccccagctgagccctggccagaagcagaaggaggagcccaaggaggtgaagctgtctgtgcccatgccctacaccctgaaggtgcactacaagtacacagtggtgatgaagacccagcccggcctgccctacagccaggtgcgggacatggtgtccaagaagctggagctgcggctggagcacaccaagctgagctaccggccccgggacagcaatgagctggtgcccctgtctgaagattccatgaaggatgcctggggccaggtgaagaactactgcctgaccctgtggtgtgaaaatacagtgggggaccagggcttcccagatgagcccaaggagagcgagaaggcagatgccaacaaccagaccacagagccccagctgaagaagggcagccaggtggaggccctcttctcctatgaggccacccagcctgaggacctggagttccaggagggggacatcatcctggtgctgagcaaggtgaatgaggagtggctggagggggagtgcaagggcaaggtgggcatcttccccaaggtgtttgtggaggactgtgccaccacagacctggagagcacccggcgggaggtgtag

SEQ ID NO: 298101 - DNA, 1797 bp, Artificial Sequence
  derived and/or modified sequence
ggcagccctgcccggggagatgcccccacctgcctgctgtctgtgtcctggcagctgtcctggccacccagcttctacctgatcatgagcctggtggaggccatcagcctgtggaatgaaggagtgctggccgctgacaagaaggactggaagggggccctggatgccttctctgctgtgcaggacccccacagccgcatctgcttcaacatcggctgcatgtacaccatcctgaagaacatgacagaggccgagaaggccttcaccaggagcatcaacagagacaagcacctggccgtggcctacttccagaggggcatgctgtactaccagacagagaagtatgacctggccatcaaggacctgaaggaggccctgatccagctgcggggcaaccagctgattgactacaagatcctgggcctgcagttcaagctgtttgcctgtgaggtgctgtacaacatcgccttcatgtatgccaagaaggaggagtggaagaaggccgaggagcagctggccctggccacctccatgaagtctgagcccaggcacagcaagattgacaaggccatggagtgtgtgtggaagcagaagctgtatgagcctgtggtgattcctgtgggcaagctgttccggcccaatgaaaggcaggtggcccagctggccaagaaggactacctgggcaaggccaccgtggtggcctctgtggtggaccaggacagcttcagcggctttgcccccctgcagccccaggtgcggcagagcgacctgctgggcgcccaggccggctctgtgagcagccggcagctgcagctggatgtggagctggagcccggctggagccaggtgcccggcagcaagttctctgtgtttgccccctggcaccacgtgcggggctggggcctggacctggtgtccatcctgtgccgggccctggagggggaggcccaccgggtgctgtttggatttgtgcctgagaccaaggaggagctgcaggtgatgcctggcaacatcgtgtttgtgctgaagaagggaaatgacaactgggccaccgtgatgtttaatggccagaagggcctggtgccctgcaactacctggagcctgtggagctgcgcatccacccccagcagcagccccaggaggagagcagcccccagagcgacatcccagccccacccagcagcaaggcccctggccggccccagctgagccctggccagaagcagaaggaggagcccaaggaggtgaagctgtctgtgcccatgccctacaccctgaaggtgcactacaagtacacagtggtgatgaagacccagcccggcctgccctacagccaggtgcgggacatggtgtccaagaagctggagctgcggctggagcacaccaagctgagctaccggccccgggacagcaatgagctggtgcccctgtctgaagattccatgaaggatgcctggggccaggtgaagaactactgcctgaccctgtggtgtgaaaatacagtgggggaccagggcttcccagatgagcccaaggagagcgagaaggcagatgccaacaaccagaccacagagccccagctgaagaagggcagccaggtggaggccctcttctcctatgaggccacccagcctgaggacctggagttccaggagggggacatcatcctggtgctgagcaaggtgaatgaggagtggctggagggggagtgcaagggcaaggtgggcatcttccccaaggtgtttgtggaggactgtgccaccacagacctggagagcacccggcgggaggtgtag

SEQ ID NO: 298102 - DNA, 1581 bp, Artificial Sequence
  derived and/or modified sequence
atgagcctggtggaggccatcagcctgtggaacgagggcgtgctggcagctgacaaaaaagactggaagggagcgctggacgcgttcagcgcagtacaggaccctcacagcagaatatgctttaacatcggttgtatgtacaccatccttaagaacatgaccgaagcagaaaaggctttcactagaagtatcaaccgggacaagcatctggctgttgcttatttccagcgagggatgttgtactaccagacagagaaatatgacctggccatcaaggacctgaaagaagccttaattcagctaaggggcaaccagctgattgactataagatcctcggcttgcagttcaagctgtttgcttgtgaggtgctgtataacatcgcgttcatgtatgcgaagaaggaagagtggaaaaaagccgaagaacagctcgcccttgccacttccatgaagtccgagcccagacacagtaaaattgataaggccatggagtgcgtatggaaacagaagctgtatgagcctgtagtgatccctgtgggaaagctgtttaggcctaatgagaggcaggtggcacaacttgccaagaaggactacttgggaaaggccaccgtggtggcctctgttgtggatcaggacagcttcagcggattcgctccactccagccccaggcagctgagcccccacctcgtccgaagacgccagagatttttcgggcattggaaggcgaggctcacagagtcttgttcggctttgtgccggagacaaaagaggaactgcaggtgatgcctgggaacatcgtctttgtgctgaaaaagggtaatgacaattgggcaacagtaatgttcaatggacagaaaggtctggtgccctgtaactacctggagccggtggagctgaggattcacccccagcagcaacctcaagaggagagctctccacaaagcgatattcccgccccgccctcatctaaggcacccgggcgtcctcagttgagtcctggccagaaacaaaaagaggagccaaaagaggtgaaactcagcgtccccatgccttacacactaaaggtgcactataagtatacagtcgtgatgaagacccagcctgggctcccgtattctcaagtgcgtgatatggtgagcaagaagttggaactgcgactggagcacactaaactctcgtatcgtcccagggactccaacgagctggtcccgttaagcgaagattctatgaaggatgcttgggggcaggtcaaaaactattgcctcacgttgtggtgtgagaacaccgtgggagaccagggttttcccgacgaaccgaaagaatccgaaaaggcagacgcaaataatcagaccacggagccacaactcaaaaagggaagccaggttgaggcgcttttttcctacgaagcgacccaacctgaagacctggaattccaggagggggacataatactcgttttgtccaaggtgaacgaagaatggctggaaggcgagtgcaaaggcaaagtgggcattttccctaaggtgttcgtggaagactgcgcgaccactgatctcgagtccactcgtagagaggtgtag

SEQ ID NO: 298103 - DNA, 1581 bp, Artificial Sequence
  derived and/or modified sequence
atgagcctggtggaggccatcagcctgtggaacgagggcgtgctggcggccgataaaaaagattggaagggggccttagatgccttcagcgccgttcaagacccccactccagaatttgttttaacattggatgtatgtacacaatcctcaaaaatatgaccgaagccgagaaggcatttacacgttccataaatcgggacaaacacttggctgtggcctattttcagaggggcatgctttattatcaaacagaaaagtacgatcttgctatcaaggacctgaaagaggctctgatacagctgcgcggcaaccagctaatcgactacaagatcttggggctgcagtttaagctcttcgcctgcgaagtgctatataacatcgccttcatgtatgccaagaaagaagaatggaaaaaagcagaggaacagctggcgttggccacatctatgaaatcagaaccacggcattccaagattgacaaggcgatggagtgcgtgtggaaacaaaagctgtacgaacccgtggtcatcccagttggaaagctgtttagacccaatgaaagacaggtagctcaactggccaaaaaggactaccttggcaaggccacagtggtggcaagcgtagttgaccaagatagcttcagcggatttgccccccttcagccccaagctgcggagcccccgccgcgtccaaagacgccagagatcttccgtgcgctggagggagaagcccaccgggtgctgttcggcttcgtgccagagactaaggaggaactccaagtcatgcccggaaatatcgtgtttgtcttaaaaaaagggaatgacaactgggctacagtgatgttcaatgggcagaaagggctagtgccctgcaattacttggaacctgtagaactgaggatacatccgcaacagcagccgcaggaggagagctcacctcagtcagatatccccgcgcctccctctagcaaagcccccggaagaccacagctgtctccaggtcagaaacaaaaggaagaaccaaaagaagtgaagctgagtgtgcctatgccgtacacactgaaggtccactacaaatatacggtcgtcatgaagactcagccagggctgccttactctcaggtgcgcgacatggtgtccaagaaactggagctgcggctagagcacacgaagctgtcctacagaccgcgggacagcaacgagcttgtcccattgtcagaggatagcatgaaggacgcttggggtcaagtcaagaactactgtctaaccctctggtgtgagaataccgtgggagatcagggctttcccgatgagcccaaagagtcagagaaggccgacgccaataatcagaccactgagccgcagctgaagaagggaagtcaggttgaggcactgttctcttacgaagcgacccagcccgaggacctggaatttcaagaaggagatatcattttagtgttatccaaggttaatgaggaatggcttgagggcgaatgcaagggaaaagtaggcatatttcctaaggttttcgtagaggactgcgccacaaccgatctagaaagcacacgcagggaggtgtag

SEQ ID NO: 298104 - DNA, 1797 bp, Artificial Sequence
  derived and/or modified sequence
ggcagccccgcccggggcgacgcccccacctgcctgctgagcgtgagttggcagttgtcctggccacccagtttctacctgataatgtccctagtggaagccatttcgctgtggaatgagggagttctcgcagcagacaaaaaggattggaagggggctctggacgcttttagcgcagtgcaggatccccactctagaatctgctttaatatcggctgcatgtacacgatcctcaagaacatgaccgaggccgagaaggcatttactcgatctattaacagggacaaacacctcgccgtggcatatttccaaagagggatgttatactaccagactgaaaaatacgatctggccataaaagacctgaaagaagcgttaatccagctgcgggggaaccagctcatcgactacaaaattctaggcttgcagtttaagctctttgcttgtgaggtactctataacatcgctttcatgtacgctaagaaagaggaatggaagaaagccgaggagcagctggccttggccacaagtatgaaatccgaacctcggcactcgaagatcgataaggctatggagtgtgtttggaagcaaaagctgtacgagccagtagtcatacctgtcggcaaactctttcgacccaacgagcggcaagtcgctcaactcgctaagaaagactacctcggtaaggctactgtcgtcgcatcagtggtcgaccaagactccttctcgggcttcgcacctctgcagccgcaggtgagacagtccgacctacttggcgcccaggccggatcagtttcatcaagacaattgcaactcgacgtggagctcgagccaggttggtcccaggtccccgggtccaaattctctgtgtttgctccctggcaccacgttcgagggtggggcttagacctcgtctctattctctgtcgggccctggagggcgaggcccatcgagttttgttcgggttcgttcccgagacaaaagaggagctgcaggtgatgccaggaaatattgtattcgtgctaaagaaaggaaatgacaattgggcaacagtcatgtttaacgggcagaaaggcctggtgccatgtaactacctcgagcctgttgagctgcggattcatccacaacagcagcctcaggaagagagctcccctcagagtgacatccctgcccccccaagcagcaaggccccaggcaggccacagctgtcgcctggacagaagcaaaaagaagagcccaaggaggtcaaactatccgtgcccatgccgtatacattgaaagtccactacaaatacacagtcgtgatgaaaacgcaaccaggcttgccctattcacaagtgagagatatggtgtctaaaaaactggagttgagactggagcatactaagctgtcttatagaccccgagactcaaacgaactggtgcccctgtccgaagacagcatgaaggacgcctggggtcaggtaaagaattactgcttgacactgtggtgtgagaataccgtcggcgaccagggatttcctgacgagcccaaagagagtgagaaggctgacgctaataaccagacaaccgagccgcagctgaagaaagggtcgcaggtggaggccctattctcttatgaagctacgcagccagaagatttggagtttcaggagggggatatcattcttgtcctgtcaaaggtgaatgaggagtggctggaaggggagtgtaaaggtaaggtcgggatatttcctaaggtgtttgtcgaggattgcgccaccaccgatctggagtcaacaaggcgagaggtctag

SEQ ID NO: 298105 - DNA, 2226 bp, Artificial Sequence
  derived and/or modified sequence
tctctctctgcttctttccttttctctctcatggtagggttatgagtcagttgccaaaaggtggggacatttcctgatgcatttgcaacactgagaagttatcttaagggaggctgggccccattctactcatctggcccagaaagtgaacaccttgggggccactaaggcagccctgctaggggagacgctccaacctgtcttctctctgtctcctggcagctctcttggcctcctagtttctacctaatcatgtccctggtggaggccatcagcctctggaatgaaggggtgctggcagcggacaagaaggactggaagggagccctggatgccttcagtgccgtccaggacccccactcccggatttgcttcaacattggctgcatgtacactatcctgaagaacatgactgaagcagagaaggcctttaccagaagcattaaccgagacaagcacttggcagtggcttacttccaacgagggatgctctactaccagacagagaaatatgatttggctatcaaagaccttaaagaagccttgattcagcttcgagggaaccagctgatagactataagatcctggggctccagttcaagctgtttgcctgtgaggtgttatataacattgctttcatgtatgccaagaaggaggaatggaaaaaagctgaagaacagttagcattggccacgagcatgaagtctgagcccagacattccaaaatcgacaaggcgatggagtgtgtctggaagcagaagctatatgagccagtggtgatccctgtgggcaagctgtttcgaccaaatgagagacaagtggctcagctggccaagaaggattacctaggcaaggcgacggtcgtggcatctgtggtggatcaagacagtttctctgggtttgcccctctgcaaccacaggcagctgagcctccacccagaccgaaaaccccagagatcttcagggctctggaaggggaggctcaccgtgtgctatttgggtttgtgcctgagacaaaagaagagctccaggtcatgccagggaacattgtctttgtcttgaagaagggcaatgataactgggccacggtcatgttcaacgggcagaaggggcttgttccctgcaactaccttgaaccagttgagctgcggatccaccctcagcagcagccccaggaggaaagctctccgcagtccgacatcccagctcctcctagttccaaagcccctggaagaccccagctgtcaccaggccagaaacaaaaagaagagcctaaggaagtgaagctcagtgttcccatgccctacacactcaaggtgcactacaagtacacggtagtcatgaagactcagcccgggctcccctacagccaggtccgggacatggtgtctaagaaactggagctccggctggaacacactaagctgagctatcggcctcgggacagcaatgagctggtgcccctttcagaagacagcatgaaggatgcctggggccaggtgaaaaactactgcctgactctgtggtgtgagaacacagtgggtgaccaaggctttccagatgaacccaaggaaagtgaaaaagctgatgctaataaccagacaacagaacctcagcttaagaaaggcagccaagtggaggcactcttcagttatgaggctacccaaccagaggacctggagtttcaggaaggggatataatcctggtgttatcaaaggtgaatgaagaatggctggaaggggagtgcaaagggaaggtgggcattttccccaaagtttttgttgaagactgcgcaactacagatttggaaagcactcggagagaagtctaggatgtttcacaaactacaaagctgaagaaaatgaagccctattacttgtttgtaagatttagcacccttctgctgtatactgtactgagacattacagtttggaagtgttaactatttattccctgttaaaatttaacctactagacaatgatgtgagtacccaggatgatttcctggggcacagtgggtgaggagatggggacaggtgaatggaggagttaggggagaggaaaagtggatggaagtgtctggaaagggcacgagagagtcttccaggtactgatcctgtttcttgctctgagtgctagctagccagctgtgttcacactgtaaacattcatcaagctgtacatttggtgcacttttctgtgtcataccacaataaaaaaaaa

SEQ ID NO: 298106 - DNA, 2203 bp, Artificial Sequence
  derived and/or modified sequence
ctagtctttcagccttcaggctgtttttggcttgaagctctcttggcctcctagtttctacctaatcatgtccctggtggaggccatcagcctctggaatgaaggggtgctggcagcggacaagaaggactggaagggagccctggatgccttcagtgccgtccaggacccccactcccggatttgcttcaacattggctgcatgtacactatcctgaagaacatgactgaagcagagaaggcctttaccagaagcattaaccgagacaagcacttggcagtggcttacttccaacgagggatgctctactaccagacagagaaatatgatttggctatcaaagaccttaaagaagccttgattcagcttcgagggaaccagctgatagactataagatcctggggctccagttcaagctgtttgcctgtgaggtgttatataacattgctttcatgtatgccaagaaggaggaatggaaaaaagctgaagaacagttagcattggccacgagcatgaagtctgagcccagacattccaaaatcgacaaggcgatggagtgtgtctggaagcagaagctatatgagccagtggtgatccctgtgggcaagctgtttcgaccaaatgagagacaagtggctcagctggccaagaaggattacctaggcaaggcgacggtcgtggcatctgtggtggatcaagacagtttctctgggtttgcccctctgcaaccacaggcagctgagcctccacccagaccgaaaaccccagagatcttcagggctctggaaggggaggctcaccgtgtgctatttgggtttgtgcctgagacaaaagaagagctccaggtcatgccagggaacattgtctttgtcttgaagaagggcaatgataactgggccacggtcatgttcaacgggcagaaggggcttgttccctgcaactaccttgaaccagttgagctgcggatccaccctcagcagcagccccaggaggaaagctctccgcagtccgacatcccagctcctcctagttccaaagcccctggaagaccccagctgtcaccaggccagaaacaaaaagaagagcctaaggaagtgaagctcagtgttcccatgccctacacactcaaggtgcactacaagtacacggtagtcatgaagactcagcccgggctcccctacagccaggtccgggacatggtgtctaagaaactggagctccggctggaacacactaagctgagctatcggcctcgggacagcaatgagctggtgcccctttcagaagacagcatgaaggatgcctggggccaggtgaaaaactactgcctgactctgtggtgtgagaacacagtgggtgaccaaggctttccagatgaacccaaggaaagtgaaaaagctgatgctaataaccagacaacagaacctcagcttaagaaaggcagccaagtggaggcactcttcagttatgaggctacccaaccagaggacctggagtttcaggaaggggatataatcctggtgttatcaaaggtgaatgaagaatggctggaaggggagtgcaaagggaaggtgggcattttccccaaagtttttgttgaagactgcgcaactacagatttggaaagcactcggagagaagtctaggatgtttcacaaactacaaagctgaagaaaatgaagccctattacttgtttgtaagatttagcacccttctgctgtatactgtactgagacattacagtttggaagtgttaactatttattccctgttaaaatttaacctactagacaatgatgtgagtacccaggatgatttcctggggcacagtgggtgaggagatggggacaggtgaatggaggagttaggggagaggaaaagtggatggaagtgtctggaaagggcacgagagagtcttccaggtactgatcctgtttcttgctctgagtgctagctagccagctgtgttcacactgtaaacattcatcaagctgtacatttggtgcacttttctgtgtcataccacaataaaaaaaaacctagcatcttacaaaaacaagacacccaagtccaggcccaaggagtaagtacaaatattcctgtttctgaaccattactgtaattggctcttaaggcttgaagtaaccttataggttactcataaggcatatacaaataaacttgtttgttttcttttttc

SEQ ID NO: 298107 - DNA, 2543 bp, Artificial Sequence
  derived and/or modified sequence
acactccacccctactcgccctctctctctctgcttctttccttttctctctcatggtagggttatgagtcagttgccaaaaggtggggacatttcctgatgcatttgcaacactgagaagttatcttaagggaggctgggccccattctactcatctggcccagaaagtgaacaccttgggggccactaaggcagccctgctaggggagacgctccaacctgtcttctctctgtctcctggcagctctcttggcctcctagtttctacctaatcatgtccctggtggaggccatcagcctctggaatgaaggggtgctggcagcggacaagaaggactggaagggagccctggatgccttcagtgccgtccaggacccccactcccggatttgcttcaacattggctgcatgtacactatcctgaagaacatgactgaagcagagaaggcctttaccagaagcattaaccgagacaagcacttggcagtggcttacttccaacgagggatgctctactaccagacagagaaatatgatttggctatcaaagaccttaaagaagccttgattcagcttcgagggaaccagctgatagactataagatcctggggctccagttcaagctgtttgcctgtgaggtgttatataacattgctttcatgtatgccaagaaggaggaatggaaaaaagctgaagaacagttagcattggccacgagcatgaagtctgagcccagacattccaaaatcgacaaggcgatggagtgtgtctggaagcagaagctatatgagccagtggtgatccctgtgggcaagctgtttcgaccaaatgagagacaagtggctcagctggccaagaaggattacctaggcaaggcgacggtcgtggcatctgtggtggatcaagacagtttctctgggtttgcccctctgcaaccacaggtaaggcagtcagacctcttgggagcccaggcaggctcagtgtcatctcggcagttgcagttagatgtggagttagagccaggctggagccaagtccctggctccaagttcagtgtatttgcgccatggcatcatgtgaggggatgggggctggatcttgtgtctatcctctgcagggctctggaaggggaggctcaccgtgtgctatttgggtttgtgcctgagacaaaagaagagctccaggtcatgccagggaacattgtctttgtcttgaagaagggcaatgataactgggccacggtcatgttcaacgggcagaaggggcttgttccctgcaactaccttgaaccagttgagctgcggatccaccctcagcagcagccccaggaggaaagctctccgcagtccgacatcccagctcctcctagttccaaagcccctggaagaccccagctgtcaccaggccagaaacaaaaagaagagcctaaggaagtgaagctcagtgttcccatgccctacacactcaaggtgcactacaagtacacggtagtcatgaagactcagcccgggctcccctacagccaggtccgggacatggtgtctaagaaactggagctccggctggaacacactaagctgagctatcggcctcgggacagcaatgagctggtgcccctttcagaagacagcatgaaggatgcctggggccaggtgaaaaactactgcctgactctgtggtgtgagaacacagtgggtgaccaaggctttccagatgaacccaaggaaagtgaaaaagctgatgctaataaccagacaacagaacctcagcttaagaaaggcagccaagtggaggcactcttcagttatgaggctacccaaccagaggacctggagtttcaggaaggggatataatcctggtgttatcaaaggtgaatgaagaatggctggaaggggagtgcaaagggaaggtgggcattttccccaaagtttttgttgaagactgcgcaactacagatttggaaagcactcggagagaagtctaggatgtttcacaaactacaaagctgaagaaaatgaagccctattacttgtttgtaagatttagcacccttctgctgtatactgtactgagacattacagtttggaagtgttaactatttattccctgttaaaatttaacctactagacaatgatgtgagtacccaggatgatttcctggggcacagtgggtgaggagatggggacaggtgaatggaggagttaggggagaggaaaagtggatggaagtgtctggaaagggcacgagagagtcttccaggtactgatcctgtttcttgctctgagtgctagctagccagctgtgttcacactgtaaacattcatcaagctgtacatttggtgcacttttctgtgtcataccacaataaaaaaaaacctagcatcttacaaaaacaagacacccaagtccaggcccaaggagtaagtacaaatattcctgtttctgaaccattactgtaattggctcttaaggcttgaagtaaccttataggttactcataaggcatatacaaataaacttgtttgttttcttttttc

SEQ ID NO: 298108 - DNA, 1581 bp, Artificial Sequence
  derived and/or modified sequence
atgagccttgttgaagccatctctttatggaatgagggagtgctcgctgcagataaaaaggattggaaaggcgctctcgacgccttcagtgcagtgcaggatccccactctcggatttgcttcaatatcgggtgtatgtacacaatcctaaagaacatgactgaggcagaaaaagcattcacacggtccatcaaccgggataagcacctagctgtagcctactttcagaggggcatgctttattaccagaccgaaaaatatgacctcgcgattaaggatctgaaggaggcattgatacagctgaggggtaatcagctaattgactacaaaatcctgggccttcagttcaaactgttcgcctgcgaagtgctgtacaatatcgcctttatgtatgctaagaaggaggaatggaagaaagctgaggaacagttggcactggcgacgagcatgaaaagcgagcctcgacattccaaaatcgataaggcaatggaatgtgtctggaaacagaaactctacgagccagtggtaatacctgtgggtaaactcttccgcccaaacgagcgtcaggtggcgcaactcgctaagaaggactacctgggaaaggccacggtcgtcgcaagtgtggtcgatcaggactccttcagcggctttgccccattacagccccaggcagccgaacccccacctaggcctaaaaccccagagatatttcgagcgctcgagggcgaggcacaccgcgtcttgtttgggttcgtgccggagacaaaggaggaactgcaagtcatgcccggtaatatagtgttcgtgctgaaaaaggggaacgataattgggcaacagtcatgtttaacggccagaaagggctagtcccctgtaattacctggagcctgtggaacttaggattcacccacaacaacagccccaagaggagtcgtctccacagtccgatattccagcccctcccagtagcaaagccccaggacggcctcagctatcaccgggacagaagcagaaggaggagcctaaggaggttaagttatcggtgccaatgccatacacgctgaaggtgcactataagtacaccgtggtaatgaaaacacagccgggactgccttattcacaagtgcgggacatggtgagcaagaagcttgagttgcgccttgaacacacaaaactgtcttacagacctcgtgattcaaacgagttagttccactgagcgaggactctatgaaagatgcctggggacaggtgaagaactattgtcttacactttggtgcgagaatactgtgggggatcagggattccccgatgagcctaaggagtctgaaaaggctgacgcgaataatcagacaacagagccgcagttgaaaaagggaagtcaggttgaagcgctgttctcatacgaagccacccagcctgaagacctggagtttcaggagggggatatcattctggtcttatccaaggtgaacgaggaatggctggaaggcgagtgtaaagggaaggtcggcatcttcccgaaagtatttgtagaggactgcgcaaccaccgacctagagagcacccgccgtgaagtgtag

SEQ ID NO: 298109 - DNA, 1581 bp, Artificial Sequence
  derived and/or modified sequence
atgagcctggtggaggccatcagcttgtggaacgagggagttcttgcggctgataagaaagattggaagggagccctggacgccttcagcgcagtgcaggacccacattcaaggatttgtttcaacattggctgtatgtacacgatcctaaagaacatgaccgaggctgagaaggcttttacacgttcaattaatcgtgataagcacctggctgtggcatatttccagcgcggtatgctttattaccagacagaaaaatacgatcttgctattaaggacctgaaagaagcgctgatccaattgcggggtaatcagctcatcgattataagattctcgggctacagtttaaactgtttgcttgcgaggtcctttataatatcgccttcatgtatgcaaagaaggaagagtggaagaaggcggaagagcaactggcactcgctacgtccatgaagtccgagccgaggcactcaaagattgataaagccatggaatgtgtgtggaaacaaaaactctatgaaccagtcgtgatccctgttggaaaattatttagacccaatgagcgtcaggtcgcgcagctggcaaagaaggactacctcggcaaagcaacagtcgtggcgagcgtcgtggatcaggattctttctcagggtttgcccctctacagccgcaagctgctgagccacctccaagacctaaaacccccgaaatatttagggccttggagggggaggctcatcgggtgctctttggatttgttccagagacgaaggaggaactccaagtaatgccaggaaatattgtgtttgtgctcaaaaagggtaatgacaattgggccaccgtgatgtttaatggccagaaaggtctcgtgccatgcaactatctcgaacctgttgaactccggatccacccccagcagcagcctcaggaggagagtagtccgcagagcgacattcccgctcctccgtcgtccaaagcccctggcaggccccagcttagtcccggacaaaagcagaaggaagaaccaaaggaggtaaagctgtcagtgcccatgccctataccctcaaagtgcattacaagtacaccgtggtgatgaagactcaacccggactgccttacagtcaagtgagggatatggtctctaagaagctcgagttacggctggaacacacgaaattgtcgtaccgcccaagggattcaaacgagcttgtccctctctctgaggactcaatgaaggatgcgtggggacaggtgaaaaactactgccttaccttatggtgtgaaaatacggtgggcgatcagggttttccagacgagcctaaggaaagcgaaaaagctgatgcaaataatcagacaacggagccacagcttaagaagggatcccaggttgaggccctgtttagttatgaggctactcagcctgaggatctggagtttcaggaaggcgacattatattagttttatctaaggtgaatgaggaatggctggaaggcgagtgtaaaggcaaagtaggcatattcccaaaggtttttgtcgaggattgtgccaccaccgatctggagtctacaaggagggaggtctag

SEQ ID NO: 298110 - DNA, 1797 bp, Artificial Sequence
  derived and/or modified sequence
ggatcccctgctcgaggggatgcccctacgtgcctcctgagtgtatcctggcagttgagctggccaccatcattttaccttatcatgtctttggtggaggcgatcagcctatggaatgagggagtcctggcagctgataagaaggattggaagggggcactggatgctttctcagccgtgcaggacccccactcccggatctgtttcaatattggttgcatgtacactattttgaagaatatgacggaggctgagaaggcctttacaagatcaatcaacagagacaaacatctcgcagtggcctatttccagaggggcatgctgtattaccagaccgaaaaatatgacttagcaattaaggacctcaaggaggccttgatacagctgcgaggaaaccagctcattgactacaagattctgggactgcagtttaagctgttcgcctgcgaggtgctgtacaacatcgcttttatgtatgctaaaaaggaagaatggaaaaaagccgaggagcaacttgctctcgctacaagcatgaagagtgagcctcggcattctaagatcgacaaggctatggaatgtgtttggaaacagaagctctatgagccagtggtgatcccagtcggcaagctgttcagacctaacgaaagacaggtcgcacagttagctaaaaaagactatctggggaaggccaccgttgtcgcttctgtggtcgaccaggacagttttagcggattcgccccactacaaccccaggtaagacagtccgatctcctgggggcacaggccggtagcgtgagttccagacaattgcagttggacgtcgagttagagcctggctggtctcaagtaccagggagtaagttttcagtattcgcaccctggcatcacgtcagaggctggggcttggacctggtctcaatcctgtgtcgggctctggagggggaagcccacagggtcctcttcggttttgtgccagagaccaaggaggagctgcaggtgatgcccggaaacatagtgttcgtgttgaaaaaaggcaacgataactgggccactgtgatgtttaatggccagaaagggttggtgccatgtaactaccttgaacccgtggagctcagaattcaccctcagcagcagcctcaggaagagtcctccccccagtcagatatcccggcaccgccatcttctaaagctcctggccgaccacagctgtcacccggtcagaaacagaaagaggaacccaaagaggtgaagttgtcagtgccaatgccttacacgctcaaggtgcattataaatataccgtggtcatgaaaacacagcccggtctgccatattcacaggtgagagacatggtgagtaaaaaactagaactcaggctggagcacactaagctaagctaccgcccacgcgatagtaatgagcttgtgcccctgtctgaggactccatgaaagacgcgtggggccaagtgaaaaattattgtcttactctctggtgtgaaaacaccgtgggggatcagggattccctgacgaacctaaagagtctgaaaaggccgatgcgaataaccaaactaccgagcctcagctgaagaagggcagccaggtggaggctctcttcagttacgaggccacccagcccgaggatttggagtttcaagagggcgacatcatcctcgtgctgagcaaagtgaacgaagaatggctggaaggcgagtgcaaaggaaaggtcgggattttccctaaggtcttcgtggaagactgtgctacgacggatttggaaagtacaagaagggaggtttag

SEQ ID NO: 298111 - DNA, 1581 bp, Artificial Sequence
  derived and/or modified sequence
atgagcctggtggaggccatcagcctgtggaacgagggcgtgctggccgccgacaagaaggactggaagggcgccctggacgccttcagcgccgtgcaggacccccacagcagaatctgcttcaacatcggctgcatgtacaccatcctgaagaacatgaccgaggccgagaaggccttcaccagaagcatcaacagagacaagcacctggccgtggcctacttccagagaggcatgctgtactaccagaccgagaagtacgacctggccatcaaggacctgaaggaggccctgatccagctgagaggcaaccagctgatcgactacaagatcctgggcctgcagttcaagctgttcgcctgcgaggtgctgtacaacatcgccttcatgtacgccaagaaggaggagtggaagaaggccgaggagcagctggccctggccaccagcatgaagagcgagcccagacacagcaagatcgacaaggccatggagtgcgtgtggaagcagaagctgtacgagcccgtggtgatccccgtgggcaagctgttcagacccaacgagagacaggtggcccagctggccaagaaggactacctgggcaaggccaccgtggtggccagcgtggtggaccaggacagcttcagcggcttcgcccccctgcagccccaggccgccgagcccccccccagacccaagacccccgagatcttcagagccctggagggcgaggcccacagagtgctgttcggcttcgtgcccgagaccaaggaggagctgcaggtgatgcccggcaacatcgtgttcgtgctgaagaagggcaacgacaactgggccaccgtgatgttcaacggccagaagggcctggtgccctgcaactacctggagcccgtggagctgagaatccacccccagcagcagccccaggaggagagcagcccccagagcgacatccccgccccccccagcagcaaggcccccggcagaccccagctgagccccggccagaagcagaaggaggagcccaaggaggtgaagctgagcgtgcccatgccctacaccctgaaggtgcactacaagtacaccgtggtgatgaagacccagcccggcctgccctacagccaggtgagagacatggtgagcaagaagctggagctgagactggagcacaccaagctgagctacagacccagagacagcaacgagctggtgcccctgagcgaggacagcatgaaggacgcctggggccaggtgaagaactactgcctgaccctgtggtgcgagaacaccgtgggcgaccagggcttccccgacgagcccaaggagagcgagaaggccgacgccaacaaccagaccaccgagccccagctgaagaagggcagccaggtggaggccctgttcagctacgaggccacccagcccgaggacctggagttccaggagggcgacatcatcctggtgctgagcaaggtgaacgaggagtggctggagggcgagtgcaagggcaaggtgggcatcttccccaaggtgttcgtggaggactgcgccaccaccgacctggagagcaccagaagagaggtgtag

SEQ ID NO: 298112 - DNA, 1797 bp, Artificial Sequence
  derived and/or modified sequence
ggcagccccgccagaggcgacgcccccacctgcctgctgagcgtgagctggcagctgagctggccccccagcttctacctgatcatgagcctggtggaggccatcagcctgtggaacgagggcgtgctggccgccgacaagaaggactggaagggcgccctggacgccttcagcgccgtgcaggacccccacagcagaatctgcttcaacatcggctgcatgtacaccatcctgaagaacatgaccgaggccgagaaggccttcaccagaagcatcaacagagacaagcacctggccgtggcctacttccagagaggcatgctgtactaccagaccgagaagtacgacctggccatcaaggacctgaaggaggccctgatccagctgagaggcaaccagctgatcgactacaagatcctgggcctgcagttcaagctgttcgcctgcgaggtgctgtacaacatcgccttcatgtacgccaagaaggaggagtggaagaaggccgaggagcagctggccctggccaccagcatgaagagcgagcccagacacagcaagatcgacaaggccatggagtgcgtgtggaagcagaagctgtacgagcccgtggtgatccccgtgggcaagctgttcagacccaacgagagacaggtggcccagctggccaagaaggactacctgggcaaggccaccgtggtggccagcgtggtggaccaggacagcttcagcggcttcgcccccctgcagccccaggtgagacagagcgacctgctgggcgcccaggccggcagcgtgagcagcagacagctgcagctggacgtggagctggagcccggctggagccaggtgcccggcagcaagttcagcgtgttcgccccctggcaccacgtgagaggctggggcctggacctggtgagcatcctgtgcagagccctggagggcgaggcccacagagtgctgttcggcttcgtgcccgagaccaaggaggagctgcaggtgatgcccggcaacatcgtgttcgtgctgaagaagggcaacgacaactgggccaccgtgatgttcaacggccagaagggcctggtgccctgcaactacctggagcccgtggagctgagaatccacccccagcagcagccccaggaggagagcagcccccagagcgacatccccgccccccccagcagcaaggcccccggcagaccccagctgagccccggccagaagcagaaggaggagcccaaggaggtgaagctgagcgtgcccatgccctacaccctgaaggtgcactacaagtacaccgtggtgatgaagacccagcccggcctgccctacagccaggtgagagacatggtgagcaagaagctggagctgagactggagcacaccaagctgagctacagacccagagacagcaacgagctggtgcccctgagcgaggacagcatgaaggacgcctggggccaggtgaagaactactgcctgaccctgtggtgcgagaacaccgtgggcgaccagggcttccccgacgagcccaaggagagcgagaaggccgacgccaacaaccagaccaccgagccccagctgaagaagggcagccaggtggaggccctgttcagctacgaggccacccagcccgaggacctggagttccaggagggcgacatcatcctggtgctgagcaaggtgaacgaggagtggctggagggcgagtgcaagggcaaggtgggcatcttccccaaggtgttcgtggaggactgcgccaccaccgacctggagagcaccagaagagaggtgtag

SEQ ID NO: 298113 - protein, 855 aa, Artificial Sequence
  derived and/or modified sequence
MILIPRMLLVLFLLLPILSSAKAQVNPAICRYPLGMSGGQIPDEDITASSQWSESTAAKYGRLDSEEGDGAWCPEIPVEPDDLKEFLQIDLHTLHFITLVGTQGRHAGGHGIEFAPMYKINYSRDGTRWISWRNRHGKQVLDGNSNPYDIFLKDLEPPIVARFVRFIPVTDHSMNVCMRVELYGCVWLDGLVSYNAPAGQQFVLPGGSIIYLNDSVYDGAVGYSMTEGLGQLTDGVSGLDDFTQTHEYHVWPGYDYVGWRNESATNGYIEIMFEFDRIRNFTTMKVHCNNMFAKGVKIFKEVQCYFRSEASEWEPNAISFPLVLDDVNPSARFVTVPLHHRMASAIKCQYHFADTWMMFSEITFQSDAAMYNNSEALPTSPMAPTTYDPMLKVDDSNTRILIGCLVAIIFILLAIIVIILWRQFWQKMLEKASRRMLDDEMTVSLSLPSDSSMFNNNRSSSPSEQGSNSTYDRIFPLRPDYQEPSRLIRKLPEFAPGEEESGCSGVVKPVQPSGPEGVPHYAEADIVNLQGVTGGNTYSVPAVTMDLLSGKDVAVEEFPRKLLTFKEKLGEGQFGEVHLCEVEGMEKFKDKDFALDVSANQPVLVAVKMLRADANKNARNDFLKEIKIMSRLKDPNIIHLLAVCITDDPLCMITEYMENGDLNQFLSRHEPPNSSSSDVRTVSYTNLKFMATQIASGMKYLSSLNFVHRDLATRNCLVGKNYTIKIADFGMSRNLYSGDYYRIQGRAVLPIRWMSWESILLGKFTTASDVWAFGVTLWETFTFCQEQPYSQLSDEQVIENTGEFFRDQGRQTYLPQPAICPDSVYKLMLSCWRRDTKNRPSFQEIHLLLLQQGDE

SEQ ID NO: 298114 - protein, 148 aa, Artificial Sequence
  derived and/or modified sequence
MILIPRMLLVLFLLLPILSSAKAQVNPAICRYPLGMSGGQIPDEDITASSQWSESTAAKYGRLDSEEGDGAWCPEIPVEPDDLKEFLQIDLHTLHFITLVGTQGRHAGGHGIEFAPMYKINYSRDGTRWISWRNRHGKQVLDGNSNPY

SEQ ID NO: 298115 - protein, 171 aa, Artificial Sequence
  derived and/or modified sequence
  misc_feature (1)..(1): Xaa can be any naturally occurring amino acid
XIFILLAIIVIILWRQFWQKMLEKASRRMLDDEMTVSLSLPSDSSMFNNNRSSSPSEQGSNSTYDRIFPLRPDYQEPSRLIRKLPEFAPGEEESGCSGVVKPVQPSGPEGVPHYAEADIVNLQGVTGGNTYSVPAVTMDLLSGKDVAVEEFPRKLLTFKEKLGEGQFGEVS

SEQ ID NO: 298116 - protein, 130 aa, Artificial Sequence
  derived and/or modified sequence
MILIPRMLLVLFLLLPILSSAKAQVNPAICRYPLGMSGGQIPDEDITASSQWSESTAAKYGRLDSEEGDGAWCPEIPVEPDDLKEFLQIDLHTLHFITLVGTQGRHAGGHGIEFAPMYKINYSRDGTRWI

SEQ ID NO: 298117 - DNA, 2568 bp, Artificial Sequence
  derived and/or modified sequence
atgattctcatacctcgaatgttactagtgctttttcttctgctgcccatcctttcttctgccaaggcccaggtcaatccagccatttgccgttaccctctgggtatgagcggaggccaaattccagatgaagatataacagctagttcccagtggagcgaatcgacagccgcaaagtatggccggctcgactccgaggagggagatggcgcttggtgccctgagatccctgtagaacctgacgacctaaaagaattcctccagatcgatttacacactctccatttcatcaccctcgtggggacccaaggaagacacgcaggaggtcatggcatcgaattcgctcccatgtataagattaactactctcgggacggaacgcggtggataagctggcgtaatcgccacggtaagcaggtactggacggaaattccaacccatacgatatctttttgaaagatttagaacctccaatagtggccagattcgtgcgttttattccagtcactgaccactccatgaacgtgtgtatgagagttgagctgtatggctgtgtctggctagacgggcttgtgtcatataatgccccagcgggccagcagtttgtccttcctggcggctccatcatctacctgaatgacagcgtttacgatggcgcggtgggatacagtatgaccgagggcttgggccagctgacagacggtgtcagcggacttgacgatttcacccagacccacgaataccacgtatggcccggatacgactacgtgggatggaggaacgagagtgccaccaatggttacattgagatcatgttcgagttcgacagaattcggaattttaccaccatgaaggtacattgtaacaatatgtttgcaaagggagttaagatctttaaggaagtgcagtgctacttccgcagtgaggcgtccgagtgggaacccaacgccatctcgtttcccttggttctggatgatgtcaatcctagcgccaggtttgttaccgtaccactgcatcatagaatggcctcggccatcaagtgtcagtatcatttcgcagacacctggatgatgtttagcgaaatcacctttcagagcgatgctgcaatgtataataactctgaggctttgcctacaagcccaatggcgcctacaacatatgatcctatgctgaaggtggacgactctaatacccgtatcttgattggatgtctggtggctataattttcattctgcttgcaattattgtgataattctgtggcgccagttctggcagaagatgctagaaaaggcatcccggaggatgctagacgatgagatgaccgtctcacttagcctgccttccgactccagtatgttcaacaacaaccgttccagctccccttcagagcagggttccaacagcacctacgacagaattttccctctgcgccctgactaccaggaacccagccggctcatccgcaagttacccgagttcgctccgggcgaagaagaaagcgggtgctctggcgttgtcaagcctgtacaaccttctgggcccgaaggcgtccctcattatgccgaagctgacatcgtgaaccttcagggtgtcactggtgggaatacatatagtgtgcctgccgtgaccatggatcttctctctggcaaggacgtggccgtggaagagtttccaaggaagctgttaacctttaaagagaaactgggcgaaggccagtttggcgaagtgcatctctgtgaggtggagggcatggaaaaattcaaagacaaagactttgcgctggatgtgagcgccaatcagcccgtccttgtcgctgtgaagatgctcagagctgatgcgaacaagaacgctcgcaacgatttcttaaaagagataaaaataatgagtcggttgaaggaccccaatattattcacctgctagccgtgtgcataaccgatgatccgttatgtatgattactgagtatatggaaaatggagacctgaatcagttcttgagccgtcacgaaccaccaaatagttcttcctctgatgttagaacagtatcttacaccaacctgaaattcatggcgacccagatcgcatctggaatgaagtacttgtcttctctgaactttgtgcatcgcgatctggccacccgcaactgtctcgtgggcaaaaattataccattaaaatcgctgattttggtatgtccagaaacctttatagcggggactactaccgcattcaggggcgagcagtgctgcccattcgttggatgagctgggaaagcatcttgctgggaaaattcacgaccgcatctgatgtctgggcgttcggagtgacgctgtgggagacatttaccttttgtcaagaacagccttactctcaactgtccgatgaacaggttattgaaaacacaggcgaattctttcgggatcaagggaggcagacatatctgccccagccagcaatttgcccggactcagtgtacaagctcatgctttcatgctggcgaagggacacaaaaaatcggccctcttttcaggaaattcacctccttctgctccagcagggggacgaatag

SEQ ID NO: 298118 - DNA, 2568 bp, Artificial Sequence
  derived and/or modified sequence
atgattttgataccccgcatgcttttagtcctgttccttcttttgccaatcctatctagcgcgaaagctcaggtgaatcccgctatttgtaggtaccctctgggaatgagtggaggtcagattcctgatgaggacattacagcttcctctcagtggagtgagtctaccgctgccaagtacggacgactggattccgaagagggtgacggagcctggtgtcctgagatcccagtcgaacctgatgacctgaaggagtttctccagattgacctccacactctccattttattacgttggtcggcacccagggaaggcatgcgggcggacatgggatcgagtttgccccaatgtacaagatcaattactcacgggatggaacccggtggatcagctggagaaataggcatggcaagcaggttctggacgggaacagtaacccttatgatatcttcttaaaagatttagagcctcctatcgtggcaagatttgtcaggtttatcccagttaccgaccatagtatgaatgtgtgcatgcgcgtggagctttacggctgtgtgtggctggatggcctggtctcctacaatgccccagcgggccaacagttcgttctgcccggtggatccataatctatctaaacgattcagtgtacgatggcgcagtgggctatagtatgactgaaggcctcggtcagcttacggacggagtgagtggcctggacgattttacccaaacccatgaataccacgtctggcccggctacgactacgttggctggaggaacgagtccgcaaccaacggctatatagagatcatgttcgagtttgacagaatccgaaatttcactacaatgaaggttcactgcaacaacatgttcgcaaagggagtgaaaattttcaaagaggtccagtgctacttccgctcggaggctagcgagtgggaacctaatgccatcagtttccccctcgtattggatgatgtgaatccttccgctagattcgtgacggtaccactccaccacaggatggcatctgcaataaaatgtcagtatcactttgcggacacatggatgatgttttccgaaattacgttccagagtgacgcagctatgtataacaactctgaggctctaccaacgtcacctatggcccccactacatatgacccaatgctaaaggtagatgacagtaacactagaatcctgatcggatgtctggtcgcaatcatctttatcctgctggcaataattgtgatcattttatggagacagttctggcagaaaatgttagaaaaagcctcccgccggatgctcgatgatgagatgacggtgtctctatctctgccctccgactcttccatgttcaataataatcgatctagcagtccttctgaacaaggatctaactccacatatgaccggatttttcccttacggccggactaccaggagcccagtcggttgatccgcaaactgcccgagttcgccccaggggaagaggagtctggctgttcgggagtggtgaagccagttcagcctagtggccctgaaggcgtgccacactacgcggaagcagacatcgtgaatttacagggcgtcacaggaggaaatacatactctgtacccgccgtgacgatggacctcctgtctggaaaagatgtggccgtggaggaatttccacgcaagctgctaacgttcaaagaaaagctgggtgagggacagtttggggaagtccatctttgcgaagttgaagggatggaaaagtttaaagacaaagatttcgccctagatgtgagcgcaaatcagcccgttcttgtagcagttaagatgctccgagccgatgcaaacaaaaacgctcgaaatgattttctcaaagagatcaagatcatgtctcggttgaaggacccgaatatcatccacctgctggccgtatgcatcaccgacgatccgctgtgtatgatcaccgagtatatggaaaatggcgatttaaatcaatttctgtcccgccacgagcccccgaattcgtcatcctcagacgtgagaacagtctcatataccaacctgaagttcatggcaacacaaatagcatccgggatgaagtatctatcatcactaaattttgtgcaccgggacctagccacgcggaattgccttgtcggaaagaattataccattaaaatcgcagatttcggcatgagccgcaacctgtatagtggtgattactatcggatccagggtagggccgtgttgccgatacggtggatgtcctgggagtcgatcctcttagggaagttcaccactgcctccgacgtgtgggccttcggcgtcacgctgtgggagactttcaccttttgtcaggaacagccctactctcagctctctgatgagcaggtgatcgagaacacgggcgaattcttccgggaccaggggcgccagacgtacttgcctcagcccgccatttgtccagattctgtgtataagctaatgctcagctgctggcgcagagacaccaaaaataggccgtcattccaggaaatccacttattgctcctacagcagggcgacgagtag

SEQ ID NO: 298119 - DNA, 516 bp, Artificial Sequence
  derived and/or modified sequence
tgaatttttatcctgttggctattatcgttattatcctatggcgtcagttttggcagaagatgctcgagaaggcctcaagaagaatgctggatgatgagatgacagtatccctgtctctccctagcgacagcagcatgtttaacaataatcggtcctcttctccctccgagcagggcagcaactctacctacgatcgaatattccccttgcgaccggattaccaggagcctagcagattgatccgcaagctcccggagtttgccccaggtgaagaggagtcaggctgcagcggggtagtgaaaccagtgcagcctagcggaccagagggtgtgccccattacgccgaggctgatatcgtgaacctgcagggcgtcacggggggaaatacatactcggtgccggcagtcactatggacctcctgtctggcaaggacgttgcggtggaagaatttccaagaaagctactaaccttcaaggagaagttgggcgaaggacagttcggtgaagtctcatag

SEQ ID NO: 298120 - DNA, 2568 bp, Artificial Sequence
  derived and/or modified sequence
atgatcctgatccccaggatgctgctggtgctcttcctgctgctgcccatcctgagcagcgccaaggcccaggtgaacccagccatctgccgctaccccctgggcatgtctgggggccagatcccagatgaggacatcacagccagcagccagtggagcgagagcacagctgccaagtatggccgcctggacagcgaggagggagatggagcctggtgcccagagatccctgtggagccagatgacctgaaggagttcctgcagattgacctgcacaccctgcacttcatcaccctggtgggcacccagggcagacatgctgggggccacggcatcgagtttgcccccatgtacaagatcaactacagcagagatggcacccgctggatctcctggaggaacagacatggcaagcaggtgctggatggcaacagcaacccctatgacatcttcctgaaggacctggagccccccatcgtggccaggtttgtgcgcttcatccctgtgacagaccacagcatgaatgtgtgcatgagggtggagctgtatggctgtgtgtggctggatggcctggtgtcctacaatgccccagctggccagcagtttgtgctgcccggcggcagcatcatctacctgaatgattctgtgtatgatggagctgtgggctacagcatgacagagggcctgggccagctgacagatggagtgtctggcctggatgacttcacccagacccatgagtaccacgtgtggccaggctatgactatgtgggctggagaaatgaaagtgccaccaacggctacatcgagatcatgtttgaatttgaccgcatccggaacttcaccaccatgaaggtgcactgcaacaacatgtttgccaagggcgtgaagatcttcaaggaggtgcagtgctacttccgctctgaggccagcgagtgggagcccaatgccatctccttccccctggtgctggatgatgtgaaccccagcgccaggtttgtgacagtgcccctgcaccacaggatggccagcgccatcaagtgccagtaccactttgctgacacctggatgatgttcagcgagatcaccttccagagtgatgctgccatgtacaacaacagcgaggccctgcccaccagccccatggcccccaccacctatgaccccatgctgaaggtggatgacagcaacacccgcatcctgattggctgcctggtggccatcatcttcatcctgctggccatcatcgtcatcatcctgtggaggcagttctggcagaagatgctggagaaggccagcaggaggatgctggatgatgagatgacagtgtccctgagcctgcccagcgacagctccatgttcaacaacaacagaagcagcagccccagcgagcagggcagcaacagcacctatgaccgcatcttccccctgcggccagactaccaggagcccagccgcctcatcaggaagctgcctgagtttgcccctggagaggaggagagcggctgcagcggcgtggtgaagcctgtgcagcccagcggccctgagggcgtgccccactacgccgaggccgacatcgtgaacctgcagggcgtgactggaggcaacacctacagcgtgcctgctgtgaccatggacctgctgagcggcaaggatgtggccgtggaggagttccccaggaagctgctgaccttcaaggagaagctgggggagggccagtttggagaggtgcacctgtgtgaggtggagggcatggagaagttcaaggacaaggactttgccctggatgtgtctgccaaccagcctgtgctggtggccgtgaagatgctgcgggcagatgccaacaagaatgccagaaatgacttcctgaaggagatcaagatcatgagccggctgaaggaccccaacatcatccacctgctggccgtgtgcatcacagatgaccccctgtgcatgatcacagagtacatggagaatggagacctgaaccagttcctgagcagacatgagccccccaacagcagcagcagtgatgtgaggacagtgtcctacaccaacctgaagttcatggccacccagatcgccagcggcatgaagtacctgagcagcctgaactttgtgcaccgggacctggccaccaggaactgcctggtgggcaagaactacaccatcaagattgctgactttggcatgagcaggaacctgtacagcggggactactaccgcatccagggccgggctgtgctgcccatccgctggatgtcctgggagagcatcctgctgggcaagttcaccacagccagtgatgtgtgggcctttggagtgaccctgtgggagaccttcaccttctgccaggagcagccctacagccagctgagtgatgagcaggtgattgaaaatactggagagttcttccgggaccagggccggcagacctacctgccccagcctgccatctgcccagattctgtgtacaagctgatgctgagctgctggaggcgggacaccaagaaccggcccagcttccaggagatccacctgctgctgctgcagcagggagatgaatag

SEQ ID NO: 298121 - DNA, 516 bp, Artificial Sequence
  derived and/or modified sequence
tgaatcttcatcctgctggccatcatcgtcatcatcctgtggaggcagttctggcagaagatgctggagaaggccagcaggaggatgctggatgatgagatgacagtgtccctgagcctgcccagcgacagctccatgttcaacaacaacagaagcagcagccccagcgagcagggcagcaacagcacctatgaccgcatcttccccctgcggccagactaccaggagcccagccgcctcatcaggaagctgcctgagtttgcccctggagaggaggagagcggctgcagcggcgtggtgaagcctgtgcagcccagcggccctgagggcgtgccccactatgcagaggccgacatcgtgaacctgcagggcgtgactggaggcaacacctacagcgtgcctgctgtgaccatggacctgctgagcggcaaggatgtggccgtggaggagttccccaggaagctgctgaccttcaaggagaagctgggggagggccagtttggagaggtgtcctag

SEQ ID NO: 298122 - DNA, 2568 bp, Artificial Sequence
  derived and/or modified sequence
atgatcctgatcccccggatgctgctggtgctgttcctgctgctgccgatcctttcaagtgcgaaggcccaggtgaaccccgcaatttgccgctaccccctcggtatgagtggaggccaaatccctgatgaagatattacagctagtagccagtggtctgaatctaccgcggccaagtatggacgcttggactctgaggaaggagacggggcttggtgtcccgagatccctgtcgagcccgacgatttaaaagagtttttgcagatcgacttgcatacactacacttcatcaccctggtcggaacccaaggtcgacacgctggtgggcacgggatagagttcgcccccatgtataaaatcaattactcaagggatggaacccggtggatttcttggagaaatcgtcacgggaagcaggtgctggatggcaactccaacccatatgacattttcctcaaagatctggagccaccaatagtggctcggttcgttaggttcattcctgtgacggatcattcaatgaacgtctgtatgcgcgtggaactgtacggatgtgtctggctggacggacttgtctcctataatgcaccggccggacagcaatttgtgctccccggaggaagcattatctacctcaatgacagcgtttatgacggcgccgtcggttattccatgacagagggactgggacagcttacggacggcgtcagtggccttgacgattttacccagacacatgagtaccatgtgtggcccggttatgattacgttggctggcggaatgagtccgccactaatggctatatagagattatgtttgagtttgacaggatcaggaacttcaccacaatgaaagttcattgcaacaacatgtttgccaaaggcgtaaagatatttaaagaagttcagtgttacttccgttccgaagcatccgagtgggaaccaaatgccattagttttccgctagtgttggatgatgtgaacccttccgctaggttcgtgacggtccctcttcatcatagaatggctagcgcaattaaatgtcaataccacttcgcagacacctggatgatgttctccgagattacatttcagtcggacgcggcgatgtataataattccgaggccttaccaacctctccgatggcgcctactacatatgatcctatgctgaaggtggacgacagcaatacgcggatcctaattggctgcctggtagccataatttttatcctactagcaattatagttatcatactctggcgccagttctggcagaagatgctggagaaagccagccggcggatgcttgacgacgaaatgactgtaagcttgtccttacccagcgattcatccatgttcaataacaaccgctcctccagtccctctgagcaggggtctaattccacatacgaccgtatctttccccttcgacctgactatcaggagccttcacggctgatccgcaagcttcccgagttcgctccaggtgaagaagagagtgggtgcagtggcgttgtaaagccggttcagcctagtggcccggagggcgtaccacattacgccgaagcagatattgtgaatcttcagggagtaaccggtggcaatacgtattctgttccagccgtcacaatggacctcctttcagggaaggatgtcgcagtagaggaatttccccggaaacttctgacattcaaggagaagcttggagagggccaatttggtgaagtacacctgtgcgaggttgaaggcatggagaaattcaaggacaaggatttcgccctggacgtgtcagccaatcagcccgttctggtggccgtcaaaatgctgagggccgatgcaaacaagaatgcccggaatgacttcctcaaggaaataaagataatgtctcgccttaaggacccgaatataatccacctcctggccgtctgcattacggacgaccccctgtgcatgattactgaatatatggagaacggcgatttaaatcagtttctttcacggcacgagccacccaacagttcctcttcagatgtcagaactgtaagttacacaaatctaaaattcatggcaacccagatcgcatcaggcatgaaatacctcagctcgcttaattttgttcaccgcgatttggcgactcgcaactgcttagtggggaagaactacaccatcaagatcgctgacttcggcatgagccgcaatctgtatagtggcgattactatcgaatccagggccgcgcggtcctgcccatcagatggatgagctgggagtctattttgctgggaaaatttaccacagcgtccgatgtatgggccttcggtgtgacgttgtgggagacctttaccttttgtcaggagcagccatactcgcagcttagtgatgagcaggtaatcgagaatacgggagaatttttcagagaccaagggaggcagacctatttgccgcagccagcaatctgtccagactctgtctacaaattgatgcttagttgctggaggagggataccaagaataggccttcctttcaggagatccatttactgctgttacagcagggggatgaatag

SEQ ID NO: 298123 - DNA, 2568 bp, Artificial Sequence
  derived and/or modified sequence
atgatcctgatcccccggatgctgctggtgctgttcctgctgctgcccatcctctcttccgccaaggcgcaggtgaatcccgctatttgccggtatccgctgggtatgagcgggggccaaatacccgatgaagacattaccgcctcctctcagtggagtgagagtacagctgctaagtacggccggttggattccgaagagggagatggggcatggtgcccagaaattcctgtagagccagatgacctgaaagagtttctgcagattgacttgcacactctacacttcataacccttgtggggacccaggggcgacacgccggaggacacggcattgaatttgcaccaatgtacaagatcaactacagcagggatggtacccgttggattagctggagaaatagacacgggaaacaggtgctcgacgggaacagcaatccttacgatatcttcctgaaggatctagagccccctatcgttgccaggttcgtaaggtttatccccgtcactgaccacagcatgaatgtgtgcatgcgagtagaactatacgggtgcgtgtggcttgacggcctggtgtcatacaacgcacccgccggccagcagtttgtccttcccgggggcagtataatctacctcaatgactctgtgtacgacggggccgtgggttactcgatgacggaggggttgggtcagctgactgacggcgtgtccgggcttgatgacttcacccagactcatgagtaccatgtatggcctggctacgattacgttgggtggcgcaatgagtctgcgaccaacggctacatcgaaattatgtttgagttcgatcggatccgaaacttcacaacaatgaaagtgcactgcaacaatatgttcgccaaaggggtcaagatctttaaggaagttcagtgttactttcgctccgaggccagcgagtgggagccgaatgctatatcctttcctctggttctcgacgatgttaacccaagcgcacggtttgtcacggtgcccctccatcatcgcatggccagtgcgattaagtgtcagtaccactttgctgacacttggatgatgttttccgaaattacatttcagtctgacgctgccatgtacaacaattcggaagcccttcccacaagcccgatggcccccacaacttacgaccctatgctaaaggtcgacgattctaatacccgcattctgattggctgtctggttgccatcatctttattctgctagctatcattgtgattattctgtggaggcagttttggcagaagatgctggagaaagcctcacgtcggatgcttgatgacgaaatgacagtgtccctgtctttacctagtgactcctctatgttcaataataatcggagcagcagcccatcggagcaaggctcgaactctacctacgaccggatatttcccctccgacctgattaccaggagccatctagactcattcgcaaactgccagagttcgcccctggagaggaagaatccggctgcagcggtgtcgtgaaaccggtccaaccttccggtcctgagggggtcccccactatgccgaggccgacattgtcaatctgcagggcgttaccggggggaatacttactctgtgccagcagtcaccatggacctgttgtccggaaaggacgtggctgtggaagaattcccacgaaagctgctgacattcaaggagaagcttggcgaagggcagttcggcgaagtgcatctttgcgaagtggaagggatggaaaaatttaaagacaaagacttcgcgctggacgtttcagcaaaccagcctgttctggttgctgtgaagatgctacgcgcagatgcaaataaaaacgccagaaacgattttctaaaagagattaaaataatgagtagattgaaggatcccaacattattcatctcttagccgtttgcatcactgatgaccccttgtgtatgatcacagaatatatggaaaatggggacctcaatcagtttctgagtaggcatgagccacccaactctagttcatctgacgtgcgtactgtgtcatataccaatctgaagtttatggccactcaaatcgcatctggtatgaaatacctgagttctcttaattttgtccaccgggatcttgccacaagaaattgtctcgtgggcaagaactacacaataaaaattgcagacttcggaatgtctcgcaatctgtactcgggcgattactatcgcatccagggccgcgctgtcttgcctatcaggtggatgtcttgggagtccatactcctcggcaaattcactactgctagtgacgtgtgggcttttggcgtaaccctgtgggagactttcacgttctgtcaagaacaaccatattctcagctatcagacgagcaagtaattgagaatactggtgaattcttccgggatcagggccggcaaacgtacctgccccaaccagcaatttgtcctgactccgtgtataagttgatgctctcatgctggagacgcgacaccaagaatcgtccatcttttcaagagatccatctcctgttgttgcaacaaggtgatgagtag

SEQ ID NO: 298124 - DNA, 516 bp, Artificial Sequence
  derived and/or modified sequence
tgaatcttcatcctgctggccatcatcgtgatcatcctgtggcggcagttctggcaaaagatgctggagaaagcctctcgcagaatgttagatgacgaaatgaccgtatcactttctctgccatcagatagcagcatgttcaacaataaccgttccagctcacccagcgaacagggttctaacagtacctacgaccggatttttccattacggccggactaccaggaacctagccgtctgattagaaagttgccagagtttgcacccggtgaagaggagtcagggtgctcaggtgtggttaaaccagtgcaaccttctggcccagaaggggtgccacactacgcagaggctgatatcgtgaatcttcaaggggtgacgggaggaaatacttacagcgttcccgcagtgaccatggatctcttatcagggaaggacgtcgccgtggaggaattcccccgcaagcttctgaccttcaaagagaaacttggggaaggtcagtttggagaggtctcttag

SEQ ID NO: 298125 - DNA, 2568 bp, Artificial Sequence
  derived and/or modified sequence
atgatcctgattcctcgaatgctgttggtgctgttcttgctcttaccaatcttatcctcagctaaggcacaggtcaaccccgcaatatgtcggtacccgctcggcatgtcaggtgggcaaattccagatgaggatatcactgcatcttcacagtggtcagagtccactgcggcaaaatatgggagactagatagtgaagaaggcgatggagcttggtgtcctgaaatcccagtagaaccagatgatctgaaggaattcctccagatcgacctccataccctacactttataacgctggtggggacacagggacggcacgccggagggcacggtattgagtttgctccaatgtataagataaactactcccgcgacgggaccagatggatatcgtggcgcaaccggcatggcaaacaggttcttgacgggaactcgaatccttacgacatttttcttaaggatttggagcctccaatcgttgcccgttttgtgagatttattcctgtcacagaccattcgatgaacgtctgtatgcgagtggagctgtatggctgcgtttggttagatggactggtttcctacaacgcacctgccggacagcagttcgttttacccggtggaagcatcatctatcttaacgattcagtgtatgacggcgcagtggggtactcaatgacggaaggcctgggacagctgaccgacggagtgagtggactagacgacttcacacagacacatgagtaccatgtgtggccgggatatgactacgtgggctggcggaatgagagtgccacgaacggctacatcgagatcatgtttgagttcgaccggattcggaacttcacaacgatgaaagtgcactgcaacaacatgttcgccaaaggcgtcaaaatcttcaaggaagtccaatgctacttcaggtccgaggcctctgagtgggagcccaatgcaatatcttttccccttgtcctggatgacgtgaaccctagcgcgaggtttgtgaccgtcccactgcatcataggatggccagcgccattaaatgccagtaccactttgcggatacgtggatgatgttttctgagatcacatttcagagcgacgctgcaatgtataataattccgaggcattacccacaagccctatggctcctactacctacgatcccatgctcaaagtcgatgacagtaacacgcgcatcctcatcggctgcctcgtggctatcatttttattctcctcgcaattatcgtgatcatactttggcggcagttctggcagaaaatgctagagaaagcatcacgacgcatgcttgacgatgagatgacagtgtcattatccctcccttcagatagtagcatgtttaacaacaaccgcagtagctcaccgagcgaacagggcagcaattctacatatgacagaattttccctctgaggccagactaccaggaaccatcgcgactgatccgcaagttgcccgaatttgcacctggagaggaggagtcaggatgttccggcgttgttaagccagttcagccatctggccctgagggcgtccctcactatgcggaggccgacatcgtgaatcttcagggagtcaccgggggaaacacatacagcgtgccagcagtcaccatggatctattgagcggaaaagatgtggctgtcgaagaatttcccaggaagcttctgactttcaaggaaaagctgggggaaggccagtttggagaagttcacttatgtgaagtcgagggcatggaaaaattcaaggataaggatttcgcattggatgtgtccgctaatcagcccgtgcttgtagccgttaagatgctccgcgctgatgccaacaagaacgctaggaatgactttcttaaggagatcaagatcatgagccgcctgaaagaccctaacataatccatctgttagcggtgtgcatcacagacgaccctctatgcatgatcaccgaatatatggagaacggggacctcaaccagtttctaagccgccatgaacctccaaattccagctcctccgatgtacgtacagtgtcctataccaatctgaagtttatggcaacacaaatagcctccggcatgaagtacctgagcagtttgaatttcgtccatagggacctcgcgacacgtaattgcctggtaggaaaaaactatactattaaaattgctgactttgggatgtctaggaacctgtacagtggggactattaccgaatacagggcagagccgtactccccattcgctggatgagctgggagagcattctgctgggaaagtttacaacggcgtctgatgtgtgggcgtttggcgtgactctctgggagacctttaccttttgtcaggagcaaccatactcacagctaagtgatgagcaggtgattgaaaacaccggggaattctttagagatcagggtaggcagacatatctgccccaacccgctatctgcccagacagcgtatacaaactgatgctttcgtgttggcggagagacaccaagaacagaccttcattccaagagatccatctcctattacttcagcagggggacgaatag

SEQ ID NO: 298126 - DNA, 2568 bp, Artificial Sequence
  derived and/or modified sequence
atgattctgattcctaggatgcttctcgttctcttcttgttactgccgatactgtccagcgctaaagcccaagttaaccctgccatctgtaggtatcctctgggcatgtctggcggtcagatcccggacgaagacattactgcttctagccagtggagcgagtcgaccgcggcaaaatacggccgtttagatagtgaagagggagatggcgcatggtgtcctgagatacctgtcgaaccagacgaccttaaggaattcctgcaaattgacctgcatactctacactttatcacgttagtagggacccagggcagacacgcaggcggacatgggatagaattcgcacctatgtacaaaatcaactatagcagggatggaacacgctggatctcctggagaaatcggcatggcaaacaggtgcttgacggaaacagtaatccttacgatatatttcttaaggacctggagcctcctatcgtagcgagatttgtgagattcataccggtcacggatcatagtatgaatgtgtgcatgcgggtggagctgtatggatgcgtgtggctcgatggattagtgagctacaacgcacccgctgggcagcagtttgtgttgcccggtggaagtataatttacctgaacgactctgtgtacgatggagctgtgggatactctatgaccgagggacttggacaattgactgacggggtctcagggctcgacgatttcacgcagactcacgagtaccatgtgtggccgggttatgactatgtcggttggaggaacgagtcggctactaatggctacatcgagatcatgtttgagtttgaccggatacggaactttacaacaatgaaagtgcattgcaacaacatgtttgccaaaggcgtaaaaatctttaaggaggtccaatgctattttaggtccgaggctagcgagtgggagccaaacgcaatttcgttccccctggtcctggacgatgtcaacccctcagctaggtttgtgaccgtcccattgcaccaccgtatggcatccgcaattaaatgtcagtatcacttcgccgacacttggatgatgttcagcgaaattaccttccaaagtgatgccgcaatgtacaataactctgaggctcttcctacaagccctatggcacccactacatacgacccaatgctcaaggttgacgatagtaacaccaggattctgattggatgcctggtcgccattattttcatcctgctcgccataatcgtaatcatcttgtggagacagttctggcagaagatgctggaaaaggcttcccggagaatgcttgacgatgagatgactgtctctctcagtctgcctagtgattccagtatgttcaataacaatcgttcctcctccccaagcgaacaaggatctaactccacctacgatcgaatcttccccttgaggcctgattatcaggaaccttccaggctgatccgcaagctacctgagtttgctcccggtgaggaagagagtggttgctccggggtggtgaaacccgtccagccttccggaccagagggagttccacactacgccgaggccgacatcgttaaccttcagggcgttactggtggcaatacttactctgtccctgccgtcaccatggacttgctgagcgggaaggatgtggctgtcgaggaatttcctcggaagctcctgacatttaaggagaagctgggagaagggcaatttggagaggtccacctttgcgaggtggaaggcatggaaaaattcaaagataaggatttcgctttggacgtgtcagcaaaccagcctgtgctggtggctgtaaaaatgctcagggctgatgccaataagaacgcccgaaacgattttctaaaagagataaaaatcatgtctcgactaaaagatccgaatatcatccaccttttggctgtgtgcattacagacgatcccctttgcatgattactgagtatatggagaatggggatctgaatcagttcctttctcggcacgagccacccaacagctcctcctctgatgtcagaacagtctcttatacaaatctgaaattcatggctacccagatcgcttctggaatgaagtacctgagttcactgaatttcgtccaccgggatctggctactagaaattgcctggttgggaagaattatactataaaaatcgccgactttggcatgtcacgaaatttatactctggcgattactacaggattcagggtcgagcagttctaccaataaggtggatgtcatgggagtctatcctgctgggaaaatttacaacagcttccgatgtctgggcctttggtgtgactttgtgggagacctttactttctgtcaggagcagccatattcccagctttcagatgaacaggtcattgaaaatacgggggaattcttccgcgaccaggggaggcagacatacctgcctcaacctgctatttgtcccgactccgtctataagctgatgttgagctgctggcgcagggatacaaagaatagacctagtttccaagagatccacttgctgctactgcagcaaggtgatgagtag

SEQ ID NO: 298127 - DNA, 516 bp, Artificial Sequence
  derived and/or modified sequence
tgaatcttcatcctactggccatcattgttatcatcctgtggaggcaattctggcagaagatgctcgagaaagcttctcgtagaatgcttgacgatgagatgaccgtgagcctgtcactccctagtgactcatctatgtttaataataaccggtcttctagcccatccgagcagggatcgaactccacttacgatagaatcttccctttaagaccggactaccaggagccctcgagactgatcagaaagttgccggagttcgccccaggcgaggaggagtctggctgctcaggagtggtaaagccagtccaaccttcgggacctgagggagtgccccactacgcagaggccgatatcgtgaaccttcagggtgttactggtgggaatacatactctgtgccggcagtaaccatggacctcctgtccgggaaggatgtagccgtggaggaatttcctcgcaaactgttgacattcaaagaaaagttgggtgagggccaatttggagaagtgtcctag

SEQ ID NO: 298128 - DNA, 2568 bp, Artificial Sequence
  derived and/or modified sequence
atgatcctgatccccagaatgctgctggtgctgttcctgctgctgcccatcctgagcagcgccaaggcccaggtgaaccccgccatctgcagataccccctgggcatgagcggcggccagatccccgacgaggacatcaccgccagcagccagtggagcgagagcaccgccgccaagtacggcagactggacagcgaggagggcgacggcgcctggtgccccgagatccccgtggagcccgacgacctgaaggagttcctgcagatcgacctgcacaccctgcacttcatcaccctggtgggcacccagggcagacacgccggcggccacggcatcgagttcgcccccatgtacaagatcaactacagcagagacggcaccagatggatcagctggagaaacagacacggcaagcaggtgctggacggcaacagcaacccctacgacatcttcctgaaggacctggagccccccatcgtggccagattcgtgagattcatccccgtgaccgaccacagcatgaacgtgtgcatgagagtggagctgtacggctgcgtgtggctggacggcctggtgagctacaacgcccccgccggccagcagttcgtgctgcccggcggcagcatcatctacctgaacgacagcgtgtacgacggcgccgtgggctacagcatgaccgagggcctgggccagctgaccgacggcgtgagcggcctggacgacttcacccagacccacgagtaccacgtgtggcccggctacgactacgtgggctggagaaacgagagcgccaccaacggctacatcgagatcatgttcgagttcgacagaatcagaaacttcaccaccatgaaggtgcactgcaacaacatgttcgccaagggcgtgaagatcttcaaggaggtgcagtgctacttcagaagcgaggccagcgagtgggagcccaacgccatcagcttccccctggtgctggacgacgtgaaccccagcgccagattcgtgaccgtgcccctgcaccacagaatggccagcgccatcaagtgccagtaccacttcgccgacacctggatgatgttcagcgagatcaccttccagagcgacgccgccatgtacaacaacagcgaggccctgcccaccagccccatggcccccaccacctacgaccccatgctgaaggtggacgacagcaacaccagaatcctgatcggctgcctggtggccatcatcttcatcctgctggccatcatcgtgatcatcctgtggagacagttctggcagaagatgctggagaaggccagcagaagaatgctggacgacgagatgaccgtgagcctgagcctgcccagcgacagcagcatgttcaacaacaacagaagcagcagccccagcgagcagggcagcaacagcacctacgacagaatcttccccctgagacccgactaccaggagcccagcagactgatcagaaagctgcccgagttcgcccccggcgaggaggagagcggctgcagcggcgtggtgaagcccgtgcagcccagcggccccgagggcgtgccccactacgccgaggccgacatcgtgaacctgcagggcgtgaccggcggcaacacctacagcgtgcccgccgtgaccatggacctgctgagcggcaaggacgtggccgtggaggagttccccagaaagctgctgaccttcaaggagaagctgggcgagggccagttcggcgaggtgcacctgtgcgaggtggagggcatggagaagttcaaggacaaggacttcgccctggacgtgagcgccaaccagcccgtgctggtggccgtgaagatgctgagagccgacgccaacaagaacgccagaaacgacttcctgaaggagatcaagatcatgagcagactgaaggaccccaacatcatccacctgctggccgtgtgcatcaccgacgaccccctgtgcatgatcaccgagtacatggagaacggcgacctgaaccagttcctgagcagacacgagccccccaacagcagcagcagcgacgtgagaaccgtgagctacaccaacctgaagttcatggccacccagatcgccagcggcatgaagtacctgagcagcctgaacttcgtgcacagagacctggccaccagaaactgcctggtgggcaagaactacaccatcaagatcgccgacttcggcatgagcagaaacctgtacagcggcgactactacagaatccagggcagagccgtgctgcccatcagatggatgagctgggagagcatcctgctgggcaagttcaccaccgccagcgacgtgtgggccttcggcgtgaccctgtgggagaccttcaccttctgccaggagcagccctacagccagctgagcgacgagcaggtgatcgagaacaccggcgagttcttcagagaccagggcagacagacctacctgccccagcccgccatctgccccgacagcgtgtacaagctgatgctgagctgctggagaagagacaccaagaacagacccagcttccaggagatccacctgctgctgctgcagcagggcgacgagtag

SEQ ID NO: 298129 - DNA, 516 bp, Artificial Sequence
  derived and/or modified sequence
tgaatcttcatcctgctggccatcatcgtgatcatcctgtggagacagttctggcagaagatgctggagaaggccagcagaagaatgctggacgacgagatgaccgtgagcctgagcctgcccagcgacagcagcatgttcaacaacaacagaagcagcagccccagcgagcagggcagcaacagcacctacgacagaatcttccccctgagacccgactaccaggagcccagcagactgatcagaaagctgcccgagttcgcccccggcgaggaggagagcggctgcagcggcgtggtgaagcccgtgcagcccagcggccccgagggcgtgccccactacgccgaggccgacatcgtgaacctgcagggcgtgaccggcggcaacacctacagcgtgcccgccgtgaccatggacctgctgagcggcaaggacgtggccgtggaggagttccccagaaagctgctgaccttcaaggagaagctgggcgagggccagttcggcgaggtgagctag

SEQ ID NO: 298130 - DNA, 3096 bp, Artificial Sequence
  derived and/or modified sequence
catcttgcatcagcctgtggatgtatgcctaccaccgggctccttcaccagcaaagtggaaaaagaagcgtttcacaacaaattcttctttttgggttggggaaacgcagtggattatagctctgttttcttctttccaaaactgtgcacccctggatgaaacctccatcaagggagacctgcaagttgcctggggttcagtgctctagaaagttccaaggtttgtggcttgaattattctaaagaagctgaaataattgaagagaagcagaggccagctgtttttgaggatcctgctccacagagaatgctctgcacccgttgatactccagttccaacaccatcttctgagatgatcctgattcccagaatgctcttggtgctgttcctgctgctgcctatcttgagttctgcaaaagctcaggttaatccagctatatgccgctatcctctgggcatgtcaggaggccagattccagatgaggacatcacagcttccagtcagtggtcagagtccacagctgccaaatatggaaggctggactcagaagaaggggatggagcctggtgccctgagattccagtggaacctgatgacctgaaggagtttctgcagattgacttgcacaccctccattttatcactctggtggggacccaggggcgccatgcaggaggtcatggcatcgagtttgcccccatgtacaagatcaattacagtcgggatggcactcgctggatctcttggcggaaccgtcatgggaaacaggtgctggatggaaatagtaacccctatgacattttcctaaaggacttggagccgcccattgtagccagatttgtccggttcattccagtcaccgaccactccatgaatgtgtgtatgagagtggagctttacggctgtgtctggctagatggcttggtgtcttacaatgctccagctgggcagcagtttgtactccctggaggttccatcatttatctgaatgattctgtctatgatggagctgttggatacagcatgacagaagggctaggccaattgaccgatggtgtgtctggcctggacgatttcacccagacccatgaataccacgtgtggcccggctatgactatgtgggctggcggaacgagagtgccaccaatggctacattgagatcatgtttgaatttgaccgcatcaggaatttcactaccatgaaggtccactgcaacaacatgtttgctaaaggtgtgaagatctttaaggaggtacagtgctacttccgctctgaagccagtgagtgggaacctaatgccatttccttcccccttgtcctggatgacgtcaaccccagtgctcggtttgtcacggtgcctctccaccaccgaatggccagtgccatcaagtgtcaataccattttgcagatacctggatgatgttcagtgagatcaccttccaatcagatgctgcaatgtacaacaactctgaagccctgcccacctctcctatggcacccacaacctatgatccaatgcttaaagttgatgacagcaacactcggatcctgattggctgcttggtggccatcatctttatcctcctggccatcattgtcatcatcctctggaggcagttctggcagaaaatgctggagaaggcttctcggaggatgctggatgatgaaatgacagtcagcctttccctgccaagtgattctagcatgttcaacaataaccgctcctcatcacctagtgaacaagggtccaactcgacttacgatcgcatctttccccttcgccctgactaccaggagccatccaggctgatacgaaaactcccagaatttgctccaggggaggaggagtcaggctgcagcggtgttgtgaagccagtccagcccagtggccctgagggggtgccccactatgcagaggctgacatagtgaacctccaaggagtgacaggaggcaacacatactcagtgcctgccgtcaccatggacctgctctcaggaaaagatgtggctgtggaggagttccccaggaaactcctaactttcaaagagaagctgggagaaggacagtttggggaggttcatctctgtgaagtggagggaatggaaaaattcaaagacaaagattttgccctagatgtcagtgccaaccagcctgtcctggtggctgtgaaaatgctccgagcagatgccaacaagaatgccaggaatgattttcttaaggagataaagatcatgtctcggctcaaggacccaaacatcatccatctattagctgtgtgtatcactgatgaccctctctgtatgatcactgaatacatggagaatggagatctcaatcagtttctttcccgccacgagccccctaattcttcctccagcgatgtacgcactgtcagttacaccaatctgaagtttatggctacccaaattgcctctggcatgaagtacctttcctctcttaattttgttcaccgagatctggccacacgaaactgtttagtgggtaagaactacacaatcaagatagctgactttggaatgagcaggaacctgtacagtggtgactattaccggatccagggccgggcagtgctccctatccgctggatgtcttgggagagtatcttgctgggcaagttcactacagcaagtgatgtgtgggcctttggggttactttgtgggagactttcaccttttgtcaagaacagccctattcccagctgtcagatgaacaggttattgagaatactggagagttcttccgagaccaagggaggcagacttacctccctcaaccagccatttgtcctgactctgtgtataagctgatgctcagctgctggagaagagatacgaagaaccgtccctcattccaagaaatccaccttctgctccttcaacaaggcgacgagtgatgctgtcagtgcctggccatgttcctacggctcaggtcctccctacaagacctaccactcacccatgcctatgccactccatctggacatttaatgaaactgagagacagaggcttgtttgctttgccctcttttcctggtcacccccactccctacccctgactcatatacact

SEQ ID NO: 298131 - DNA, 3207 bp, Artificial Sequence
  derived and/or modified sequence
aaaggcatcttgcatcagcctgtggatgtatgcctaccaccgggctccttcaccagcaaagtggaaaaagaagcgtttcacaacaaattcttctttttgggttggggaaacgcagtggattatagctctgttttcttctttccaaaactgtgcacccctggatgaaacctccatcaagggagacctgcaagttgcctggggttcagtgctctagaaagttccaaggtttgtggcttgaattattctaaagaagctgaaataattgaagagaagcagaggccagctgtttttgaggatcctgctccacagagaatgctctgcacccgttgatatgcctcccaggacccagagggagactgtagcctcatttctgtggagacctttggctggactctcctggctctcccagagactccagttccaacaccatcttctgagatgatcctgattcccagaatgctcttggtgctgttcctgctgctgcctatcttgagttctgcaaaagctcaggttaatccagctatatgccgctatcctctgggcatgtcaggaggccagattccagatgaggacatcacagcttccagtcagtggtcagagtccacagctgccaaatatggaaggctggactcagaagaaggggatggagcctggtgccctgagattccagtggaacctgatgacctgaaggagtttctgcagattgacttgcacaccctccattttatcactctggtggggacccaggggcgccatgcaggaggtcatggcatcgagtttgcccccatgtacaagatcaattacagtcgggatggcactcgctggatctcttggcggaaccgtcatgggaaacaggtgctggatggaaatagtaacccctatgacattttcctaaaggacttggagccgcccattgtagccagatttgtccggttcattccagtcaccgaccactccatgaatgtgtgtatgagagtggagctttacggctgtgtctggctagatggcttggtgtcttacaatgctccagctgggcagcagtttgtactccctggaggttccatcatttatctgaatgattctgtctatgatggagctgttggatacagcatgacagaagggctaggccaattgaccgatggtgtgtctggcctggacgatttcacccagacccatgaataccacgtgtggcccggctatgactatgtgggctggcggaacgagagtgccaccaatggctacattgagatcatgtttgaatttgaccgcatcaggaatttcactaccatgaaggtccactgcaacaacatgtttgctaaaggtgtgaagatctttaaggaggtacagtgctacttccgctctgaagccagtgagtgggaacctaatgccatttccttcccccttgtcctggatgacgtcaaccccagtgctcggtttgtcacggtgcctctccaccaccgaatggccagtgccatcaagtgtcaataccattttgcagatacctggatgatgttcagtgagatcaccttccaatcagatgctgcaatgtacaacaactctgaagccctgcccacctctcctatggcacccacaacctatgatccaatgcttaaagttgatgacagcaacactcggatcctgattggctgcttggtggccatcatctttatcctcctggccatcattgtcatcatcctctggaggcagttctggcagaaaatgctggagaaggcttctcggaggatgctggatgatgaaatgacagtcagcctttccctgccaagtgattctagcatgttcaacaataaccgctcctcatcacctagtgaacaagggtccaactcgacttacgatcgcatctttccccttcgccctgactaccaggagccatccaggctgatacgaaaactcccagaatttgctccaggggaggaggagtcaggctgcagcggtgttgtgaagccagtccagcccagtggccctgagggggtgccccactatgcagaggctgacatagtgaacctccaaggagtgacaggaggcaacacatactcagtgcctgccgtcaccatggacctgctctcaggaaaagatgtggctgtggaggagttccccaggaaactcctaactttcaaagagaagctgggagaaggacagtttggggaggttcatctctgtgaagtggagggaatggaaaaattcaaagacaaagattttgccctagatgtcagtgccaaccagcctgtcctggtggctgtgaaaatgctccgagcagatgccaacaagaatgccaggaatgattttcttaaggagataaagatcatgtctcggctcaaggacccaaacatcatccatctattagctgtgtgtatcactgatgaccctctctgtatgatcactgaatacatggagaatggagatctcaatcagtttctttcccgccacgagccccctaattcttcctccagcgatgtacgcactgtcagttacaccaatctgaagtttatggctacccaaattgcctctggcatgaagtacctttcctctcttaattttgttcaccgagatctggccacacgaaactgtttagtgggtaagaactacacaatcaagatagctgactttggaatgagcaggaacctgtacagtggtgactattaccggatccagggccgggcagtgctccctatccgctggatgtcttgggagagtatcttgctgggcaagttcactacagcaagtgatgtgtgggcctttggggttactttgtgggagactttcaccttttgtcaagaacagccctattcccagctgtcagatgaacaggttattgagaatactggagagttcttccgagaccaagggaggcagacttacctccctcaaccagccatttgtcctgactctgtgtataagctgatgctcagctgctggagaagagatacgaagaaccgtccctcattccaagaaatccaccttctgctccttcaacaaggcgacgagtgatgctgtcagtgcctggccatgttcctacggctcaggtcctccctacaagacctaccactcacccatgcctatgccactccatctggacatttaatgaaactgagagacagaggcttgtttgctttgccctcttttcctggtcacccccactccctacccctgactcatatacacttttttttttttttacattaaagaact

SEQ ID NO: 298132 - DNA, 693 bp, Artificial Sequence
  derived and/or modified sequence
catctttatcctcctggccatcattgtcatcatcctctggaggcagttctggcagaaaatgctggagaaggcttctcggaggatgctggatgatgaaatgacagtcagcctttccctgccaagtgattctagcatgttcaacaataaccgctcctcatcacctagtgaacaagggtccaactcgacttacgatcgcatctttccccttcgccctgactaccaggagccatccaggctgatacgaaaactcccagaatttgctccaggggaggaggagtcaggctgcagcggtgttgtgaagccagtccagcccagtggccctgagggggtgccccactatgcagaggctgacatagtgaacctccaaggagtgacaggaggcaacacatactcagtgcctgccgtcaccatggacctgctctcaggaaaagatgtggctgtggaggagttccccaggaaactcctaactttcaaagagaagctgggagaaggacagtttggggaggtgagttgattctttgattcccttatagctcgaagaaggtggttggataaaaatgatcagtagaacaaagagtcccttccagaggtggattcacaacagaatgtctcttccatttgtctctccttgcattgtcctctggatttcagtattgggtcaacctaatctttgtcaaatagctgtggagttcc

SEQ ID NO: 298133 - protein, 166 aa, Artificial Sequence
  derived and/or modified sequence
LKVDDSNTRILIGCLVAIIFILLAIIVIILWRQFWQKMLEKASRRMLDDEMTVSLSLPSDSSMFNNNRSSSPSEQGSNSTYDRIFPLRPDYQEPSRLIRKLPEFAPGEEESGEDDVVGRVSREKPQQASGRYDTPAPSSLHLFLVSANLLRSPHSLSRFGLPLLLA

SEQ ID NO: 298134 - DNA, 447 bp, Artificial Sequence
  derived and/or modified sequence
atgatacttattccaaggatgttgttggtgttgtttctccttctcccaatactgtcatctgcgaaggcgcaggtcaatcccgcgatctgtagataccctctgggaatgtctggaggccaaatccctgacgaggatatcacagcctcaagtcagtggagtgagtccactgctgcgaagtatgggcggctcgattccgaggaaggcgacggtgcctggtgtcccgagataccagtggaacctgacgacctgaaagaatttctgcagatcgatctgcatacactgcactttataaccctcgtgggaacacagggacgccatgctggcggccatggaattgaattcgcgcctatgtataagattaactattccagggatggaacccgatggatttcttggaggaatagacacggaaagcaggtccttgacggaaatagtaatccctattag

SEQ ID NO: 298135 - DNA, 393 bp, Artificial Sequence
  derived and/or modified sequence
atgatcctgattccccgaatgctgcttgttctgtttcttttgctgcccattctgtccagcgctaaggcccaggtgaatcccgctatatgtcggtatcctttaggcatgtcgggagggcagattcctgacgaggatatcaccgcttctagccaatggagtgagagtactgctgccaagtacggccgcctggattcggaggaaggagacggagcatggtgtccagagattcccgtggagcccgatgatctcaaagagttcctgcagatcgacttacacacactgcattttattaccctcgttgggacccaggggaggcatgccggcggccacggtatagagtttgccccgatgtacaagattaattacagccgagacgggactagatggatttag

SEQ ID NO: 298136 - DNA, 501 bp, Artificial Sequence
  derived and/or modified sequence
cttaaggttgatgactccaatactcgaatcctgattgggtgtctggtggcaatcattttcattctactcgccataatagtgataatcctctggcgacagttttggcaaaagatgcttgagaaagcatcccgaaggatgctcgacgacgagatgacagtctccctctctctgccctcggattcgagtatgtttaacaacaatcgttcaagcagcccaagcgagcagggcagcaatagtacatatgaccgtatatttcctctgaggccggattatcaggagccctcaagactgattcgaaagttgccagaatttgcgcctggcgaggaggaaagcggcgaagacgacgtcgtgggcagagtatctagagaaaagccacaacaggctagtgggcgttatgataccccagctccctcgtctctgcacctgtttctggtgtccgccaacttactgcgaagccctcatagcctctctcggtttggactgccgctgcttttggcatag

SEQ ID NO: 298137 - DNA, 447 bp, Artificial Sequence
  derived and/or modified sequence
atgattttgatccctcgcatgctgctggtgctgttcctccttctccccatcctctcatcggctaaggctcaggttaaccccgctatttgcagatacccactgggcatgagtggaggccagattcctgatgaggacatcactgcaagttcacagtggagcgagtcaacagccgccaaatatgggcgcctggattcagaagaaggtgacggtgcttggtgtccggagattccagtcgaaccggatgatcttaaggagttcctccagatcgatctacatacactgcacttcatcactcttgtcggcacacaggggcggcacgcaggtggacacggtatcgaatttgcccccatgtacaaaatcaattattctcgagatggcacacgttggatttcatggcggaatcgtcacggcaagcaggtgcttgacggcaactctaacccctactag

SEQ ID NO: 298138 - DNA, 447 bp, Artificial Sequence
  derived and/or modified sequence
atgatcctgatccccaggatgctgctggtgctcttcctgctgctgcccatcctgagcagcgccaaggcccaggtgaacccagccatctgccgctaccccctgggcatgtctgggggccagatcccagatgaggacatcacagccagcagccagtggagcgagagcacagctgccaagtatggccgcctggacagcgaggagggagatggagcctggtgcccagagatccctgtggagccagatgacctgaaggagttcctgcagattgacctgcacaccctgcacttcatcaccctggtgggcacccagggcagacatgctgggggccacggcatcgagtttgcccccatgtacaagatcaactacagcagagatggcacccgctggatctcctggaggaacagacatggcaagcaggtgctggatggcaacagcaacccctactag

SEQ ID NO: 298139 - DNA, 393 bp, Artificial Sequence
  derived and/or modified sequence
atgatcctgatccccaggatgctgctggtgctcttcctgctgctgcccatcctgagcagcgccaaggcccaggtgaacccagccatctgccgctaccccctgggcatgtctgggggccagatcccagatgaggacatcacagccagcagccagtggagcgagagcacagctgccaagtatggccgcctggacagcgaggagggagatggagcctggtgcccagagatccctgtggagccagatgacctgaaggagttcctgcagattgacctgcacaccctgcacttcatcaccctggtgggcacccagggcagacatgctgggggccacggcatcgagtttgcccccatgtacaagatcaactacagcagagatggcacccgctggatctag

SEQ ID NO: 298140 - DNA, 501 bp, Artificial Sequence
  derived and/or modified sequence
ctgaaggtggatgacagcaacacccgcatcctgattggctgcctggtggccatcatcttcatcctgctggccatcatcgtcatcatcctgtggaggcagttctggcagaagatgctggagaaggccagcaggaggatgctggatgatgagatgacagtgtccctgagcctgcccagcgacagctccatgttcaacaacaacagaagcagcagccccagcgagcagggcagcaacagcacctatgaccgcatcttccccctgcggccagactaccaggagcccagccgcctcatcaggaagctgcctgagtttgcccctggagaggaggagagcggagaagatgatgtggtgggccgggtgtcccgggagaagccccagcaggccagcggccgctatgacaccccagcccccagcagcctgcacctgttcctggtgtctgccaacctgctgcggagcccccacagcctgagcagatttggcctgcccctgctgctggcctag

SEQ ID NO: 298141 - DNA, 447 bp, Artificial Sequence
  derived and/or modified sequence
atgatcctgatcccccggatgctgctggtgctgttcctgctgctgcctatcctgtctagcgcaaaagctcaggtgaacccagccatctgtaggtacccactgggcatgtctggaggacagatcccagacgaggacatcaccgcctctagtcagtggagtgaatctaccgcagctaagtacgggcgactcgactccgaggagggggacggggcttggtgtcccgagatcccggttgaacccgacgatctgaaagaatttttacaaatcgatttgcacactttgcatttcattaccctcgtagggactcaggggcgacacgcaggggggcacggaatcgaatttgcgcccatgtataagatcaactatagcagggatgggactcgttggatttcctggcgaaaccgccatggtaagcaggtcctcgatggtaattctaatccgtattag

SEQ ID NO: 298142 - DNA, 393 bp, Artificial Sequence
  derived and/or modified sequence
atgatcctgatcccccggatgctgctggtgctgttcctgctgctgcccatcctgagctctgccaaagctcaagtaaatcctgctatatgtcgctatcctctcggaatgagtggaggccagatcccagacgaggatattactgccagctcgcagtggtcagagagcactgccgcaaagtatggtagacttgattcagaggaaggagacggtgcctggtgcccagaaatccccgttgagcctgacgatctgaaagagtttcttcagatcgacctacacaccctacactttattactctggtgggtacccagggaaggcatgccggaggccacgggatcgaatttgcccctatgtataaaattaactacagccgggatggaacgcggtggatttag

SEQ ID NO: 298143 - DNA, 501 bp, Artificial Sequence
  derived and/or modified sequence
ctgaaggtggacgacagcaacacccggatcctgatcggctgcctggtcgccattatcttcattcttctggctatcatcgtcattatcctctggagacagttttggcagaaaatgcttgagaaagcatcacgccggatgctagatgacgaaatgacggtgagcctttcactcccaagcgactcaagcatgttcaacaataatcgcagttcatccccctcagaacagggatctaattctacgtacgaccggatcttccccctgcgcccagactatcaggaaccatcccgcctcatcaggaaactccccgagtttgcccctggcgaagaggaatcaggcgaggacgatgtcgtgggaagagttagcagagaaaaaccccagcaggcaagcgggagatatgatactcctgctccctcatccctccatctgtttctcgtgagcgctaatctactcagaagtccccatagcctatccaggttcgggcttccattattgttggcttag

SEQ ID NO: 298144 - DNA, 447 bp, Artificial Sequence
  derived and/or modified sequence
atgatcctgatcccccggatgctgctggtgctgttcctgctgctgccaatcctgtcttcagccaaagctcaggtcaatcccgccatttgcagataccccctgggtatgtcagggggacaaattcccgatgaggacatcacggcgagtagtcaatggtctgaatccaccgctgctaagtacggacgactcgactccgaagagggcgacggtgcttggtgtcccgagatccccgtggagcccgacgatctgaaagaatttttacaaatcgatctccatactctgcacttcatcaccttagtgggcacccagggccgtcacgccggcgggcatggcattgagtttgctccaatgtacaaaattaattactcccgagatggaaccaggtggatctcatggcggaacagacatggaaagcaagtgctggatggtaattctaatccatattag

SEQ ID NO: 298145 - DNA, 447 bp, Artificial Sequence
  derived and/or modified sequence
atgattttgatcccgagaatgttgttggtgctgtttctgctgctcccaatattgtcctctgccaaggcccaggtcaatcctgctatttgtcgatatcctctaggtatgagcggtgggcagatccctgacgaagatatcacagcatcctcccaatggagtgagtctacggccgcaaagtacggcagattggattccgaagaaggggacggagcttggtgcccagagatccccgttgagcccgacgacttgaaggagttcctgcagattgacctccacacactgcacttcattaccctggtcggaacccagggacggcatgccggtggacatggcatagagttcgcacccatgtataagataaattactcccgggacggtactagatggatctcctggcggaatcgacatggcaagcaggtactggacgggaattccaacccttactag

SEQ ID NO: 298146 - DNA, 393 bp, Artificial Sequence
  derived and/or modified sequence
atgattctcatcccccgaatgttgctagtactgttcctccttttgcccatcctctcttctgccaaggcccaggttaatcctgccatctgccgataccctctgggaatgagcggaggccagattccagacgaggatatcaccgcaagcagtcagtggtcagagtcaacagcggctaagtatggccgacttgactccgaagaaggtgacggggcatggtgtcccgaaattccagtggaacctgatgatcttaaggagttcctgcagatcgacttacacacattgcacttcatcacgctagtcggtactcagggcaggcacgctggtggacatggcatcgaattcgctcctatgtataagatcaactactcacgggacgggacccgatggatttag

SEQ ID NO: 298147 - DNA, 501 bp, Artificial Sequence
  derived and/or modified sequence
ctcaaagtggatgattctaatacacggattctaattggttgtctggtagccattattttcatcttgctcgctatcatcgtgatcattctgtggaggcaattctggcagaagatgctggagaaggcctcccggcgaatgctggacgacgagatgacagtgtctctttccctcccttctgactcctctatgtttaataataataggagctcttctccctcagagcaaggatctaattcaacctacgatcgcatattcccacttcgccctgactaccaggagcccagtagactaattagaaagctgcccgaatttgcacccggagaggaggagtctggcgaagatgacgtagttggacgcgtttccagagagaaacctcagcaggcgagcggcaggtacgacacccccgctccgtcttcgctgcacctattcttggtcagcgcaaatcttctgcggtccccccactcgctctcccggttcgggttgcccctcctcctcgcctag

SEQ ID NO: 298148 - DNA, 447 bp, Artificial Sequence
  derived and/or modified sequence
atgatactcattcctcgcatgcttttggtcctgttcctcctgctacccatccttagtagcgccaaggctcaagtcaatccagccatttgcaggtatccactgggcatgtctggtggccagatcccagatgaggatattacagcatcaagccagtggagcgagagcactgcggctaaatacggacgactggacagtgaagaaggcgatggcgcttggtgcccagagatccccgtggaaccagatgacctaaaggagttccttcaaattgatctgcacaccctgcatttcattactttagttgggacccaggggaggcacgccggtggacacggcattgagtttgcacccatgtacaagattaactacagccgcgacggaaccagatggatctcatggaggaaccgccatggaaagcaggttctagacgggaatagcaatccctattag

SEQ ID NO: 298149 - DNA, 447 bp, Artificial Sequence
  derived and/or modified sequence
atgatcctgatccccagaatgctgctggtgctgttcctgctgctgcccatcctgagcagcgccaaggcccaggtgaaccccgccatctgcagataccccctgggcatgagcggcggccagatccccgacgaggacatcaccgccagcagccagtggagcgagagcaccgccgccaagtacggcagactggacagcgaggagggcgacggcgcctggtgccccgagatccccgtggagcccgacgacctgaaggagttcctgcagatcgacctgcacaccctgcacttcatcaccctggtgggcacccagggcagacacgccggcggccacggcatcgagttcgcccccatgtacaagatcaactacagcagagacggcaccagatggatcagctggagaaacagacacggcaagcaggtgctggacggcaacagcaacccctactag

SEQ ID NO: 298150 - DNA, 393 bp, Artificial Sequence
  derived and/or modified sequence
atgatcctgatccccagaatgctgctggtgctgttcctgctgctgcccatcctgagcagcgccaaggcccaggtgaaccccgccatctgcagataccccctgggcatgagcggcggccagatccccgacgaggacatcaccgccagcagccagtggagcgagagcaccgccgccaagtacggcagactggacagcgaggagggcgacggcgcctggtgccccgagatccccgtggagcccgacgacctgaaggagttcctgcagatcgacctgcacaccctgcacttcatcaccctggtgggcacccagggcagacacgccggcggccacggcatcgagttcgcccccatgtacaagatcaactacagcagagacggcaccagatggatctag

SEQ ID NO: 298151 - DNA, 501 bp, Artificial Sequence
  derived and/or modified sequence
ctgaaggtggacgacagcaacaccagaatcctgatcggctgcctggtggccatcatcttcatcctgctggccatcatcgtgatcatcctgtggagacagttctggcagaagatgctggagaaggccagcagaagaatgctggacgacgagatgaccgtgagcctgagcctgcccagcgacagcagcatgttcaacaacaacagaagcagcagccccagcgagcagggcagcaacagcacctacgacagaatcttccccctgagacccgactaccaggagcccagcagactgatcagaaagctgcccgagttcgcccccggcgaggaggagagcggcgaggacgacgtggtgggcagagtgagcagagagaagccccagcaggccagcggcagatacgacacccccgcccccagcagcctgcacctgttcctggtgagcgccaacctgctgagaagcccccacagcctgagcagattcggcctgcccctgctgctggcctag

SEQ ID NO: 298152 - DNA, 718 bp, Artificial Sequence
  derived and/or modified sequence
gctccgcgtgtgtgccccaactgtcctggaagcttcaattggaaaactccaaactttaagttttgcttatagcttcagctcaacctccatcaagggagacctgcaagttgcctggggttcagtgctctagaaagttccaaggtttgtggcttgaattattctaaagaagctgaaataattgaagagaagcagaggccagctgtttttgaggatcctgctccacagagaatgctctgcacccgttgatactccagttccaacaccatcttctgagatgatcctgattcccagaatgctcttggtgctgttcctgctgctgcctatcttgagttctgcaaaagctcaggttaatccagctatatgccgctatcctctgggcatgtcaggaggccagattccagatgaggacatcacagcttccagtcagtggtcagagtccacagctgccaaatatggaaggctggactcagaagaaggggatggagcctggtgccctgagattccagtggaacctgatgacctgaaggagtttctgcagattgacttgcacaccctccattttatcactctggtggggacccaggggcgccatgcaggaggtcatggcatcgagtttgcccccatgtacaagatcaattacagtcgggatggcactcgctggatctcttggcggaaccgtcatgggaaacaggtgctggatggaaatagtaacccctat

SEQ ID NO: 298153 - DNA, 656 bp, Artificial Sequence
  derived and/or modified sequence
aaacagagaagagctggtgatagctccagagctcagagaaaggaggtctctttacaagaagtctggctctcaaagcctccatcaagggagacctgcaagttgcctggggttcagtgctctagaaagttccaaggtttgtggcttgaattattctaaagaagctgaaataattgaagagaagcagaggccagctgtttttgaggatcctgctccacagagaatgctctgcacccgttgatactccagttccaacaccatcttctgagatgatcctgattcccagaatgctcttggtgctgttcctgctgctgcctatcttgagttctgcaaaagctcaggttaatccagctatatgccgctatcctctgggcatgtcaggaggccagattccagatgaggacatcacagcttccagtcagtggtcagagtccacagctgccaaatatggaaggctggactcagaagaaggggatggagcctggtgccctgagattccagtggaacctgatgacctgaaggagtttctgcagattgacttgcacaccctccattttatcactctggtggggacccaggggcgccatgcaggaggtcatggcatcgagtttgcccccatgtacaagatcaattacagtcgggatggcactcgctggatc

SEQ ID NO: 298154 - DNA, 558 bp, Artificial Sequence
  derived and/or modified sequence
cttaaagttgatgacagcaacactcggatcctgattggctgcttggtggccatcatctttatcctcctggccatcattgtcatcatcctctggaggcagttctggcagaaaatgctggagaaggcttctcggaggatgctggatgatgaaatgacagtcagcctttccctgccaagtgattctagcatgttcaacaataaccgctcctcatcacctagtgaacaagggtccaactcgacttacgatcgcatctttccccttcgccctgactaccaggagccatccaggctgatacgaaaactcccagaatttgctccaggggaggaggagtcaggtgaggatgatgtggtgggcagggtgtcaagggagaaacctcagcaagcatcaggtaggtatgacacgcctgctcccagttcattgcatctatttttagtctctgctaacctcctgagaagtccacattctctttctagatttggtctgccgctgctcctggcctaatttgagcaactctcctttgctactgaatataagatgtgtggagggacccacatacca

SEQ ID NO: 298155 - DNA, 1909 bp, Artificial Sequence
  derived and/or modified sequence
aaaggcatcttgcatcagcctgtggatgtatgcctaccaccgggctccttcaccagcaaagtggaaaaagaagcgtttcacaacaaattcttctttttgggttggggaaacgcagtggattatagctctgttttcttctttccaaaactgtgcacccctggatgaaacctccatcaagggagacctgcaagttgcctggggttcagtgctctagaaagttccaaggtttgtggcttgaattattctaaagaagctgaaataattgaagagaagcagaggccagctgtttttgaggatcctgctccacagagaatgctctgcacccgttgatactccagttccaacaccatcttctgagatgatcctgattcccagaatgctcttggtgctgttcctgctgctgcctatcttgagttctgcaaaagctcaggttaatccagctatatgccgctatcctctgggcatgtcaggaggccagattccagatgaggacatcacagcttccagtcagtggtcagagtccacagctgccaaatatggaaggctggactcagaagaaggggatggagcctggtgccctgagattccagtggaacctgatgacctgaaggagtttctgcagattgacttgcacaccctccattttatcactctggtggggacccaggggcgccatgcaggaggtcatggcatcgagtttgcccccatgtacaagatcaattacagtcgggatggcactcgctggatctcttggcggaaccgtcatgggaaacaggtgctggatggaaatagtaacccctatgacattttcctaaaggacttggagccgcccattgtagccagatttgtccggttcattccagtcaccgaccactccatgaatgtgtgtatgagagtggagctttacggctgtgtctggctagatggcttggtgtcttacaatgctccagctgggcagcagtttgtactccctggaggttccatcatttatctgaatgattctgtctatgatggagctgttggatacagcatgacagaagggctaggccaattgaccgatggtgtgtctggcctggacgatttcacccagacccatgaataccacgtgtggcccggctatgactatgtgggctggcggaacgagagtgccaccaatggctacattgagatcatgtttgaatttgaccgcatcaggaatttcactaccatgaaggtccactgcaacaacatgtttgctaaaggtgtgacctctcttaattttgttcaccgagatctggccacacgaaactgtttagtgggtaagaactacacaatcaagatagctgactttggaatgagcaggaacctgtacagtggtgactattaccggatccagggccgggcagtgctccctatccgctggatgtcttgggagagtatcttgctgggcaagttcactacagcaagtgatgtgtgggcctttggggttactttgtgggagactttcaccttttgtcaagaacagccctattcccagctgtcagatgaacaggttattgagaatactggagagttcttccgagaccaagggaggcagacttacctccctcaaccagccatttgtcctgactctgtgtataagctgatgctcagctgctggagaagagatacgaagaaccgtccctcattccaagaaatccaccttctgctccttcaacaaggcgacgagtgatgctgtcagtgcctggccatgttcctacggctcaggtcctccctacaagacctaccactcacccatgcctatgccactccatctggacatttaatgaaactgagagacagaggcttgtttgctttgccctcttttcctggtcacccccactccctacccctgactcatatacacttttttttttttttacattaaaga

SEQ ID NO: 298156 - protein, 301 aa, Artificial Sequence
  derived and/or modified sequence
MRLDNMLLAEGVAGPEKGGGSAAAAAAAAASGGAGSDNSVEHSDYRAKLSQIRQIYHTELEKYEQACNEFTTHVMNLLREQSRTRPISPKEIERMVSIIHRKFSSIQMQLKQSTCEAVMILRSRFLDARRKRRNFNKQATEILNEYFYSHLSNPYPSEEAKEELAKKCGITVSQVSNWFGNKRIRYKKNIGKFQEEANIYAAKTAVTATNVSAHGSQANSPSTPNSAGSSSSFNMSNSGDLFMSVQSLNGDSYQGAQVGANVQSQVDTLRHVISQTGGYSDGLAASQMYSPQGISEIARTY

SEQ ID NO: 298157 - DNA, 906 bp, Artificial Sequence
  derived and/or modified sequence
atgcgactggacaacatgctgctggcagaaggggtcgctggacccgagaaaggcggaggttcagctgctgctgcagccgctgctgccgctagcggaggcgccggctctgacaactccgttgaacactccgactatcgagccaagttgagccagatccgccaaatctatcacacagagctggagaagtacgaacaggcctgcaatgagttcacaacacatgtgatgaatctcctgcgcgaacagtcgagaacgcgaccaatatcacctaaagagatcgagcgcatggtgtccataatccatcgtaagttttcatcaatccaaatgcagttaaagcagtctacctgtgaggcagtgatgatcctgagatctaggtttctggacgcacgcaggaagcgccggaattttaataaacaagcaaccgagattttgaacgaatacttttatagtcatcttagtaatccatacccgagcgaggaggctaaagaggaactcgcgaagaagtgcggtatcaccgtgtcccaggtgtccaactggttcggaaacaagagaattcgctacaagaaaaatattgggaagttccaggaggaggctaatatctatgccgccaaaacagccgttaccgctactaatgtgtcagcccacggctctcaggctaactcgccgagcactcccaactcagccggatcctccagtagctttaacatgagcaacagcggagatctcttcatgtccgtccaaagtttaaatggagactcttaccaaggcgcccaggtgggcgccaatgtccagagccaggtggacacacttagacacgtcatcagccagaccggaggatactcagacgggttggcagcctcacagatgtatagcccacaaggaatctcagaaatcgcgagaacgtactag

SEQ ID NO: 298158 - DNA, 906 bp, Artificial Sequence
  derived and/or modified sequence
atgaggctggacaacatgctgctggccgagggcgtggccggccctgagaagggcggcggcagcgctgctgctgctgctgctgctgctgccagcggcggggccggcagtgacaacagcgtggagcacagcgactaccgggccaagctgagccagatccggcagatctaccacacagagctggagaagtatgagcaggcctgcaatgagttcaccacccacgtgatgaacctgctgcgggagcagagcaggacccggcccatcagccccaaggagattgaaagaatggtgtccatcatccacaggaagttcagcagcatccagatgcagctgaagcagagcacctgtgaggccgtgatgatcctgcggagccgcttcctggatgcccggaggaagagaagaaacttcaacaagcaggccacagagatcctgaatgagtacttctacagccacctgagcaacccctaccccagcgaggaggccaaggaggagctggccaagaagtgtggcatcaccgtgtcccaggtgagcaactggtttggaaacaagaggatccgctacaagaagaacatcggcaagttccaggaggaggccaacatctatgctgccaagacagctgtgacagccaccaacgtgtctgcccacggcagccaggccaacagccccagcacccccaacagcgctggcagcagcagcagcttcaacatgagcaacagcggggacctcttcatgtctgtgcagagcctgaatggagacagctaccagggcgcccaggtgggcgccaacgtgcagagccaggtggacaccctgcggcacgtgatcagccagacaggaggctacagtgatggcctggccgccagccagatgtacagcccccagggcatcagcgagatcgcccggacctactag

SEQ ID NO: 298159 - DNA, 906 bp, Artificial Sequence
  derived and/or modified sequence
atgcggctggacaacatgctgctggccgagggcgtggccggccccgagaaggggggcggaagcgctgccgccgctgctgccgctgctgcgagtggcggggccggtagtgataattccgtggagcatagcgattacagagccaaattgtctcagatacgacagatctaccatacggagctggagaagtacgaacaggcctgcaacgaatttactacccatgtcatgaacctcctccgcgaacagtccagaacccggccgatcagccccaaagaaatcgagcggatggtatccatcatccacagaaagtttagctctattcagatgcagctgaagcaatcaacctgtgaggcggtgatgatactgcggagtcgattcctggatgctcggcggaagaggagaaatttcaataaacaagctacagagatcctgaacgagtacttctattcccatctctccaatccttatccgtccgaagaggccaaggaggagcttgccaagaaatgtggcatcaccgtcagccaagtctcaaactggtttggcaacaaacggattcgctataagaagaatataggtaagtttcaggaggaggcaaacatctatgccgcaaagactgcagtgactgctaccaacgttagtgctcatggaagccaagccaacagcccctccactcctaatagtgcaggaagcagcagcagcttcaatatgagcaatagtggtgatctgtttatgtcggtccagagtctgaatggtgactcctatcagggggcccaggtgggggctaacgtgcagtctcaggtggacacattgcgacatgttatcagtcagaccggggggtattccgacgggctggcagcatctcagatgtatagcccgcagggcatttccgaaatcgcaagaacgtactag

SEQ ID NO: 298160 - DNA, 1459 bp, Artificial Sequence
  derived and/or modified sequence
agttttgagtatccgaggagcccaggaggaggaacccacagacccccagctgatgcggctggacaacatgctgttagcggaaggcgtggcggggcctgagaagggcggagggtcggcggcagcggcggcagcggcggcggcttctggaggggcaggttcagacaactcagtggagcattcagattacagagccaaactctcacagatcagacaaatctaccatacggagctggagaaatacgagcaggcctgcaacgagttcaccacccacgtgatgaatctcctgcgagagcaaagccggaccaggcccatctccccaaaggagattgagcggatggtcagcatcatccaccgcaagttcagctccatccagatgcagctcaagcagagcacgtgcgaggcggtgatgatcctgcgttcccgatttctggatgcgcggcggaagagacggaatttcaacaagcaagcgacagaaatcctgaatgaatatttctattcccatctcagcaacccttaccccagtgaggaagccaaagaggagttagccaagaagtgtggcatcacagtctcccaggtatcaaactggtttggaaataagcgaatccggtacaagaagaacataggtaaatttcaagaggaagccaatatttatgctgccaaaacagctgtcactgctaccaatgtgtcagcccatggaagccaagctaactcgccctcaactcccaactcggctggttcttccagttcttttaacatgtcaaactctggagatttgttcatgagcgtgcagtcactcaatggggattcttaccaaggggcccaggttggagccaacgtgcaatcacaggtggatacccttcgccatgttatcagccagacaggaggatacagtgatggactcgcagccagtcagatgtacagtccgcagggcatcagtgaaattgcaagaacctattgatggcttggatgctctggtggtgacagcaagtcctcttctcttgactgaagaaatgtcttcccctatctgaaaagtggcctctcttccggaatgacacatactgacttttgaagaagcaaaaggatacctgctggccagtcatatcagccaaaaaactctggtgagcagtgagttggcagatgttgcaactggaagactgtggcatcaacagagccccaaagcaataatctctctttctcttcgcccccactaatccagcaatcaaataatcacttttaagcatttactgtgcaccaccatataacataaaatgtgatgaatagctaggtatatatatgacaacctctaaattctcaaaatattataataaattaagaaagcaagagttgtgcatgtaaaaagacaattaactacatagggagaaggcagtgaacacatttagtgcatctcccctgtaccggtcactgtgtgaggtgctgtacaagtactaatttatctaat

SEQ ID NO: 298161 - DNA, 906 bp, Artificial Sequence
  derived and/or modified sequence
atgagattggataatatgctgctggccgagggagttgctggccctgagaagggtgggggatccgcagcagcagctgcagccgcagcagcctctgggggagctggctccgacaatagtgtagaacactccgattacagggccaagctgagccaaatccgccaaatctatcacacagaactcgagaaatacgagcaggcatgtaacgagttcactactcatgtgatgaatctgctgagagagcagtccaggacacggcctattagccccaaggagatcgaaaggatggtgtccataatccaccggaaattctccagtattcagatgcagctcaagcagtctacttgtgaggctgtgatgatcctgcggtcaaggtttttggatgcaagacgaaaaagacgcaattttaacaagcaagctactgagatcctcaacgagtacttttactcccaccttagcaatccatacccgtccgaggaggctaaggaagagctcgctaaaaagtgcggtattacagtatcccaggtcagcaactggttcgggaacaaaagaatccggtacaaaaagaacatcggcaaattccaggaggaagccaacatttatgctgcaaagacggcagtcaccgctactaatgtcagcgcccacggatcacaggccaactccccttctactccaaatagcgccggatcttcctcctcatttaacatgtccaattcaggcgacctctttatgagtgtccagtcattaaatggtgacagttatcagggggctcaagtcggcgctaacgtgcagtctcaagtcgacaccttacgacacgtgatctcccagacgggtggatattctgacgggctggccgcatctcagatgtactctcctcagggaatatcggagattgccaggacctattag

SEQ ID NO: 298162 - DNA, 906 bp, Artificial Sequence
  derived and/or modified sequence
atgagactggacaacatgctgctggccgagggcgtggccggccccgagaagggcggcggcagcgccgccgccgccgccgccgccgccgccagcggcggcgccggcagcgacaacagcgtggagcacagcgactacagagccaagctgagccagatcagacagatctaccacaccgagctggagaagtacgagcaggcctgcaacgagttcaccacccacgtgatgaacctgctgagagagcagagcagaaccagacccatcagccccaaggagatcgagagaatggtgagcatcatccacagaaagttcagcagcatccagatgcagctgaagcagagcacctgcgaggccgtgatgatcctgagaagcagattcctggacgccagaagaaagagaagaaacttcaacaagcaggccaccgagatcctgaacgagtacttctacagccacctgagcaacccctaccccagcgaggaggccaaggaggagctggccaagaagtgcggcatcaccgtgagccaggtgagcaactggttcggcaacaagagaatcagatacaagaagaacatcggcaagttccaggaggaggccaacatctacgccgccaagaccgccgtgaccgccaccaacgtgagcgcccacggcagccaggccaacagccccagcacccccaacagcgccggcagcagcagcagcttcaacatgagcaacagcggcgacctgttcatgagcgtgcagagcctgaacggcgacagctaccagggcgcccaggtgggcgccaacgtgcagagccaggtggacaccctgagacacgtgatcagccagaccggcggctacagcgacggcctggccgccagccagatgtacagcccccagggcatcagcgagatcgccagaacctactag

SEQ ID NO: 298163 - protein, 370 aa, Artificial Sequence
  derived and/or modified sequence
MLLVFFVLWTCSLALLASSQSPPPPCASVLSIRGAQEEEPTDPQLMRLDNMLLAEGVAGPEKGGGSAAAAAAAAASGGAGSDNSVEHSDYRAKLSQIRQIYHTELEKYEQACNEFTTHVMNLLREQSRTRPISPKEIERMVSIIHRKFSSIQMQLKQSTCEAVMILRSRFLDARRKRRNFNKQATEILNEYFYSHLSNPYPSEEAKEELAKKCGITVSQVSNWFGNKRIRYKKNIGKFQEEANIYAAKTAVTATNVSAHGSQANSPSTPNSAGSSSSFNMSNSGDLFMSVQSLNGDSYQGAQVGANVQSQVDTLRHVISQTGGYSDGLAASQMYSPQGISANGGWQDATTPSSVTSPTEGPGSVHSDTSN

SEQ ID NO: 298164 - DNA, 1113 bp, Artificial Sequence
  derived and/or modified sequence
atgctcctggtctttttcgtcctgtggacttgctccttggctctgctagcctcttcccagtctccacctccaccgtgcgcctctgttctttccatacggggcgcccaggaagaggagcctacggatccccagctgatgcggcttgataacatgctcttagctgaaggagtcgcaggacccgagaagggagggggcagtgctgccgcggccgcggccgctgccgcttccggcggcgccgggtcagataattctgtggaacacagtgactatcgggcgaaactctctcagattaggcagatttatcacaccgaactggaaaaatatgagcaggcctgtaatgagtttacgacacatgtcatgaatctgctcagagaacagtctcgcactcgtcccattagccctaaagaaatagaaagaatggtctccattatccatagaaaattcagtagcatccaaatgcagcttaaacagagtacctgtgaagccgtgatgatcctacgtagccgatttttagatgcccgtcgaaaaaggcgtaacttcaacaagcaagccaccgagatactcaatgagtacttttattctcatctgtccaacccctaccccagtgaggaggctaaagaggagctggcaaagaagtgtgggatcactgtgtcccaggtgtctaactggtttggtaataagagaatccgatataagaagaacattgggaagttccaggaggaagccaatatttatgcggccaagacggccgtcacagctaccaatgtcagcgcgcacggatctcaggctaatagccccagcacccccaatagcgccgggtctagcagttcgttcaatatgtccaatagcggcgaccttttcatgagtgtgcagtctttgaatggagattcctatcaaggcgcccaggtgggagccaacgtccagtcgcaggttgatacactgaggcacgtcatttcccagacaggaggatactccgatggccttgccgctagtcagatgtattcccctcagggcatctctgcaaacggcgggtggcaagatgccacaactcccagcagcgtcaccagtcccacggagggcccaggtagcgtgcactctgacacctctaattag

SEQ ID NO: 298165 - DNA, 1113 bp, Artificial Sequence
  derived and/or modified sequence
atgctgctggtgttctttgtgctgtggacctgcagcctggccctgctggccagcagccagagccccccaccaccctgtgcctctgtgctgagcatccggggggcccaggaggaggagcccacagacccccagctgatgaggctggacaacatgctgctggccgagggcgtggccggccctgagaagggcggcggcagcgctgctgctgctgctgctgctgctgccagcggcggggccggcagtgacaacagcgtggagcacagcgactaccgggccaagctgagccagatccggcagatctaccacacagagctggagaagtatgagcaggcctgcaatgagttcaccacccacgtgatgaacctgctgcgggagcagagcaggacccggcccatcagccccaaggagattgaaagaatggtgtccatcatccacaggaagttcagcagcatccagatgcagctgaagcagagcacctgtgaggccgtgatgatcctgcggagccgcttcctggatgcccggaggaagagaagaaacttcaacaagcaggccacagagatcctgaatgagtacttctacagccacctgagcaacccctaccccagcgaggaggccaaggaggagctggccaagaagtgtggcatcaccgtgtcccaggtgagcaactggtttggaaacaagaggatccgctacaagaagaacatcggcaagttccaggaggaggccaacatctatgctgccaagacagctgtgacagccaccaacgtgtctgcccacggcagccaggccaacagccccagcacccccaacagcgctggcagcagcagcagcttcaacatgagcaacagcggggacctcttcatgtctgtgcagagcctgaatggagacagctaccagggcgcccaggtgggcgccaacgtgcagagccaggtggacaccctgcggcacgtgatcagccagacaggaggctacagtgatggcctggccgccagccagatgtacagcccccagggcatcagcgccaacggcggctggcaggatgccaccacccccagctctgtgaccagccccacagagggccctggctctgtgcacagcgacaccagcaactag

SEQ ID NO: 298166 - DNA, 1113 bp, Artificial Sequence
  derived and/or modified sequence
atgctgctggtgttcttcgtgctgtggacctgcagcctggccctgctggccagcagccaaagccccccgccaccatgtgctagcgtgcttagtatacggggtgctcaggaagaggagcccaccgacccccaattaatgcgcttggacaacatgctgctggctgagggagtggccggaccagaaaagggtggggggtctgccgccgccgcggcagccgctgccgcgtcaggcggagccgggagcgataacagcgtggaacactcagactaccgggcaaagctctcacagattcgacagatttatcatacagagctggagaaatatgagcaagcttgcaacgagtttactactcacgttatgaacctgctgagggaacagagcaggaccaggccaatttcaccgaaggaaatcgagaggatggtgagtattattcatcgcaagttttcttccatacaaatgcagctgaagcagtcgacttgcgaagccgtaatgattcttcggtctcgatttttggacgcgaggaggaaacggcgcaatttcaacaagcaggctacagagattttgaacgagtacttttattcccacttatccaatccgtatccatctgaggaggcaaaagaggagttggcaaagaagtgcggcattacagtctcccaagtgagcaactggtttgggaacaagcgtattcgatataaaaagaatatagggaaattccaggaagaggccaacatctatgcggcgaagactgcagtcacagctaccaacgtttcggcacatggcagccaggctaacagcccttctacaccaaacagtgccgggagctccagttcgttcaacatgtccaactcgggggatctgtttatgtccgtacagtctctgaacggggactcctaccagggcgcccaggtcggagctaatgttcagagccaggtcgacacgctacgccacgtcatatcccaaactggaggctattctgatggactcgccgccagccagatgtactcgccccagggcataagtgcaaatgggggctggcaggacgcaactacacctagcagtgtgacatcacccaccgagggacccgggtctgtgcacagtgacacctctaactag

SEQ ID NO: 298167 - DNA, 1538 bp, Artificial Sequence
  derived and/or modified sequence
atgctccttgttttctttgtgctctggacttgctcacttgcactgcttgcttcttcccaatcgccgccgcccccctgtgcttcagttttgagtatccgaggagcccaggaggaggaacccacagacccccagctgatgcggctggacaacatgctgttagcggaaggcgtggcggggcctgagaagggcggagggtcggcggcagcggcggcagcggcggcggcttctggaggggcaggttcagacaactcagtggagcattcagattacagagccaaactctcacagatcagacaaatctaccatacggagctggagaaatacgagcaggcctgcaacgagttcaccacccacgtgatgaatctcctgcgagagcaaagccggaccaggcccatctccccaaaggagattgagcggatggtcagcatcatccaccgcaagttcagctccatccagatgcagctcaagcagagcacgtgcgaggcggtgatgatcctgcgttcccgatttctggatgcgcggcggaagagacggaatttcaacaagcaagcgacagaaatcctgaatgaatatttctattcccatctcagcaacccttaccccagtgaggaagccaaagaggagttagccaagaagtgtggcatcacagtctcccaggtatcaaactggtttggaaataagcgaatccggtacaagaagaacataggtaaatttcaagaggaagccaatatttatgctgccaaaacagctgtcactgctaccaatgtgtcagcccatggaagccaagctaactcgccctcaactcccaactcggctggttcttccagttcttttaacatgtcaaactctggagatttgttcatgagcgtgcagtcactcaatggggattcttaccaaggggcccaggttggagccaacgtgcaatcacaggtggatacccttcgccatgttatcagccagacaggaggatacagtgatggactcgcagccagtcagatgtacagtccgcagggcatcagtgctaatggaggttggcaggatgctactaccccttcatcagtgacctcccctacagaaggccctggcagtgttcactctgatacctccaactgatctcccagcaatcgcatcccggctgaccctgtgccccagttggggcaggggcaggagggagggtttctctcccaacgctgaagcggtcagactggaggtcgaagcaatcagcaaacacaataagagtctccttctcttctcttctttgggatgctatttcagccaatctggacacttctttatactctcttcccttttttttctgggtagaagccacccttccctgcctccagctgtcagcctggttttcgtcatcttccctgcccctgtgcctctgtcctagactcccggggtccccgccctctctcatatcactgaaggatattttcaacaattagaggaatttaaagaggaaaaaaattacaaagaaaataataaaagtgtttgtacgttttcatgctggtggtttgaggagccaaatttac

SEQ ID NO: 298168 - DNA, 1113 bp, Artificial Sequence
  derived and/or modified sequence
atgctgctagtgtttttcgtgttgtggacgtgtagtctggcccttctggcatctagccagtctcccccaccaccatgcgccagcgtcctgtctatccggggtgcccaggaggaggagccgaccgacccccaactgatgaggctcgacaacatgctcctagccgagggtgtggccggtccagagaagggcggaggatccgccgctgcggcagcagccgctgcggctagtggaggtgctggttcagataactccgtggaacacagcgattatagggcgaaactatcccagattcggcaaatttatcacaccgagctcgaaaagtacgagcaggcctgtaacgaatttacgacacacgtaatgaatttgcttcgggaacaatcaagaacaagacctattagccctaaggaaatcgaacggatggtctccatcattcacagaaagttctccagtatacagatgcagctcaaacagtcaacctgcgaagctgtcatgatcctaagatctcgtttcctcgatgcacggaggaaaagacgcaatttcaataagcaggccacagagatcctgaatgaatacttctattcccacctgtcgaacccctatcccagtgaggaggccaaggaagagttggcaaagaaatgtgggatcacagtgagccaggtgagcaactggtttggcaacaagcggatcaggtataaaaagaatattgggaaatttcaggaggaggcgaacatctacgctgccaagaccgctgttacagccaccaatgtgtctgcccacggttcccaagcaaactccccaagcactccgaacagtgctgggtcgagctctagcttcaatatgtccaactctggcgatcttttcatgtctgtccagtctctgaatggcgattcctaccaaggcgctcaggtgggagcaaatgttcagtcgcaagtggataccttgaggcacgtgatttcccagactgggggatatagcgatgggctcgccgcttcccagatgtactcacctcaagggatctctgccaatgggggatggcaagacgccacaacaccatcctcggtgacaagtcccacggagggcccaggtagcgtccattctgatacatctaactag

SEQ ID NO: 298169 - DNA, 1113 bp, Artificial Sequence
  derived and/or modified sequence
atgctgctggtgttcttcgtgctgtggacctgcagcctggccctgctggccagcagccagagccccccccccccctgcgccagcgtgctgagcatcagaggcgcccaggaggaggagcccaccgacccccagctgatgagactggacaacatgctgctggccgagggcgtggccggccccgagaagggcggcggcagcgccgccgccgccgccgccgccgccgccagcggcggcgccggcagcgacaacagcgtggagcacagcgactacagagccaagctgagccagatcagacagatctaccacaccgagctggagaagtacgagcaggcctgcaacgagttcaccacccacgtgatgaacctgctgagagagcagagcagaaccagacccatcagccccaaggagatcgagagaatggtgagcatcatccacagaaagttcagcagcatccagatgcagctgaagcagagcacctgcgaggccgtgatgatcctgagaagcagattcctggacgccagaagaaagagaagaaacttcaacaagcaggccaccgagatcctgaacgagtacttctacagccacctgagcaacccctaccccagcgaggaggccaaggaggagctggccaagaagtgcggcatcaccgtgagccaggtgagcaactggttcggcaacaagagaatcagatacaagaagaacatcggcaagttccaggaggaggccaacatctacgccgccaagaccgccgtgaccgccaccaacgtgagcgcccacggcagccaggccaacagccccagcacccccaacagcgccggcagcagcagcagcttcaacatgagcaacagcggcgacctgttcatgagcgtgcagagcctgaacggcgacagctaccagggcgcccaggtgggcgccaacgtgcagagccaggtggacaccctgagacacgtgatcagccagaccggcggctacagcgacggcctggccgccagccagatgtacagcccccagggcatcagcgccaacggcggctggcaggacgccaccacccccagcagcgtgaccagccccaccgagggccccggcagcgtgcacagcgacaccagcaactag

SEQ ID NO: 298170 - protein, 271 aa, Artificial Sequence
  derived and/or modified sequence
MITGVFSMRLWTPVGVLTSLAYCLHQRRVALAELQEADGQCPVDRSLLKLKMVQVVFRHGARSPLKPLPLEEQVEWNPQLLEVPPQTQFDYTVTNLAGGPKPYSPYDSQYHETTLKGGMFAGQLTKVGMQQMFALGERLRKNYVEDIPFLSPTFNPQEVFIRSTNIFRNLESTRCLLAGLFQCQKEGPIIIHTDEADSEVLYPNYQSCWSLRQRTRGRRQTASLQPGISEDLKKVKDRMGIDSSDKVDFFILLDNVAAEQEKMGSCRFHGS

SEQ ID NO: 298171 - DNA, 816 bp, Artificial Sequence
  derived and/or modified sequence
atgataacgggtgtgtttagcatgagactgtggacccctgtcggcgtactcacgagcctggcatattgcttgcaccagcgcagagtggctcttgccgaactgcaggaggccgatggacagtgcccagtcgaccgctctcttctgaaacttaaaatggtgcaggtggtgttccgccatggggctcgctccccactgaagccactcccactggaggagcaggtggaatggaaccctcagctcctggaggtcccaccacaaactcagttcgattacactgtgacaaacctagcagggggtccaaagccatacagcccctatgacagccagtatcatgaaactaccttaaaagggggaatgtttgcaggccagctaacaaaagtgggcatgcagcagatgttcgctctcggtgagcgcttgcgcaaaaattacgtcgaagatatccccttccttagtcccacattcaatccgcaggaggtgttcatcaggagcacaaacatttttcgcaacctggagagcaccagatgtcttctcgccggattgttccaatgccagaaggaagggcctataatcatacatactgatgaggccgattccgaggtgttatacccaaactaccaatcttgttggtcattacgacaaagaacaaggggacgacgccagaccgcgtctctgcagccagggatctctgaagatctgaaaaaggtgaaggatagaatgggaatagatagtagtgataaggtcgatttcttcatcctactggataacgttgccgctgaacaagagaagatgggttcctgtcggttccacggctcttag

SEQ ID NO: 298172 - DNA, 816 bp, Artificial Sequence
  derived and/or modified sequence
atgattaccggcgttttcagtatgcgactctggacccccgtcggggtactgaccagtttggcctactgtttacatcagcgaagagttgcacttgctgaactgcaggaagccgacggacaatgcccagtggacagaagcctgctgaaactgaaaatggtacaggtcgtgtttagacacggtgcgaggtcaccactcaagcctctgccccttgaagaacaggtggagtggaatccgcagctactcgaagtgccacctcagacccagttcgattacacagtgaccaatctcgcaggcggccctaaaccttactcgccttacgacagccaatatcatgagactacactgaaaggaggtatgtttgctggacaactgaccaaagtgggaatgcagcagatgtttgcgttgggcgaacgtctgagaaaaaactatgtggaagatatcccatttctgtccccaacgttcaacccccaggaagtctttatcagatcaaccaacatatttaggaacctggaatctacgaggtgcctactcgcgggcctcttccagtgtcaaaaagaaggacctattatcattcacactgatgaagctgacagtgaagtgttataccccaattaccaatcctgctggtcacttaggcagagaactagaggcaggcgccagaccgcctcactacaaccaggaatttcagaggacttaaagaaggtgaaggacagaatgggcatcgactcgagcgataaggtagatttttttattctgttggacaacgtggctgccgaacaggaaaaaatggggagctgtcgcttccacggctcatag

SEQ ID NO: 298173 - DNA, 816 bp, Artificial Sequence
  derived and/or modified sequence
atgatcaccggcgtgtttagcatgaggctttggacacccgttggagttttgacttcccttgcatattgcttgcatcagagacgtgtcgcactcgcggaactgcaagaagctgatgggcagtgtccggtggatcgcagtctcttgaagctcaaaatggttcaggtcgtcttccgccatggagcacgttctcccctaaaacctttacctcttgaggagcaggttgagtggaacccccagttacttgaagtgccaccccaaacccagtttgactacaccgtcaccaatctggcaggaggccctaaaccttatagcccttacgactcccaataccacgaaacaacactgaaagggggtatgtttgcaggtcagttaacaaaggtcggtatgcagcaaatgttcgctctgggggaaagattacgcaaaaactacgtggaagatattccctttcttagcccgacattcaatcctcaggaggtcttcattagatccaccaacattttccggaacttggagagtacccggtgtctgctggctggcctgttccagtgtcagaaagaaggacctattatcatccacactgacgaggctgattcagaagtgctatatccaaattaccaaagctgttggtcactccgccagagaacccgtggccgcagacagaccgcctccctacaacctggaatttcagaagatcttaaaaaggttaaagatcgcatgggcattgactcctccgacaaagttgacttcttcatcttactggataacgttgcagctgagcaggaaaagatgggtagctgccgctttcatggaagctag

SEQ ID NO: 298174 - DNA, 816 bp, Artificial Sequence
  derived and/or modified sequence
atgatcaccggcgtgttcagcatgagactgtggacccccgtgggcgtgctgaccagcctggcctactgcctgcaccagagaagagtggccctggccgagctgcaggaggccgacggccagtgccccgtggacagaagcctgctgaagctgaagatggtgcaggtggtgttcagacacggcgccagaagccccctgaagcccctgcccctggaggagcaggtggagtggaacccccagctgctggaggtgcccccccagacccagttcgactacaccgtgaccaacctggccggcggccccaagccctacagcccctacgacagccagtaccacgagaccaccctgaagggcggcatgttcgccggccagctgaccaaggtgggcatgcagcagatgttcgccctgggcgagagactgagaaagaactacgtggaggacatccccttcctgagccccaccttcaacccccaggaggtgttcatcagaagcaccaacatcttcagaaacctggagagcaccagatgcctgctggccggcctgttccagtgccagaaggagggccccatcatcatccacaccgacgaggccgacagcgaggtgctgtaccccaactaccagagctgctggagcctgagacagagaaccagaggcagaagacagaccgccagcctgcagcccggcatcagcgaggacctgaagaaggtgaaggacagaatgggcatcgacagcagcgacaaggtggacttcttcatcctgctggacaacgtggccgccgagcaggagaagatgggcagctgcagattccacggcagctag

SEQ ID NO: 298175 - DNA, 816 bp, Artificial Sequence
  derived and/or modified sequence
atgataactggtgtcttcagtatgaggttgtggacacccgtcggcgtcctgacctctctcgcctattgtctgcaccagcgaagggtggctcttgctgaactgcaagaggcagacggacagtgcccagtcgacaggagtctgctaaagctcaaaatggtgcaggtcgtcttccgacatggggcacggtcgcctctgaagccactcccgctcgaggagcaggttgagtggaatcctcagctattggaggtgcctccacagactcagttcgactatacagtgacgaatctggctggtggcccaaagccatatagtccttacgactctcagtaccacgagacgaccctgaaaggcgggatgttcgcaggccaacttacgaaggtcggcatgcagcaaatgtttgctttgggtgagcgcctaaggaagaactatgtcgaggacatcccatttctttccccaactttcaacccacaagaggtgtttatccgctcaaccaacatttttcgaaaccttgaaagtactagatgtctccttgccggcctcttccagtgccagaaggagggtcccatcattattcacactgatgaggcagacagcgaagtcctctaccctaactaccaatcttgttggtcactgcgtcagcggactaggggcaggaggcagacagcttccctgcagccaggcattagcgaagatctaaagaaagttaaggaccgaatgggtatcgactctagcgacaaagtggatttttttattctgctggacaacgttgctgcagagcaggaaaaaatgggatcttgcaggttccacgggtcttag

SEQ ID NO: 298176 - DNA, 816 bp, Artificial Sequence
  derived and/or modified sequence
atgatcactggagtcttctccatgaggctgtggacccctgtgggcgtgctgaccagcctggcctactgcctgcaccagaggagagtggccctggccgagctgcaggaggctgatggccagtgccctgtggacaggagcctgctgaagctgaagatggtgcaggtggtgttcagacatggagcccggagccccctgaagcccctgcccctggaggagcaggtggagtggaacccccagctgctggaggtgcccccccagacccagtttgactacacagtgaccaacctggccggcggccccaagccctacagcccctatgacagccagtaccacgagaccaccctgaagggcggcatgtttgctggccagctgaccaaggtgggcatgcagcagatgtttgccctgggggagcggctgaggaagaactacgtggaggacatccccttcctgagccccaccttcaacccccaggaggtgttcatccgcagcaccaacatcttcaggaacctggagagcacccgctgcctgctggccggcctcttccagtgccagaaggagggccccatcatcatccacacagatgaggccgacagcgaggtgctgtaccccaactaccagagctgctggagcctgcggcagaggacccggggccggcggcagacagccagcctgcagcccggcatcagcgaggacctgaagaaggtgaaggacaggatgggcatcgacagcagtgacaaggtggacttcttcatcctgctggacaacgtggccgctgagcaggagaagatgggcagctgccgcttccacggcagctag

SEQ ID NO: 298177 - DNA, 816 bp, Artificial Sequence
  derived and/or modified sequence
atgatcaccggcgtgttcagcatgcggctgtggacccccgtgggcgtcctcacttccctggcatattgccttcaccagaggcgtgtagcccttgctgaactacaggaagccgacggccagtgccctgtcgatcgttcattgctgaaactgaaaatggtacaggtagtgtttcgtcacggagctagatctcccctcaagcctctacccttggaagaacaggtggaatggaaccctcagctgttggaagttccaccccagacccagtttgactatactgtaacgaacctggccgggggaccgaagccttactcaccctatgacagccaatatcacgagactaccctaaagggcggcatgtttgccggtcagctgaccaaagtcgggatgcagcagatgttcgcccttggtgaacgtctgaggaagaactatgtagaggatattcccttcttgagtccaactttcaacccccaggaagtttttattcgcagcaccaacattttcaggaacctcgaatccactagatgtctgctggctggtctgttccagtgtcagaaagaaggcccaatcataatccacacagacgaggcagacagcgaggtgttgtacccaaattaccagagctgttggtccctcaggcagcgaacacgggggagaagacaaacagcctccttacagcccgggatctccgaggatttaaagaaggttaaagacagaatgggcatcgactcctctgacaaggtagatttcttcattctgttggacaatgttgccgccgaacaagagaagatgggctcatgtaggttccacggttcatag

SEQ ID NO: 298178 - DNA, 1010 bp, Artificial Sequence
  derived and/or modified sequence
gttctctcccccgttcccactcggggtctccctcagggccgggaggcacagcggtccctgcttgctgaagggctggatgtacgcatccgcaggttcccgcggacttgggggcgcccgctgagccccggcgcccgcagaagacttgtgtttgcctcctgcagcctcaacccggagggcagcgagggcctaccaccatgatcactggtgtgttcagcatgcgcttgtggaccccagtgggcgtcctgacctcgctggcgtactgcctgcaccagcggcgggtggccctggccgagctgcaggaggccgatggccagtgtccggtcgaccgcagcctgctgaagttgaaaatggtgcaggtcgtgtttcgacacggggctcggagtcctctcaagccgctcccgctggaggagcaggtagagtggaacccccagctattagaggtcccaccccaaactcagtttgattacacagtcaccaatctagctggtggtccgaaaccatattctccttacgactctcaataccatgagaccaccctgaaggggggcatgtttgctgggcagctgaccaaggtgggcatgcagcaaatgtttgccttgggagagagactgaggaagaactatgtggaagacattccctttctttcaccaaccttcaacccacaggaggtctttattcgttccactaacatttttcggaatctggagtccacccgttgtttgctggctgggcttttccagtgtcagaaagaaggacccatcatcatccacactgatgaagcagattcagaagtcttgtatcccaactaccaaagctgctggagcctgaggcagagaaccagaggccggaggcagactgcctctttacagccaggaatctcagaggatttgaaaaaggtgaaggacaggatgggcattgacagtagtgataaagtggacttcttcatcctcctggacaacgtggctgccgagcaggagaagatgggctcctgcaggttccatggaagctga

SEQ ID NO: 298179 - RNA, 816 nt, Artificial Sequence
  derived and/or modified sequence
augauuaccggcguuuucaguaugcgacucuggacccccgucgggguacugaccaguuuggccuacuguuuacaucagcgaagaguugcacuugcugaacugcaggaagccgacggacaaugcccaguggacagaagccugcugaaacugaaaaugguacaggucguguuuagacacggugcgaggucaccacucaagccucugccccuugaagaacagguggaguggaauccgcagcuacucgaagugccaccucagacccaguucgauuacacagugaccaaucucgcaggcggcccuaaaccuuacucgccuuacgacagccaauaucaugagacuacacugaaaggagguauguuugcuggacaacugaccaaagugggaaugcagcagauguuugcguugggcgaacgucugagaaaaaacuauguggaagauaucccauuucuguccccaacguucaacccccaggaagucuuuaucagaucaaccaacauauuuaggaaccuggaaucuacgaggugccuacucgcgggccucuuccagugucaaaaagaaggaccuauuaucauucacacugaugaagcugacagugaaguguuauaccccaauuaccaauccugcuggucacuuaggcagagaacuagaggcaggcgccagaccgccucacuacaaccaggaauuucagaggacuuaaagaaggugaaggacagaaugggcaucgacucgagcgauaagguagauuuuuuuauucuguuggacaacguggcugccgaacaggaaaaaauggggagcugucgcuuccacggcucauag

SEQ ID NO: 298180 - RNA, 816 nt, Artificial Sequence
  derived and/or modified sequence
augaucaccggcguguuuagcaugaggcuuuggacacccguuggaguuuugacuucccuugcauauugcuugcaucagagacgugucgcacucgcggaacugcaagaagcugaugggcaguguccgguggaucgcagucucuugaagcucaaaaugguucaggucgucuuccgccauggagcacguucuccccuaaaaccuuuaccucuugaggagcagguugaguggaacccccaguuacuugaagugccaccccaaacccaguuugacuacaccgucaccaaucuggcaggaggcccuaaaccuuauagcccuuacgacucccaauaccacgaaacaacacugaaaggggguauguuugcaggucaguuaacaaaggucgguaugcagcaaauguucgcucugggggaaagauuacgcaaaaacuacguggaagauauucccuuucuuagcccgacauucaauccucaggaggucuucauuagauccaccaacauuuuccggaacuuggagaguacccggugucugcuggcuggccuguuccagugucagaaagaaggaccuauuaucauccacacugacgaggcugauucagaagugcuauauccaaauuaccaaagcuguuggucacuccgccagagaacccguggccgcagacagaccgccucccuacaaccuggaauuucagaagaucuuaaaaagguuaaagaucgcaugggcauugacuccuccgacaaaguugacuucuucaucuuacuggauaacguugcagcugagcaggaaaagauggguagcugccgcuuucauggaagcuag

SEQ ID NO: 298181 - protein, 474 aa, Artificial Sequence
  derived and/or modified sequence
MIMNKMKNFKRRFSLSVPRTETIEESLAEFTEQFNQLHNRRNENLQLGPLGRDPPQECSTFSPTDSGEEPGQLSPGVQFQRRQNQRRFSMEDVSKRLSLPMDIRLPQEFLQKLQMESPDLPKPLSRMSRRASLSDIGFGKLETYVKLDKLGEGTYATVFKGRSKLTENLVALKEIRLEHEEGAPCTAIREVSLLKNLKHANIVTLHDLIHTDRSLTLVFEYLDSDLKQYLDHCGNLMSMHNVKIFMFQLLRGLAYCHHRKILHRDLKPQNLLINERGELKLADFGLARAKSVPTKTYSNEVVTLWYRPPDVLLGSTEYSTPIDMWGVGCIHYEMATGRPLFPGSTVKEELHLIFRLLGTPTEETWPGVTAFSEFRTYSFPCYLPQPLINHAPRLDTDGIHLLSSLLLYESKSRMSAEAALSHSYFRSLGERVHQLEDTASIFSLKEIQLQKDPGYRGLAFQQPGRGKNRRQSIF

SEQ ID NO: 298182 - protein, 157 aa, Artificial Sequence
  derived and/or modified sequence
MSMHNVKIFMFQLLRGLAYCHHRKILHRDLKPQNLLINERGELKLADFGLARAKSVPTKTYSNEVVTLWYRPPDVLLGSTEYSTPIDMWGVGCIHYEMATGRPLFPGSTVKEELHLIFRLLGTPTEETWPGVTAFSEFRTYSFPCYLPQPLINHAPR

SEQ ID NO: 298183 - DNA, 1425 bp, Artificial Sequence
  derived and/or modified sequence
atgatcatgaacaagatgaagaacttcaagagaagattcagcctgagcgtgcccagaaccgagaccatcgaggagagcctggccgagttcaccgagcagttcaaccagctgcacaacagaagaaacgagaacctgcagctgggccccctgggcagagaccccccccaggagtgcagcaccttcagccccaccgacagcggcgaggagcccggccagctgagccccggcgtgcagttccagagaagacagaaccagagaagattcagcatggaggacgtgagcaagagactgagcctgcccatggacatcagactgccccaggagttcctgcagaagctgcagatggagagccccgacctgcccaagcccctgagcagaatgagcagaagagccagcctgagcgacatcggcttcggcaagctggagacctacgtgaagctggacaagctgggcgagggcacctacgccaccgtgttcaagggcagaagcaagctgaccgagaacctggtggccctgaaggagatcagactggagcacgaggagggcgccccctgcaccgccatcagagaggtgagcctgctgaagaacctgaagcacgccaacatcgtgaccctgcacgacctgatccacaccgacagaagcctgaccctggtgttcgagtacctggacagcgacctgaagcagtacctggaccactgcggcaacctgatgagcatgcacaacgtgaagatcttcatgttccagctgctgagaggcctggcctactgccaccacagaaagatcctgcacagagacctgaagccccagaacctgctgatcaacgagagaggcgagctgaagctggccgacttcggcctggccagagccaagagcgtgcccaccaagacctacagcaacgaggtggtgaccctgtggtacagaccccccgacgtgctgctgggcagcaccgagtacagcacccccatcgacatgtggggcgtgggctgcatccactacgagatggccaccggcagacccctgttccccggcagcaccgtgaaggaggagctgcacctgatcttcagactgctgggcacccccaccgaggagacctggcccggcgtgaccgccttcagcgagttcagaacctacagcttcccctgctacctgccccagcccctgatcaaccacgcccccagactggacaccgacggcatccacctgctgagcagcctgctgctgtacgagagcaagagcagaatgagcgccgaggccgccctgagccacagctacttcagaagcctgggcgagagagtgcaccagctggaggacaccgccagcatcttcagcctgaaggagatccagctgcagaaggaccccggctacagaggcctggccttccagcagcccggcagaggcaagaacagaagacagagcatcttctag

SEQ ID NO: 298184 - DNA, 3141 bp, Artificial Sequence
  derived and/or modified sequence
cttcctcctcctcctcctcctcctcctccctcctcttccccaccttcctccactccctcccttcccctccccttctacctcctcctcggccagctcaggttgcagcttctctggggaactgctcacctttccggagcaggggaagctgccccgtgcccgggagggagcgggcgcaccgcggcccccaggacacgcgctgtgagtcccgcgggcggtgcgcctgggaggaagggggaggtcggaggagcgggcaccgcggcgccgggtataaggagcaaaggacccggctgcccagtccctcatgatcatgaacaagatgaagaactttaagcgccgtttctccctgtcagtgccccgcactgagaccattgaagaatccttggctgaattcacggagcaattcaaccagctccacaaccggcggaatgagaacttgcagctcggtcctcttggcagagaccccccgcaggagtgcagcaccttctccccaacagacagcggggaggagccggggcagctctcccctggcgtgcagttccagcggcggcagaaccagcgccgcttctccatggaggacgtcagcaagaggctctctctgcccatggatatccgcctgccccaggaattcctacagaagctacagatggagagcccagatctgcccaagccgctcagccgcatgtcccgccgggcctccctgtcagacattggctttgggaaactggaaacatacgtgaaactggacaaactgggagagggcacctatgccacagtcttcaaagggcgcagcaaactgacggagaaccttgtggccctgaaagagatccggctggagcacgaggagggagcgccctgcactgccatccgagaggtgtctctgctgaagaacctgaagcacgccaatattgtgaccctgcatgacctcatccacacagatcggtccctcaccctggtgtttgagtacctggacagtgacctgaagcagtatctggaccactgtgggaacctcatgagcatgcacaacgtcaagattttcatgttccagctgctccggggcctcgcctactgtcaccaccgcaagatcctgcaccgggacctgaagccccagaacctgctcatcaacgagaggggggagctgaagctggccgactttggactggccagggccaagtcagtgcccacaaagacttactccaatgaggtggtgaccctgtggtacaggccccccgatgtgctgctgggatccacagagtactccacccccattgatatgtggggcgtgggctgcatccactacgagatggccacagggaggcccctcttcccgggctccacagtcaaggaggagctgcacctcatctttcgcctcctcgggacccccacagaagagacgtggcccggcgtgaccgccttctctgagttccgcacctacagcttcccctgctacctcccgcagccgctcatcaaccacgcgcccaggttggatacggatggcatccacctcctgagcagcctgctcctgtatgaatccaagagtcgcatgtcagcagaggctgccctgagtcactcctacttccggtctctgggagagcgtgtgcaccagcttgaagacactgcctccatcttctccctgaaggagatccagctccagaaggacccaggctaccgaggcttggccttccagcagccaggacgagggaagaacaggcggcagagcatcttctgagccacgcccaccttgctgtggccaagggacaagagatcacatggagcacaaattcgggtaggatggagcctgtgtggccctcggaggactgaagaacgagggctgacagccagcctggaagaccgcttggcagcccttctggccacggctgtttcttctttgtgcttcccgtgtgcctccccagtagccctcacctgcataccaacccctcctttacccacgttggggctggcataagctgcttccctgagaggacatgaggggggggcggtcctcgtaccctctcccaccctggtgtttgggcacctgcgtgggatgcacacggatgacagaatcaaggcgccaggatgggcactctgccctggatacaggctctaccctcctcccccaggacctgcctagtgccagtttggtagtccccctttctggccccttggagcccacacacgtttcatctttttcccctctgagagcaagaagagacatggcatgttctctgggaccctggaatcctaggtacccacatgtgtgccaaagcctaccccacctggcaggtgtcccacagcaacagaaggaatagtagtccccactctttccatcagccctaccctaccctcattccccgacaccctctggcttgaaccatggctgagcagtgccggcatacgctttgctggcatgcttggatgcccagctgtgtccagaggtggcctgggaccgccagttgcacgcctgccacctcagccagcccccgcccagctcatcagtctgaatggagttgccttaaattggcaggtggtaccgtactcactgcccttggagctgtgaccggctcctgcctgtccaccccttcccgaggtggctcctgcttaccttatcatcccagggctctgattagccaggcctggtcagggtcctggggacggcacccagatatgcagagtcaccctgacactggtgccaggctgacctcagctcccgaaggctcgcacagcctccccatccttccttcccagcccttgtggctctgtccacctgatcccaataccagcttcccccagcccctgccaccccagagggcggccacgacagggagaggtgtagatgccaccatctgagggagaggaacgtggaacaggagcaggctctgatgctgagaggcttgcctccgggggctggaagcctgggtggccggggcccctgaagaaggctcccctctgtatcccccaggtctcctcaacactgggctgatcctgaatggcacaggccaaggggaggccagcctcgcctttctacccaggccccctgccctgcccacctcaggcccccaccctccactcctccccacggtactgtgaacgtcgtgtgactcagtgcagagacagataatatatttaattcatgtacagaaagga

SEQ ID NO: 298185 - DNA, 1648 bp, Artificial Sequence
  derived and/or modified sequence
tttccttcctcctcctcctcctcctcctcctccctcctcttccccaccttcctccactccctcccttcccctccccttctacctcctcctcggccagctcaggttgcagcttctctggggaactgctcacctttccggagcaggggaagctgccccgtgcccgggagggagcgggcgcaccgcggcccccaggacacgcgctgacccggctgcccagtccctcatgatcatgaacaagatgaagaactttaagcgccgtttctccctgtcagtgccccgcactgagaccattgaagaatccttggctgaattcacggagcaattcaaccagctccacaaccggcggaatgagaacttgcagctcggtcctcttggcagagaccccccgcaggagtgcagcaccttctccccaacagacagcggggaggagccggggcagctctcccctggcgtgcagttccagcggcggcagaaccagcgccgcttctccatggaggacgtcagcaagaggctctctctgcccatggatatccgcctgccccaggaattcctacagaagctacagatggagagcccagatctgcccaagccgctcagccgcatgtcccgccgggcctccctgtcagacattggctttgggaaactggaaacatacgtgaaactggacaaactgggagagggcacctatgccacagtcttcaaagggcgcagcaaactgacggagaaccttgtggccctgaaagagatccggctggagcacgaggagggagcgccctgcactgccatccgagaggtgtctctgctgaagaacctgaagcacgccaatattgtgaccctgcatgacctcatccacacagatcggtccctcaccctggtgtttgagtacctggacagtgacctgaagcagtatctggaccactgtgggaacctcatgagcatgcacaacgtcaagattttcatgttccagctgctccggggcctcgcctactgtcaccaccgcaagatcctgcaccgggacctgaagccccagaacctgctcatcaacgagaggggggagctgaagctggccgactttggactggccagggccaagtcagtgcccacaaagacttactccaatgaggtggtgaccctgtggtacaggccccccgatgtgctgctgggatccacagagtactccacccccattgatatgtggggcgtgggctgcatccactacgagatggccacagggaggcccctcttcccgggctccacagtcaaggaggagctgcacctcatctttcgcctcctcgggacccccacagaagagacgtggcccggcgtgaccgccttctctgagttccgcacctacagcttcccctgctacctcccgcagccgctcatcaaccacgcgcccaggttggatacggatggcatccacctcctgagcagcctgctcctgtatgaatccaagagtcgcatgtcagcagaggctgccctgagtcactcctacttccggtctctgggagagcgtgtgcaccagcttgaagacactgcctccatcttctccctgaaggagatccagctccagaaggacccaggctaccgaggcttggccttccagcagccaggacgagggaagaacaggcggcagagcatcttctga

SEQ ID NO: 298186 - DNA, 1425 bp, Artificial Sequence
  derived and/or modified sequence
atgattatgaataaaatgaaaaactttaaacgcaggttctccctgagcgtgccacggactgaaaccattgaagagtccctggcagagttcaccgaacagtttaatcagctgcacaatcgcaggaacgaaaacctgcaacttggccccctgggacgggacccgccacaggaatgctcgaccttttcacccacggattctggagaggaacccggacagttgtccccgggcgtgcagtttcagcggagacaaaaccagagacgtttctcgatggaggatgtaagtaaaaggctctcactgcctatggatatcagacttccccaggaattccttcagaagctgcagatggaatccccagatttgccgaaaccgttatcaaggatgtccagaagggcgtccctgagcgacatcgggtttggaaagttagagacctacgtgaagctggataaattgggcgagggcacttacgcgaccgtcttcaaaggtcgctccaaactgaccgagaacctggttgccctgaaagaaatccggctggagcacgaggagggcgccccctgcacagccattcgggaggtgtccttgctcaaaaatctcaaacatgcaaatattgttaccctgcatgatctgatccacacagatcgcagcctgacattggtctttgagtaccttgacagtgacctgaagcagtacctcgatcattgtggaaacctcatgtctatgcataatgtaaaaatcttcatgtttcagctcctgagagggttggcatactgtcaccatagaaaaatcctccaccgggatctgaaaccacaaaacttattgatcaatgaaaggggcgagctcaagctcgccgattttgggctggcccgggccaagagcgtgcccaccaagacatattccaacgaagttgttactctttggtatagaccccccgacgtcctcttagggagcacagagtacagtactccaattgacatgtggggggttggttgtatccattacgaaatggctactggaagacctctctttcccggaagtactgtgaaggaagagctgcatttaatttttcgtctgctaggcacccccaccgaagagacctggcccggggttactgccttctctgagttccgcacatattcgttcccctgttacctgccccagcccctcattaaccacgcgccacgcctggatacagatgggatccacctgctaagttccctgctgctttacgaatccaagtctaggatgagcgccgaggctgcgctgagtcactcctatttccgctctctgggagagcgggttcatcaactcgaggatacagcctcgatcttctccttaaaggaaattcaattacagaaggacccggggtatagagggttggcattccagcagccgggacggggaaagaatcggcgacagagtattttttag

SEQ ID NO: 298187 - DNA, 1425 bp, Artificial Sequence
  derived and/or modified sequence
atgattatgaataagatgaagaatttcaaacggaggttttcactgagcgtgccacgaactgagacaattgaagaaagcctggcggagtttacagagcaatttaaccagctgcacaatcgacggaatgagaatttacagctcggtccactgggtcgagaccctccccaggagtgcagtacgttctcacccaccgattctggcgaagaaccgggacagttaagccccggagtgcaatttcagcgtagacagaaccagcggcgcttcagtatggaggatgtttctaagagattgagcctgcccatggatatacgactcccccaggaattcttgcagaagcttcagatggaaagccccgatttaccaaagccgctgtcccggatgtccagacgcgcatctctttcagatattgggttcgggaaactcgagacctacgtgaaattggacaaattgggcgaaggcacatacgccacggtcttcaagggacgctctaagctgacagagaacctcgtggccctgaaggagatccgcctcgagcatgaggaaggcgccccatgtaccgcaatacgggaggtgtcacttcttaaaaacctgaagcatgcgaatatcgtaactctccacgaccttatccatacagacaggagcttgacactggtgttcgaatacctggactcggaccttaaacagtacctggaccattgtgggaatctaatgtctatgcacaacgtcaagatctttatgtttcagctcctgcgcggcctggcgtactgtcaccatcgtaaaattctgcaccgcgacctcaagccccagaaccttttaattaacgagaggggcgagctgaagcttgccgactttggtcttgcaagagccaaatccgtgcctactaagacgtattctaatgaagtcgttaccctctggtaccgcccgcctgatgtgctcttgggaagcactgagtacagtacccccatcgatatgtggggcgtggggtgcattcactacgagatggccactggcaggccactctttcctggtagtaccgtgaaggaagaactccatctgatctttagacttttgggaactccaaccgaagaaacctggcctggggtgacagccttttccgagtttagaacttatagctttccttgttatctgccccaacccctaatcaaccatgccccccgccttgacaccgatggtattcacttgctcagcagtctgctcctgtacgaaagtaagagtcggatgagtgcagaagccgcccttagccacagttactttcggtctctgggcgagcgagtacatcagttggaggatacggccagcatcttctctctaaaagaaatccagctgcaaaaagatcccggatacaggggcctcgccttccaacagccgggcaggggcaagaacagacggcagagcattttctag

SEQ ID NO: 298188 - DNA, 1425 bp, Artificial Sequence
  derived and/or modified sequence
atgatcatgaacaagatgaagaacttcaagaggcgcttcagcctgtctgtgcccaggacagagaccatcgaggagagcctggccgagttcacagagcagttcaaccagctgcacaacagaagaaatgaaaacctgcagctgggccccctgggccgggaccccccccaggagtgcagcaccttcagccccacagacagcggggaggagcccggccagctgagccctggggtgcagttccagaggcggcagaaccagaggcgcttctccatggaggatgtgtccaagaggctgagcctgcccatggacatccggctgccccaggagttcctgcagaagctgcagatggagagcccagacctgcccaagcccctgagcaggatgagcagaagagccagcctgagtgacatcggctttgggaagctggagacctacgtgaagctggacaagctgggggagggcacctacgccaccgtcttcaagggccgcagcaagctgacagagaacctggtggccctgaaggagatccggctggagcacgaggagggcgccccctgcacagccatccgggaggtgtccctgctgaagaacctgaagcacgccaacatcgtgaccctgcatgacctgatccacacagacaggagcctgaccctggtgtttgagtacctggacagcgacctgaagcagtacctggaccactgcggcaacctgatgtccatgcacaacgtgaagatcttcatgttccagctgctgcggggcctggcctactgccaccacaggaagatcctgcaccgggacctgaagccccagaacctgctgatcaatgaaagaggagagctgaagctggccgactttggcctggcccgggccaagtctgtgcccaccaagacctacagcaatgaggtggtgaccctgtggtaccggcccccagatgtgctgctgggcagcacagagtacagcacccccatcgacatgtggggcgtgggctgcatccactatgagatggccaccggccggcccctcttccctggcagcacagtgaaggaggagctgcacctgatcttccggctgctgggcacccccacagaggagacctggccaggagtgacagccttcagcgagttccgcacctacagcttcccctgctacctgccccagcccctcatcaaccacgccccccggctggacacagatggcatccacctgctgagcagcctgctgctgtatgagagcaagagcaggatgtctgctgaggccgccctgagccacagctacttccgcagcctgggggagcgggtgcaccagctggaggacacagccagcatcttcagcctgaaggagatccagctgcagaaggaccccggctaccggggcctggccttccagcagcccggccggggcaagaacagacggcagagcatcttctag

SEQ ID NO: 298189 - DNA, 1425 bp, Artificial Sequence
  derived and/or modified sequence
atgatcatgaacaagatgaagaacttcaagcggcggttcagcctgtcagtgcctagaactgaaacgatcgaggagagtctcgcggagttcacagagcaattcaaccaactccacaaccgccgaaacgagaacctgcagctcgggccactcggtcgggatcccccacaggaatgtagcactttttccccaacagactctggggaggagcccggtcagctctcccccggggttcaatttcagagacgccagaaccagcggcgcttctcgatggaggacgtttctaagaggctaagcctgccaatggacattcgactgcctcaagaattcctacagaaactgcagatggaaagtcctgatcttcccaagccactgtcacggatgtccagaagggcctcattgagtgacatcgggtttggcaagcttgagacctatgtgaagctggacaaattgggggaaggcacctacgcaacggtttttaaaggccggtctaagctcacagagaacctggtagccctgaaggaaatccgtctggaacatgaagaaggggcgccttgcacagccatacgcgaagtatcactactcaaaaatctcaaacacgccaatatcgtgactctgcacgacttaatccatactgaccgctctctcactcttgtgttcgaatatcttgactccgatttaaagcaatatttagatcactgcggaaacttgatgtcaatgcataatgtgaagatcttcatgttccagcttctgcgcggtctggcctactgccaccaccggaagatcctccacagggatctcaaaccccagaacctgcttataaatgagcggggtgaactgaagctggccgacttcggattagccagggccaaatctgtgcccacaaaaacatactctaatgaggtcgtgacgctctggtacaggcctcccgacgtgttgctggggagcacggagtacagtaccccaattgacatgtggggggtggggtgtatccattatgagatggccacaggccgacccttgttcccaggctccaccgttaaggaggaattgcacctgatcttccgactattaggaacaccaaccgaggaaacttggcctggcgtgaccgcattttctgaatttagaacatatagtttcccttgctacctgccccagcctttgattaatcacgctcctcggctcgataccgacggaatccaccttctgtcgagcttgctcctatacgaaagtaagagtaggatgagcgctgaggctgcactgtcacattcatatttccgcagtctgggagagcgtgtccaccagcttgaagacacggcgtccatttttagcctgaaagagatccagctgcaaaaagatcccggctaccgtggtctcgcgtttcagcagccgggccgtggcaaaaatcggcgccagtcaatcttttag

SEQ ID NO: 298190 - DNA, 1425 bp, Artificial Sequence
  derived and/or modified sequence
atgatcatgaacaagatgaagaacttcaagcggcggttcagcctgtctgtgcccagaactgagaccattgaagaatcattggcggaattcaccgagcagtttaaccaactgcataatagaaggaacgagaatcttcagctaggaccactggggagggacccccctcaggaatgttccactttttctccaactgatagtggcgaggagcccggccaactgtctccaggcgtgcagttccagagacgtcagaatcagagacgtttttcaatggaagatgtcagcaagagactctccctgcccatggacatacgccttccccaggagtttttacagaaattacagatggaaagccccgatctgcctaagccacttagtcgcatgtcaagacgcgcatcactaagcgacatcggcttcggaaaacttgagacttatgtgaagcttgataagctgggcgaaggaacctacgccactgtttttaaaggcaggtctaaactcaccgaaaatttggtggccttgaaagagattcgccttgaacacgaggagggggctccctgcaccgcaatcagggaagtctcattgttgaagaacctgaagcacgccaatatagtaaccctccacgacttgatacatactgaccgctcgcttaccctagtgtttgaatacctggacagcgacctgaagcagtacctggaccactgcggtaacctgatgtcgatgcataatgtcaagatttttatgtttcaattgttgcgcgggctcgcatactgtcaccacagaaagatcttgcacagagatctgaagccccagaacttgctcattaacgaacggggggaactcaaattggctgacttcggtcttgctagagcgaagtcagtgcccactaaaacatatagcaacgaggtggtgactctgtggtatagacccccggacgtgctactgggttccaccgagtatagcactcctattgacatgtggggggtagggtgcattcactacgaaatggcaaccggccgccccctctttccaggatctacagtaaaagaggagctgcatctgatcttcaggctgctgggcacccctactgaagaaacatggcccggcgttacagccttctccgaatttcgtacctactctttcccctgctacctacctcagccgctcattaatcacgcccccagacttgataccgatggtattcatctgctgtcctcactcctgctgtacgagagcaagtcacgaatgtcagctgaagccgcactgagtcattcatacttccgctccttgggtgagcgggtccatcaactcgaggacacagctagcattttctccttgaaagagatccagctgcaaaaagaccccggctaccgcgggttggcgttccagcaacccggtcggggcaagaaccgtcgtcagagcatcttctag

SEQ ID NO: 298191 - DNA, 1425 bp, Artificial Sequence
  derived and/or modified sequence
atgattatgaataaaatgaaaaattttaaaaggaggttttctctttctgtgccccgaactgagacgatcgaagaatccttagccgaattcactgagcagtttaaccagttacataaccggcgaaatgaaaacctccagctgggcccactcggaagagaccctccgcaagaatgttccactttttcacccactgattccggtgaagagcccggtcagctatctcccggagttcaatttcagagaagacagaatcaaagacgcttttcaatggaggacgtctcaaaacgactgagcctgcccatggatatcagacttccacaggagttcctgcagaagctgcagatggagtctccagatctacctaaaccactgagtcgtatgtccagacgggctagtctatctgatatcggttttggaaaactggaaacctacgtaaaacttgacaaactgggtgagggtacttacgccactgtctttaagggtcgttcgaagctcacagagaatttagtggctcttaaagagattcggctagaacatgaagagggggctccctgtaccgccattagggaggtctcattgctcaaaaacctcaaacatgctaacattgtaacgctgcatgacctgattcacaccgaccgctctcttacgttggtcttcgagtacctcgactctgacctgaaacagtaccttgaccactgtggaaatctcatgagtatgcataatgtgaaaatatttatgttccaattgctgcggggattggcttactgtcaccacaggaaaattctccacagggacctgaagccccagaacctcctgatcaacgagcggggagaactgaagcttgccgatttcggtctcgccagagctaaaagcgtgccgaccaaaacctacagcaacgaggtggtcacattatggtaccgtccgccagatgtcctcctcgggtctactgaatactctacccccattgacatgtggggcgtcggctgtatccattacgaaatggccacaggcagacccttattccctgggtccaccgtgaaggaagaattacacctgatcttccggttgctgggcaccccaactgaggagacatggcctggggtcacggcgttttctgagtttcggacatacagcttcccctgctatctgccacagcctctcataaaccacgcaccgcgtttagatactgacgggattcacttgctgtcttctctactactgtacgagtctaaaagtcgtatgtctgcagaagctgccctgagtcattcctattttaggagtctaggtgagagggtgcaccagttagaggataccgcgagtatttttagcctcaaagagatccagctccagaaagatcctgggtatcgtggcctggcatttcagcagcctgggaggggtaagaaccggagacagagcatcttttag

SEQ ID NO: 298192 - DNA, 1425 bp, Artificial Sequence
  derived and/or modified sequence
atgataatgaacaagatgaagaatttcaagcgcagattcagtttgtctgtgcccaggacagaaacaattgaggagtcgcttgctgaattcaccgaacagtttaaccaactgcataaccggcgaaatgaaaacctccagttaggccctctggggagggatcctccacaggagtgctccacgttcagtccaaccgactctggggaagaacctggacaacttagccctggtgtccagtttcaaagacggcagaatcagcggagattcagtatggaggacgtcagcaaacgcctcagcctgcccatggacatccgcctaccccaggaattcctccagaaactgcaaatggagtcccccgatctcccaaagcccttgtcacgtatgagccggcgtgcatcactgtctgacatcggattcggaaagctggaaacctacgtgaagctggacaagttaggtgagggtacatacgccaccgtatttaaaggcaggtcaaagctgactgaaaatctcgttgcattgaaggagattagactggaacatgaagagggcgctccctgcactgccatccgggaagtttccctcttaaagaaccttaaacatgcaaacattgtcacccttcatgacttgattcacaccgataggtcactcacccttgtgttcgaatatctggactctgacttgaaacagtaccttgaccactgtggcaacctgatgagtatgcacaacgtgaagatcttcatgtttcagctgcttaggggcttggcttattgtcaccatagaaaaatcctacacagggaccttaagcctcagaaccttctcataaacgaacgcggtgagctgaaactggccgacttcggattggcgagagcaaaaagcgtgcctactaaaacctattccaatgaggtcgtgacgctctggtacaggcccccagatgtcctgctgggctcaacggaatactctacacccatagatatgtggggggtaggctgcattcattatgaaatggctacaggaaggcccctattccctggttctacagtgaaggaggagctgcatctgatatttcgtctgctcggcacacctacagaggagacttggcctggtgtgaccgctttttctgaattccgcacctactctttcccctgttacttaccacagcccttaattaatcacgcgccaagattggatacagacggaatccacctgctgagttcccttttactgtatgagagcaagtcacgcatgtccgccgaggccgctttatctcatagttactttcgctctctgggcgagagagtacaccagctcgaggacactgctagcatcttctcactcaaggagattcagcttcaaaaggatcccggttatcgaggattggctttccagcagcccggtcgcggaaagaaccgtcgacagagcatcttttag

SEQ ID NO: 298193 - protein, 246 aa, Artificial Sequence
  derived and/or modified sequence
MEEAKSQSLEEDFEGQATHTGPKGVINDWRKFKLESQDSDSIPPSKKEILRQMSSPQSRNGKDSKERVSRKMSIQEYELIHKEKEDENCLRKYRRQCMQDMHQKLSFGPRYGFVYELETGKQFLETIEKELKITTIVVHIYEDGIKGCDALNSSLTCLAAEYPIVKFCKIKASNTGAGDRFSLDVLPTLLIYKGGELISNFISVAEQFAEEFFAGDVESFLNEYGLLPEREVHVLEHTKIEEEDVE

SEQ ID NO: 298194 - protein, 194 aa, Artificial Sequence
  derived and/or modified sequence
MSSPQSRNGKDSKERVSRKMSIQEYELIHKEKEDENCLRKYRRQCMQDMHQKLSFGPRYGFVYELETGKQFLETIEKELKITTIVVHIYEDGIKGCDALNSSLTCLAAEYPIVKFCKIKASNTGAGDRFSLDVLPTLLIYKGGELISNFISVAEQFAEEFFAGDVESFLNEYGLLPEREVHVLEHTKIEEEDVE

SEQ ID NO: 298195 - DNA, 741 bp, Artificial Sequence
  derived and/or modified sequence
atggaagaggcgaaatcacagagtctggaagaggactttgaaggtcaagctacgcataccgggcccaaaggggtcattaatgattggagaaagtttaagttagagagccaagactctgactctatccctccctccaaaaaggagattctccggcagatgtcctctcctcaatcccggaacggtaaggattcgaaggagcgagtcagccggaaaatgagcattcaggagtatgagctgattcataaggagaaggaggatgaaaactgtctgaggaaataccggcgccagtgcatgcaagacatgcaccaaaaactgtcttttggccctcgctacggctttgtatacgaactcgagactggaaagcagtttctagaaacgattgaaaaggaactgaaaattacaactatagtggtacacatctatgaagacgggatcaagggatgtgacgctttgaacagttctcttacttgtctcgccgctgagtatccgattgttaagttctgcaagatcaaggccagcaacaccggggccggtgatagattcagtctggatgtcctgcccactcttttgatttataaagggggtgagctgatatctaacttcataagcgttgccgaacagtttgcggaggagttctttgcgggagatgttgagtccttcctcaacgaatacgggcttcttcctgagcgggaggtgcacgtcttggagcacacaaagatagaggaggaagacgtggaatag

SEQ ID NO: 298196 - DNA, 741 bp, Artificial Sequence
  derived and/or modified sequence
atggaagaagcaaaatcgcaatccttagaggaggactttgagggacaggctacccacacagggcctaaaggggttattaatgattggcgcaaattcaagctggagtcccaggacagcgatagcataccgccctctaagaaagagatcttgcgacagatgagttcaccgcaaagcagaaatggcaaggattctaaagaaagagtgagccgaaagatgtctattcaggagtatgagctcattcacaaggagaaggaggacgaaaattgtctgaggaagtatcggcgacaatgtatgcaggatatgcaccagaaactctctttcgggccaagatatgggtttgtgtacgagctggagacggggaagcagttcctggaaactattgagaaagaactgaagattacaactatcgtggtgcatatttacgaagacggaattaaaggctgtgatgcactcaatagctccctgacatgcctcgccgcagaatacccaattgtcaaattttgcaagatcaaagcatccaatactggcgccggcgatcgattttctcttgatgtcctgccaaccctgctgatatacaaaggaggggagctgattagcaattttatttccgttgcagaacagttcgccgaggaattctttgcgggagatgtcgagtcattcctgaacgaatacggcctcctgccggaacgcgaggtgcacgtcctcgagcatactaagatagaagaagaggacgtagagtag

SEQ ID NO: 298197 - DNA, 741 bp, Artificial Sequence
  derived and/or modified sequence
atggaggaggccaagagccagagcctggaggaggactttgagggccaggccacccacacaggccccaagggcgtcatcaatgactggaggaagttcaagctggagagccaggacagcgacagcatcccccccagcaagaaggagatcctgcggcagatgagcagcccccagagcagaaatggcaaggacagcaaggagcgggtgtccaggaagatgagcatccaggagtatgagctgatccacaaggagaaggaggatgagaactgcctgaggaagtaccgccggcagtgcatgcaggacatgcaccagaagctgagctttggccccaggtatggctttgtgtatgagctggagaccgggaagcagttcctggagaccatcgagaaggagctgaagatcaccaccatcgtggtgcacatctatgaagatggcatcaagggctgtgatgccctgaacagcagcctgacctgcctggccgctgagtaccccatcgtgaagttctgcaagatcaaggccagcaacacaggagctggggaccgcttcagcctggatgtgctgcccaccctgctgatctacaagggcggggagctgatcagcaacttcatctctgtggccgagcagtttgctgaggagttctttgctggagatgtggagagcttcctgaatgaatatggcctgctgcctgagcgggaggtgcacgtgctggagcacaccaagattgaggaggaggatgtggagtag

SEQ ID NO: 298198 - DNA, 741 bp, Artificial Sequence
  derived and/or modified sequence
atggaggaggccaagagccagagcctggaggaggacttcgagggccaggcaacgcacactgggcctaaaggggtgataaatgattggcgaaagttcaaacttgagagccaggactctgattccatccccccctccaaaaaggagatcctccgacagatgtcaagtccacagagcaggaatggcaaagactctaaggagcgcgtatccaggaaaatgtcaatccaggaatatgagctgatccataaggagaaggaggatgagaattgcctgaggaagtaccggcggcagtgtatgcaggatatgcatcagaagctcagctttggccctcggtacgggttcgtgtacgagctcgagaccggcaagcaattcctggaaaccatagaaaaggagctcaagattacaacaatcgtcgttcacatctacgaagacggtatcaagggctgtgacgctttgaactccagcctgacctgtcttgccgccgagtatcccatcgtgaagttttgtaaaatcaaggctagtaacaccggcgccggggacaggttctccctcgacgtactacccacccttttgatttacaagggtggggagttgatttccaattttatctcggtggctgagcagttcgccgaagaattctttgccggggatgtggagtcctttctgaacgaatatgggctactgcctgagcgcgaagtgcacgtcctcgaacacaccaaaatcgaagaggaggacgttgaatag

SEQ ID NO: 298199 - DNA, 741 bp, Artificial Sequence
  derived and/or modified sequence
atggaggaggccaagagccagagcctggaggaggacttcgagggccaggccactcacactgggcccaaaggggtgataaatgactggcgtaagtttaagctggaaagtcaggactccgattcgataccacccagtaaaaaggagattctacgccagatgtctagtccgcagtcccggaacggcaaggattctaaagagagagtgtctcggaagatgtctattcaggagtatgaactaatacataaagagaaagaagacgagaactgtctccggaagtaccggcgacagtgcatgcaggatatgcaccagaagctgtcctttggcccccgctacgggttcgtttatgaactggaaacagggaaacaatttcttgaaacaatcgaaaaggagttaaaaatcacaactattgtagttcacatctatgaggacgggataaagggatgtgatgccctcaacagcagcctgacttgcctagccgcggagtaccctattgtgaagttttgtaagatcaaagcctccaatacaggagccggggatagattctctttagatgttttgcctacgctcctgatctacaaagggggagaactgatcagcaactttatctcggtggccgaacagtttgctgaagaattttttgctggagatgtggaatcattcctgaacgagtacggcctgcttccagagagagaagtgcatgtattagagcatacgaaaatagaagaggaagacgtcgaatag

SEQ ID NO: 298200 - DNA, 741 bp, Artificial Sequence
  derived and/or modified sequence
atggaagaagccaaaagccaaagtttggaggaagactttgaaggacaggccacacatacaggacccaaaggagtaataaatgattggagaaagtttaaattagagagtcaagacagtgattcaattccacctagcaagaaggagattctcaggcaaatgtcttctcctcagagtaggaatggcaaagattcaaaggaacgagtcagcagaaagatgagcattcaagaatatgaactaatccataaagagaaagaggatgaaaactgccttcgtaaataccgtagacagtgtatgcaggatatgcaccagaagctgagttttgggcctagatatgggtttgtgtatgagctggaaactggaaagcaattcctagaaacaattgaaaaggaactgaagatcaccacaattgttgttcacatttatgaagatggtattaagggttgtgatgctctaaacagtagtttaacatgccttgcagcagaataccctatagttaagttttgtaaaataaaagcttcgaatacaggtgctggggaccgcttttccttagatgtacttcctacactgctcatctataaaggtggggaactcataagcaattttattagtgttgctgaacagtttgctgaagaattttttgctggggatgtggagtctttcctaaatgaatatgggttactacctgaaagagaggtacatgtcctagagcataccaaaatagaagaagaagatgttgaatga

SEQ ID NO: 298201 - DNA, 1242 bp, Artificial Sequence
  derived and/or modified sequence
acgagttcagtagacagggattctcacccactcaacaaggacaccaggcacagagatccaaactattatatcaaatccagtccctaaaatggaagaagccaaaagccaaagtttggaggaagactttgaaggacaggccacacatacaggacccaaaggagtaataaatgattggagaaagtttaaattagagagtcaagacagtgattcaattccacctagcaagaaggagattctcaggcaaatgtcttctcctcagagtaggaatggcaaagattcaaaggaacgagtcagcagaaagatgagcattcaagaatatgaactaatccataaagagaaagaggatgaaaactgccttcgtaaataccgtagacagtgtatgcaggatatgcaccagaagctgagttttgggcctagatatgggtttgtgtatgagctggaaactggaaagcaattcctagaaacaattgaaaaggaactgaagatcaccacaattgttgttcacatttatgaagatggtattaagggttgtgatgctctaaacagtagtttaacatgccttgcagcagaataccctatagttaagttttgtaaaataaaagcttcgaatacaggtgctggggaccgcttttccttagatgtacttcctacactgctcatctataaaggtggggaactcataagcaattttattagtgttgctgaacagtttgctgaagaattttttgctggggatgtggagtctttcctaaatgaatatgggttactacctgaaagagaggtacatgtcctagagcataccaaaatagaagaagaagatgttgaatgaagattcactatgtcaatatctcatgtttatcctttaggtattggatgatggttttggtagtatctatattgctttagtgaacacagagtatgggcacggctatgctaacttgacaaaaatgactgatgcaacaatcgagttattagcatttcttagtattagttactcaaattgatacaatgcttgactacaaaacagagctgtcttcagcaacattattagtagacaaagaggatgtggataatattatgacatttttcaaaaatccctttcaagttatgttttgtcttttttactccattttccctcatcactgttattatttggacttttcaaattacattattcattataattttctttgtgtaataaaaatgaaatctcatgagaaaataaattttctatttgaagtc

SEQ ID NO: 298202 - DNA, 699 bp, Artificial Sequence
  derived and/or modified sequence
gcaagaaggagattctcaggcaaatgtcttctcctcagagtaggaatggcaaagattcaaaggaacgagtcagcagaaagatgagcattcaagaatatgaactaatccataaagagaaagaggatgaaaactgccttcgtaaataccgtagacagtgtatgcaggatatgcaccagaagctgagttttgggcctagatatgggtttgtgtatgagctggaaactggaaagcaattcctagaaacaattgaaaaggaactgaagatcaccacaattgttgttcacatttatgaagatggtattaagggttgtgatgctctaaacagtagtttaacatgccttgcagcagaataccctatagttaagttttgtaaaataaaagcttcgaatacaggtgctggggaccgcttttccttagatgtacttcctacactgctcatctataaaggtggggaactcataagcaattttattagtgttgctgaacagtttgctgaagaattttttgctggggatgtggagtctttcctaaatgaatatgggttactacctgaaagagaggtacatgtcctagagcataccaaaatagaagaagaagatgttgaatgaagattcactatgtcaatatctcatgtttatcctttaggtattggatgatggttttggtagtatctatattgctttagtgaacacagagtat

SEQ ID NO: 298203 - DNA, 1174 bp, Artificial Sequence
  derived and/or modified sequence
aaatgtgtggagatttattttataatagcaatgtgaggaataccttcctaattatgacaaaaacaaaaacaacaacaaaaagaccattgaagaaaaggacccaaaggagtaataaatgattggagaaagtttaaattagagagtcaagacagtgattcaattccacctagcaagaaggagattctcaggcaaatgtcttctcctcagagtaggaatggcaaagattcaaaggaacgagtcagcagaaagatgagcattcaagaatatgaactaatccataaagagaaagaggatgaaaactgccttcgtaaataccgtagacagtgtatgcaggatatgcaccagaagctgagttttgggcctagatatgggtttgtgtatgagctggaaactggaaagcaattcctagaaacaattgaaaaggaactgaagatcaccacaattgttgttcacatttatgaagatggtattaagggttgtgatgctctaaacagtagtttaacatgccttgcagcagaataccctatagttaagttttgtaaaataaaagcttcgaatacaggtgctggggaccgcttttccttagatgtacttcctacactgctcatctataaaggtggggaactcataagcaattttattagtgttgctgaacagtttgctgaagaattttttgctggggatgtggagtctttcctaaatgaatatgggttactacctgaaagagaggtacatgtcctagagcataccaaaatagaagaagaagatgttgaatgaagattcactatgtcaatatctcatgtttatcctttaggtattggatgatggttttggtagtatctatattgctttagtgaacacagagtatgggcacggctatgctaacttgacaaaaatgactgatgcaacaatcgagttattagcatttcttagtattagttactcaaattgatacaatgcttgactacaaaacagagctgtcttcagcaacattattagtagacaaagaggatgtggataatattatgacatttttcaaaaatccctttcaagttatgttttgtcttttttactccattttccctcatcactgttattatttggacttttcaaattacattattcattataattttctttgtgtaataaaaatgaaatctcatgagaaaataaa

SEQ ID NO: 298204 - DNA, 741 bp, Artificial Sequence
  derived and/or modified sequence
atggaagaagccaagtcccaatctttagaggaggattttgaaggtcaggcaactcatacaggccctaagggggtcatcaacgactggagaaagttcaagctggagtcccaggactcagattccattcctcccagcaagaaggagatcctgaggcaaatgtcatcaccccagtcccggaacggtaaagactcaaaggaacgtgtttctcggaaaatgagtatccaggagtacgaacttatccataaggaaaaagaagacgaaaactgtctgcggaaatatagaagacagtgtatgcaggatatgcatcagaagctctctttcgggccacgctacgggtttgtgtatgaactggagacagggaaacaattcttggagaccattgagaaggaattgaagatcactactatagtggtccacatctacgaagatggtattaagggctgcgacgcactgaattcaagtctcacctgcctggcagctgaatacccaatagtcaagttttgtaaaatcaaagcttcaaacacaggtgcgggagatcgcttctccttggatgtgctacctactttgttgatttataaggggggagagctcatcagtaactttatcagcgtggcagagcagttcgccgaggagttttttgccggtgacgtggagtcctttctcaacgagtatggcttgctgccggagcgagaggtgcatgtgttggagcatactaaaatagaagaagaagatgtggagtag

SEQ ID NO: 298205 - DNA, 741 bp, Artificial Sequence
  derived and/or modified sequence
atggaggaggccaaaagtcagtccctggaggaagacttcgaaggccaggcgacacacaccggtccgaaaggggtgatcaacgattggcgcaagtttaagctggaatcccaggactccgattccattcccccatctaaaaaagaaatcctgaggcagatgtctagcccacagagccgaaacggcaaagattctaaggagcgggtctcaaggaagatgtccatccaagaatacgaactcattcacaaagaaaaggaggatgaaaactgtctgcggaaatatcgtagacagtgtatgcaagacatgcaccagaaattatccttcggccctaggtacggtttcgtgtacgagctggagaccggaaaacaatttctggagactattgagaaagagctgaaaattacaacaatcgttgtacatatttacgaggacgggattaaaggctgcgatgcattaaattcaagcctaacctgtctggccgctgaatacccaatcgtgaaattctgtaagatcaaggctagtaacacaggagccggagataggttttccctagatgttttgccgactctcctgatttacaaaggcggtgagctgatctcaaattttatctcggtggccgaacaattcgctgaggagttcttcgcaggtgacgttgagagcttcctaaacgaatatggcctgctcccggaaagggaagtgcacgtgttagagcacactaagatagaggaggaggacgttgagtag

SEQ ID NO: 298206 - DNA, 741 bp, Artificial Sequence
  derived and/or modified sequence
atggaggaggccaagagccagagcctggaggaggacttcgagggccaggccacccacaccggccccaagggcgtgatcaacgactggagaaagttcaagctggagagccaggacagcgacagcatcccccccagcaagaaggagatcctgagacagatgagcagcccccagagcagaaacggcaaggacagcaaggagagagtgagcagaaagatgagcatccaggagtacgagctgatccacaaggagaaggaggacgagaactgcctgagaaagtacagaagacagtgcatgcaggacatgcaccagaagctgagcttcggccccagatacggcttcgtgtacgagctggagaccggcaagcagttcctggagaccatcgagaaggagctgaagatcaccaccatcgtggtgcacatctacgaggacggcatcaagggctgcgacgccctgaacagcagcctgacctgcctggccgccgagtaccccatcgtgaagttctgcaagatcaaggccagcaacaccggcgccggcgacagattcagcctggacgtgctgcccaccctgctgatctacaagggcggcgagctgatcagcaacttcatcagcgtggccgagcagttcgccgaggagttcttcgccggcgacgtggagagcttcctgaacgagtacggcctgctgcccgagagagaggtgcacgtgctggagcacaccaagatcgaggaggaggacgtggagtag

SEQ ID NO: 298207 - DNA, 1107 bp, Artificial Sequence
  derived and/or modified sequence
gccagaggcggcagcggcagatgcgtggccagagccatgaccggcaacgccggcgagtggtgcctgatggagagcgaccccggcgtgttcaccgagctgatcaagggcttcggctgcagaggcgcccaggtggaggagatctggagcctggagcccgagaacttcgagaagctgaagcccgtgcacggcctgatcttcctgttcaagtggcagcccggcgaggagcccgccggcagcgtggtgcaggacagcagactggacaccatcttcttcgccaagcaggtgatcaacaacgcctgcgccacccaggccatcgtgagcgtgctgctgaactgcacccaccaggacgtgcacctgggcgagaccctgagcgagttcaaggagttcagccagagcttcgacgccgccatgaagggcctggccctgagcaacagcgacgtgatcagacaggtgcacaacagcttcgccagacagcagatgttcgagttcgacaccaagaccagcgccaaggaggaggacgccttccacttcgtgagctacgtgcccgtgaacggcagactgtacgagctggacggcctgagagagggccccatcgacctgggcgcctgcaaccaggacgactggatcagcgccgtgagacccgtgatcgagaagagaatccagaaggacggcttcagcccctgctgccccggctggagccagacccccgagctgaagcccagcgcctgcctggacctgcccaagtggtacagcgagggcgagatcagattcaacctgatggccatcgtgagcgacagaaagatgatctacgagcagaagatcgccgagctgcagagacagctggccgaggaggagcccatggacaccgaccagggcaacagcatgctgagcgccatccagagcgaggtggccaagaaccagatgctgatcgaggaggaggtgcagaagctgaagagatacaagatcgagaacatcagaagaaagcacaactacctgcccttcatcatggagctgctgaagaccctggccgagcaccagcagctgatccccctggtggagaaggccaaggagaagcagaacgccaagaaggcccaggagaccaagtag

SEQ ID NO: 298208 - DNA, 1107 bp, Artificial Sequence
  derived and/or modified sequence
gccagaggcggttctgggagatgcgtcgcccgcgcaatgactggaaacgctggcgagtggtgcctgatggagagcgaccccggggttttcacagaattgattaaaggatttggctgcaggggcgcgcaggtggaagagatctggtctctggaacccgagaacttcgaaaagctaaaacccgtgcacgggctgatctttctttttaagtggcagcctggagaagagccagctgggagcgtggtccaagactctagacttgataccatttttttcgctaaacaagtcattaataacgcgtgtgcgactcaggctatcgtcagcgtgctccttaattgcactcatcaggacgtgcacctaggcgagactctctctgagttcaaagagttttcccagtccttcgatgccgcaatgaaaggactcgctctctctaatagcgacgtcatcaggcaggtacataacagcttcgcccgccagcagatgttcgagttcgacacaaagacgagcgcgaaagaagaagacgccttccattttgtgtcctatgtccccgtgaacggccgcttgtatgagttagacggtttgagggagggaccaatcgacctgggtgcctgtaaccaagatgactggattagtgccgtgagacccgtgatcgagaaaaggatccagaaggatgggttctctccatgttgtcccggttggtcccagacccctgagctgaagccaagcgcatgtctggatttgcccaaatggtatagcgagggcgagattaggtttaatttaatggcaatcgtgtcagaccggaaaatgatatatgaacagaaaattgctgagcttcagaggcagctggcagaagaggagcctatggacactgaccagggaaattctatgctttctgccatccagagtgaggtagctaagaatcaaatgctcattgaagaggaagtgcaaaagcttaaaagatacaagattgaaaacatccggcgtaagcacaactatctgcccttcatcatggaactccttaagaccctggctgagcaccagcagctgattcccctggtggagaaggccaaggaaaaacagaatgccaagaaggcccaggaaacaaaatag

SEQ ID NO: 298209 - DNA, 1107 bp, Artificial Sequence
  derived and/or modified sequence
gcccggggcggcagcggccgctgtgtggcccgggccatgactggaaatgctggggagtggtgcctgatggagagtgaccccggggtcttcacagagctgatcaagggcttcggctgccgcggggcccaggtggaggagatctggagcctggagccagaaaattttgagaagctgaagcctgtgcacggcctcatcttcctgttcaagtggcagcccggggaggagcctgctggctctgtggtgcaggacagccggctggacaccatcttctttgccaagcaggtgatcaacaatgcctgtgccacccaggccatcgtgtctgtgctgctgaactgcacccaccaggatgtgcacctgggggagaccctgtctgagttcaaggagttcagccagagctttgatgctgccatgaagggcctggccctgagcaacagtgatgtgatccggcaggtgcacaacagctttgcccggcagcagatgtttgaatttgacaccaagaccagcgccaaggaggaggatgccttccactttgtgtcctatgtgcctgtgaatggccgcctgtatgagctggatggcctgcgggagggccccatcgacctgggcgcctgcaaccaggatgactggatctctgctgtgcggcctgtgattgagaagaggatccagaaggatggcttcagcccctgctgccccggctggagccagaccccagagctgaagcccagcgcctgcctggacctgcccaagtggtacagcgagggggagatccgcttcaacctgatggccatcgtgtctgacaggaagatgatctatgagcagaagattgctgagctgcagaggcagctggccgaggaggagcccatggacacagaccagggcaacagcatgctgagcgccatccagagcgaggtggccaagaaccagatgctgattgaggaggaggtgcagaagctgaagcgctacaagattgagaacatccggaggaagcacaactacctgcccttcatcatggagctgctgaagaccctggccgagcaccagcagctgatccccctggtggagaaggccaaggagaagcagaatgccaagaaggcccaggagaccaagtag

SEQ ID NO: 298210 - DNA, 1107 bp, Artificial Sequence
  derived and/or modified sequence
gcccggggcggcagcggccggtgcgtggcccgggccatgaccggcaatgccggcgaatggtgccttatggagagcgatcctggcgtttttacagagctgatcaagggttttggctgtcgtggcgcccaggtggaagagatctggtctctcgagccggaaaatttcgagaagcttaaacccgtgcacgggctcatcttcttgtttaagtggcagcccggggaggagcccgccggtagcgtagtgcaagattccaggttggacaccatcttctttgccaagcaggtcatcaataatgcctgcgccacccaggctatcgtgtctgtgctcctgaattgtacccaccaggatgtgcatcttggcgaaacactctctgagtttaaggagttcagccagtctttcgatgctgctatgaaagggttggccctttccaatagtgatgtaattagacaggtgcataatagctttgctaggcaacagatgttcgagtttgataccaagaccagcgccaaggaggaagatgccttccacttcgtgtcatacgttcccgtgaacggacgcttgtatgaactcgacggcctgagggaaggacccatcgatctgggtgcttgcaatcaagatgattggatctcggcagtaaggcccgtgatcgagaagcgcatccaaaaagatggcttttccccctgttgtcctggctggagtcagacccctgagctcaagccttcagcttgtttagatttacccaaatggtactcagaaggagaaatccggtttaatctcatggccatcgtgagcgaccgcaagatgatttacgaacaaaaaatcgccgagcttcagcgccagctcgcggaggaagagccgatggacaccgatcaaggcaacagtatgctctccgcgatacaaagtgaggtcgcaaaaaatcagatgctcattgaagaagaagttcagaagctaaagcgctacaaaatcgaaaacattcgaagaaagcataattaccttcccttcatcatggaactcctgaagactcttgccgaacaccagcaactgatccccctggttgagaaagcgaaggaaaagcaaaacgctaagaaagcacaggaaacaaagtag

SEQ ID NO: 298211 - DNA, 1107 bp, Artificial Sequence
  derived and/or modified sequence
gcacggggagggtccgggaggtgcgtggcgagagctatgactgggaacgctggagagtggtgcctcatggagtccgaccccggtgtcttcacagaactcattaagggttttgggtgtcggggagcacaggtcgaagagatttggagcctcgaaccggagaattttgaaaaattaaagccagtccatggcctcattttccttttcaaatggcagcccggtgaggagcctgctgggtccgtcgttcaggacagccgattagatactatcttctttgccaaacaggttatcaataacgcatgtgcaacacaagcgattgtcagtgtgctgttgaactgcacacaccaagacgtgcatctaggagagacactgagtgagttcaaggagttttctcagtctttcgatgctgcaatgaaaggcctggccctgtctaattctgatgtaatcagacaggtgcataactccttcgcacgacagcagatgtttgagtttgatactaagacaagtgccaaggaggaagatgccttccactttgtgtcttatgttcctgtcaacggtagactgtatgaacttgacggcctccgtgagggcccaatcgacctcggggcatgcaatcaagatgattggatcagcgccgtcagacctgtgatcgaaaagcggatccagaaagatgggttcagcccgtgttgtcctggctggagccaaacacctgaactcaaacctagcgcctgtctggacctcccaaaatggtactcggagggtgagatacggttcaatctgatggcaatcgtgtcggacaggaagatgatttacgagcagaagatagccgagctccaaagacagctggcagaagaggaacccatggacaccgaccagggtaattcgatgctcagtgccatccagagcgaagtcgccaagaaccagatgctgatcgaggaggaagtgcaaaagctgaagaggtacaagatagagaatataaggcgtaagcataactatctccccttcatcatggagctccttaagaccctcgccgagcaccaacagcttatccctctggtcgagaaagccaaggaaaagcaaaatgccaagaaagctcaggagaccaagtag

SEQ ID NO: 298212 - DNA, 1355 bp, Artificial Sequence
  derived and/or modified sequence
gcgagaggtggatcggggcggtgtgtggccagggccatgacgggcaatgccggggagtggtgcctcatggaaagcgaccccggggtcttcaccgagctcattaaaggattcggttgccgaggagcccaagtagaagaaatatggagtttagagcctgagaattttgaaaaattaaagccagttcatgggttaatttttcttttcaagtggcagccaggagaagaaccagcaggctctgtggttcaggactcccgacttgacacgatattttttgctaagcaggtaattaataatgcttgtgctactcaagccatagtgagtgtgttactgaactgtacccaccaggatgtccatttaggcgagacattatcagagtttaaagaattttcacaaagttttgatgcagctatgaaaggcttggcactgagcaattcagatgtgattcgacaagtacacaacagtttcgccagacagcaaatgtttgaatttgatacgaagacatcagcaaaagaagaagatgcttttcactttgtcagttatgttcctgttaatgggagactgtatgaattagatggattaagagaaggaccgattgatttaggtgcatgcaatcaagatgattggatcagtgcagtaaggcctgtcatagaaaaaaggatacaaaaagacgggttttcaccatgttgcccaggctggtctcagactcctgagctcaagccatccgcctgcctcgacctcccaaagtggtacagtgaaggtgaaattcgatttaatttaatggccattgtgtctgacagaaaaatgatatatgagcagaagatagcagagttacaaagacaacttgcagaggaggaacccatggatacagatcaaggtaatagtatgttaagtgctattcagtcagaagttgccaaaaatcagatgcttattgaagaagaagtacagaaattaaaaagatacaagattgagaatatcagaaggaagcataattatctgcctttcattatggaattgttaaagactttagcagaacaccagcagttaataccactagtagaaaaggcaaaagaaaaacagaacgcaaagaaagctcaggaaaccaaatgaagatgttttcagatatgtacacatttctgcttctgcacatattttcatggaaaccattatgtataaagaacttagagcaacatcctaattggctcagtgcacgtttggcaatagtgccagcctgtcttgtctttaatgcatggattcataaacttcttccctacctgcatcatgtgcatgtagtgcatattaaatgaaagtgatattaagaatgctttcccaaattccattatttgacattgagtctg

SEQ ID NO: 298213 - protein, 99 aa, Artificial Sequence
  derived and/or modified sequence
  misc_feature (1)..(1): Xaa can be any naturally occurring amino acid
XNLMAIVSDRKMIYEQKIAELQRQLAEEPMDTDQGNSMLSAIQSEVAKNQMLIEEEVQKLKRYKIENIRRKHNYLPFIMELLKTLAEHQQLIPLVEKIF

SEQ ID NO: 298214 - DNA, 1068 bp, Artificial Sequence
  derived and/or modified sequence
atgaccggcaacgccggcgagtggtgcctgatggagagcgaccccggcgtgttcaccgagctgatcaagggcttcggctgcagaggcgcccaggtggaggagatctggagcctggagcccgagaacttcgagaagctgaagcccgtgcacggcctgatcttcctgttcaagtggcagcccggcgaggagcccgccggcagcgtggtgcaggacagcagactggacaccatcttcttcgccaagcaggtgatcaacaacgcctgcgccacccaggccatcgtgagcgtgctgctgaactgcacccaccaggacgtgcacctgggcgagaccctgagcgagttcaaggagttcagccagagcttcgacgccgccatgaagggcctggccctgagcaacagcgacgtgatcagacaggtgcacaacagcttcgccagacagcagatgttcgagttcgacaccaagaccagcgccaaggaggaggacgccttccacttcgtgagctacgtgcccgtgaacggcagactgtacgagctggacggcctgagagagggccccatcgacctgggcgcctgcaaccaggacgactggatcagcgccgtgagacccgtgatcgagaagagaatccagaaggacggcttcagcccctgctgccccggctggagccagacccccgagctgaagcccagcgcctgcctggacctgcccaagtggtacagcgagggcgagatcagattcaacctgatggccatcgtgagcgacagaaagatgatctacgagcagaagatcgccgagctgcagagacagctggccgaggagcccatggacaccgaccagggcaacagcatgctgagcgccatccagagcgaggtggccaagaaccagatgctgatcgaggaggaggtgcagaagctgaagagatacaagatcgagaacatcagaagaaagcacaactacctgcccttcatcatggagctgctgaagaccctggccgagcaccagcagctgatccccctggtggagaaggccaaggagaagcagaacgccaagaaggcccaggagaccaagtag

SEQ ID NO: 298215 - DNA, 300 bp, Artificial Sequence
  derived and/or modified sequence
tgaaacctgatggccatcgtgagcgacagaaagatgatctacgagcagaagatcgccgagctgcagagacagctggccgaggagcccatggacaccgaccagggcaacagcatgctgagcgccatccagagcgaggtggccaagaaccagatgctgatcgaggaggaggtgcagaagctgaagagatacaagatcgagaacatcagaagaaagcacaactacctgcccttcatcatggagctgctgaagaccctggccgagcaccagcagctgatccccctggtggagaagatcttctag

SEQ ID NO: 298216 - DNA, 1068 bp, Artificial Sequence
  derived and/or modified sequence
atgacaggaaatgccggagagtggtgtttgatggaaagtgatcccggagtgttcaccgaattaattaaaggttttggctgtcgcggcgcccaagttgaagagatctggtccctggagccagagaattttgagaagttgaaaccggtgcacggtcttatatttctgtttaagtggcagccaggagaagagcctgccggctcagtcgtgcaggacagccgcttggatacaattttctttgcaaagcaagtcatcaataacgcctgcgctacacaggccattgtatcagttctgctgaattgcacccatcaggatgtccacttaggagaaacactgtcggagtttaaggagttcagtcagtcgttcgacgctgcgatgaaaggcctggccctatctaattcagacgttatccgacaggtacacaattcgtttgcccgtcaacaaatgttcgagtttgataccaagacgtctgcaaaggaggaggacgcttttcactttgtgagttacgtgcccgtcaacggcagactgtacgagttggatggcctacgcgaaggacccatcgacctgggggcttgcaaccaggatgactggatttctgctgtgcgaccagtgattgaaaaacgaatccaaaaggatggattctcaccttgttgtccaggatggagtcagacacccgaactgaaaccaagcgcgtgcctcgacttacctaaatggtacagtgaaggcgagattcgatttaacctaatggccatagtgagcgataggaaaatgatatacgagcagaagatcgctgagctccaaaggcagctcgctgaagaaccaatggacactgaccagggcaattctatgctgtccgcgattcaatccgaggtcgcgaagaaccagatgcttattgaggaagaggtgcagaagctgaagcgttataagattgagaatatccgaagaaaacacaattacctgccgttcatcatggagctcctaaagactctggcggagcatcagcagctcattcccctggtcgagaaagcaaaagagaagcagaatgcgaagaaggctcaggagaccaaatag

SEQ ID NO: 298217 - DNA, 300 bp, Artificial Sequence
  derived and/or modified sequence
tgaaacctgatggctatcgtgtctgacaggaagatgatctatgagcagaagatcgcggagctccagagacagctggccgaagagcctatggatactgaccagggaaactccatgctgagcgcgatccaaagcgaagtcgcaaagaaccagatgctgattgaagaagaggtacagaagttaaaacgctacaagattgaaaacatccggaggaagcataattaccttccctttataatggaactcttgaagaccctagcagaacatcagcaactcatcccactggtagagaagattttctag

SEQ ID NO: 298218 - DNA, 1068 bp, Artificial Sequence
  derived and/or modified sequence
atgactggaaatgctggggagtggtgcctgatggagagtgaccccggggtcttcacagagctgatcaagggcttcggctgccgcggggcccaggtggaggagatctggagcctggagccagaaaattttgagaagctgaagcctgtgcacggcctcatcttcctgttcaagtggcagcccggggaggagcctgctggctctgtggtgcaggacagccggctggacaccatcttctttgccaagcaggtgatcaacaatgcctgtgccacccaggccatcgtgtctgtgctgctgaactgcacccaccaggatgtgcacctgggggagaccctgtctgagttcaaggagttcagccagagctttgatgctgccatgaagggcctggccctgagcaacagtgatgtgatccggcaggtgcacaacagctttgcccggcagcagatgtttgaatttgacaccaagaccagcgccaaggaggaggatgccttccactttgtgtcctatgtgcctgtgaatggccgcctgtatgagctggatggcctgcgggagggccccatcgacctgggcgcctgcaaccaggatgactggatctctgctgtgcggcctgtgattgagaagaggatccagaaggatggcttcagcccctgctgccccggctggagccagaccccagagctgaagcccagcgcctgcctggacctgcccaagtggtacagcgagggggagatccgcttcaacctgatggccatcgtgtctgacaggaagatgatctatgagcagaagattgctgagctgcagaggcagctggccgaggagcccatggacacagaccagggcaacagcatgctgagcgccatccagagcgaggtggccaagaaccagatgctgattgaggaggaggtgcagaagctgaagcgctacaagattgagaacatccggaggaagcacaactacctgcccttcatcatggagctgctgaagaccctggccgagcaccagcagctgatccccctggtggagaaggccaaggagaagcagaatgccaagaaggcccaggagaccaagtag

SEQ ID NO: 298219 - DNA, 300 bp, Artificial Sequence
  derived and/or modified sequence
tgaaacctgatggccatcgtgtctgacaggaagatgatctatgagcagaagattgctgagctgcagaggcagctggccgaggagcccatggacacagaccagggcaacagcatgctgagcgccatccagagcgaggtggccaagaaccagatgctgattgaggaggaggtgcagaagctgaagcgctacaagattgagaacatccggaggaagcacaactacctgcccttcatcatggagctgctgaagaccctggccgagcaccagcagctgatccccctggtggagaagatcttctag

SEQ ID NO: 298220 - DNA, 1068 bp, Artificial Sequence
  derived and/or modified sequence
atgaccggcaacgccggcgagtggtgcctgatggagagcgaccccggggtatttactgagcttatcaaaggctttggttgtcgtggtgcacaggtagaggaaatttggtcactggaaccagagaacttcgagaaactgaagcccgtccacggcctgatctttctgttcaagtggcaacctggtgaagaacctgccggctcagttgttcaggatagtcgattggatacaattttcttcgcaaagcaggtcatcaacaacgcttgcgccactcaggccattgtgtcagtgctgctcaactgcacgcatcaagatgtccatcttggggagacccttagtgagtttaaggaatttagccaatcatttgacgctgctatgaaggggctggcccttagcaattctgatgtgatcaggcaagtccataattcattcgcccgtcagcagatgtttgaatttgatacaaagaccagcgccaaggaagaagacgcatttcacttcgtatcttacgttcctgttaatggccgtctctatgagcttgacggtctgcgcgagggcccaatcgatctcggtgcctgcaaccaagatgactggattagcgcagtgcgtcctgttatcgaaaaaaggatccaaaaagacggcttctcaccatgttgtccaggttggagccagaccccggagctgaaaccttcggcgtgtctagatctgccaaagtggtactcagagggcgaaatccgcttcaacctgatggccattgtgtcggaccgcaagatgatttacgagcaaaagatcgccgaactgcagcggcagcttgccgaggagcccatggacaccgaccaaggaaacagtatgctgagcgcgattcagtccgaggtggcaaaaaatcagatgttgatagaggaagaagttcagaagctgaagaggtacaaaatcgaaaatatccgacgcaaacacaactacttaccctttattatggagctgctgaaaacactcgcggaacaccagcagctcatccctctggtggagaaagcgaaagaaaagcagaacgccaagaaggcccaggagaccaagtag

SEQ ID NO: 298221 - DNA, 300 bp, Artificial Sequence
  derived and/or modified sequence
tgaaacctgatggccatcgtgagcgaccggaagatgatctacgagcagaagatcgcagagcttcaacgacaactcgctgaggagccaatggacacagatcagggcaactcaatgttgtcagccatccaatccgaggtggccaaaaatcagatgctgattgaggaggaggtacagaagctgaagcggtataaaattgagaacatccgcagaaagcacaattacctgccgttcattatggagcttctgaagaccctggctgagcaccagcagctgattcctctggttgaaaaaattttctag

SEQ ID NO: 298222 - DNA, 1068 bp, Artificial Sequence
  derived and/or modified sequence
atgacaggcaatgccggagagtggtgcctgatggagtctgatcctggagttttcaccgagttgattaaagggttcggatgccggggtgctcaggtcgaagagatttggtcgcttgagccagaaaacttcgagaagcttaagcccgttcacggtctcatatttctgttcaaatggcagccaggggaggaaccggcaggatcagttgtgcaagactcacgattagataccattttcttcgcgaagcaggtgatcaataatgcatgtgccacccaagccatcgtgtccgtcttgctcaattgcacacatcaggacgtgcatctcggggagaccctgtcagaatttaaggaattctcccaatctttcgacgccgcaatgaagggcctcgctttgagcaatagtgatgtgataaggcaagtacacaattcttttgctcgacaacagatgtttgaatttgacacaaagacatccgcaaaagaggaggacgcctttcacttcgtgtcgtacgtaccagtcaatggcaggctatatgagctcgatgggcttagagaagggccaatcgatctaggcgcttgtaatcaggacgactggatatcagctgtgaggcctgtgatcgagaagcgcattcagaaagatgggttttctccctgctgtccaggctggtctcaaaccccagagctgaagccctctgcttgtctggatctgccaaaatggtattccgaaggcgaaataagatttaacctcatggccattgtgagcgacaggaagatgatatatgagcagaaaattgcagaactacagaggcagcttgccgaagagccaatggataccgaccagggtaacagcatgctgtcagcaattcagtccgaagtggctaagaaccaaatgctgatcgaggaggaagtacaaaagttgaagagatacaagattgaaaacatccgccgtaaacacaactatctccccttcatcatggagctgctcaagaccctagcagaacaccagcagctcatcccacttgtcgaaaaggccaaagagaaacagaatgccaagaaggcacaggaaaccaaatag

SEQ ID NO: 298223 - DNA, 300 bp, Artificial Sequence
  derived and/or modified sequence
tagaacctgatggccattgtatctgaccggaagatgatttatgaacaaaaaatcgctgagctgcaaaggcagctggctgaggagcccatggacactgatcaagggaattcaatgctctccgccattcagtccgaagtcgctaagaatcagatgttgatcgaggaagaagtgcagaagctgaaacggtacaagatcgagaatataagacgcaagcataactatttaccattcattatggagttgttaaagaccctagcggagcaccaacaattaatcccactggtagaaaaaatattttag

SEQ ID NO: 298224 - DNA, 1346 bp, Artificial Sequence
  derived and/or modified sequence
cgggtttgctgagatctgtggccggcggcagctggtgcggggggcagctgagagcgagaggtggatcggggcggtgtgtggccagggccatgacgggcaatgccggggagtggtgcctcatggaaagcgaccccggggtcttcaccgagctcattaaaggattcggttgccgaggagcccaagtagaagaaatatggagtttagagcctgagaattttgaaaaattaaagccagttcatgggttaatttttcttttcaagtggcagccaggagaagaaccagcaggctctgtggttcaggactcccgacttgacacgatattttttgctaagcaggtaattaataatgcttgtgctactcaagccatagtgagtgtgttactgaactgtacccaccaggatgtccatttaggcgagacattatcagagtttaaagaattttcacaaagttttgatgcagctatgaaaggcttggcactgagcaattcagatgtgattcgacaagtacacaacagtttcgccagacagcaaatgtttgaatttgatacgaagacatcagcaaaagaagaagatgcttttcactttgtcagttatgttcctgttaatgggagactgtatgaattagatggattaagagaaggaccgattgatttaggtgcatgcaatcaagatgattggatcagtgcagtaaggcctgtcatagaaaaaaggatacaaaaagacgggttttcaccatgttgcccaggctggtctcagactcctgagctcaagccatccgcctgcctcgacctcccaaagtggtacagtgaaggtgaaattcgatttaatttaatggccattgtgtctgacagaaaaatgatatatgagcagaagatagcagagttacaaagacaacttgcagaggaacccatggatacagatcaaggtaatagtatgttaagtgctattcagtcagaagttgccaaaaatcagatgcttattgaagaagaagtacagaaattaaaaagatacaagattgagaatatcagaaggaagcataattatctgcctttcattatggaattgttaaagactttagcagaacaccagcagttaataccactagtagaaaaggcaaaagaaaaacagaacgcaaagaaagctcaggaaaccaaatgaagatgttttcagatatgtacacatttctgcttctgcacatattttcatggaaaccattatgtataaagaacttagagcaacatcctaattggctcagtgcacgtttggcaatagtgccagcctgtcttgtctttaatgcatggattcataaacttcttccctacctgcatcatgtgcatgtagtgcata

SEQ ID NO: 298225 - protein, 409 aa, Artificial Sequence
  derived and/or modified sequence
MLFNSVLRQPQLGVLRNGWSSQYPLQSLLTGYQCSGNDEHTSYGETGVPVPPFGCTFSSDDNTLKIWRLNRGLEEKPGGDKLSTVGWASQKKKESRPGLVTVTSSQSTPAKAPRAKCNPSNSSPSSAACAPSCAGDLPLPSNTPTFSIKTSPAKARSPINRRGSVSSVSPKPPSSFKMSIRNWVTRTPSSSPPITPPASETKIMSPRKALIPVSQKSSQAEACSESRNRVKRRLDSSCLESVKQKCVKSCNCVTELDGQVENLHLDLCCLAGNQEDLSKDSLGPTKSSKIEGAGTSISEPPSPISPYASESCGTLPLPLRPCGEGSEMVGKENSSPENKNWLLAMAAKRKAENPSPRSPSSQTPNSRRQSGKKLPSPVTITPSSMRKICTYFHRKSQEDFCGPEHSTEL

SEQ ID NO: 298226 - protein, 396 aa, Artificial Sequence
  derived and/or modified sequence
MKECNATRRPQMSFLKMDMTQMEFPDASFQVVLDKGTLDAVLTDEEEKTLQQVDRMLAEVGRVLQVGGRYLCISLAQAHILKKAVGHFSREGWMVRVHQVANSQDQVLEAEPQFSLPVFAFIMTKFRPVPGSALQIFELCAQEQRKPVRLESAERLAEAVQERQQYAWLCSQLRRKARLGSVSLDLCDGDTGEPRYTLHVVDSLPLFVHDHFPKSCIDAVEIDPSMLEVATQWFGFSQSDRMKVHIADGLDYIASLAGGGEARPCYDVIMFDVDSKDPTLGMSCPPPAFVEQSFLQKVKSILTPEGVFILNLVCRDLGLKDSVLAGLKAVFPLLYVRRIEGEVNEILFCQLHPEQKLATPELLETAQALERTLRKPGRGWDDTYVLSDMLKTVKIV

SEQ ID NO: 298227 - DNA, 1191 bp, Artificial Sequence
  derived and/or modified sequence
atgaaggagtgcaacgccaccagaagaccccagatgagcttcctgaagatggacatgacccagatggagttccccgacgccagcttccaggtggtgctggacaagggcaccctggacgccgtgctgaccgacgaggaggagaagaccctgcagcaggtggacagaatgctggccgaggtgggcagagtgctgcaggtgggcggcagatacctgtgcatcagcctggcccaggcccacatcctgaagaaggccgtgggccacttcagcagagagggctggatggtgagagtgcaccaggtggccaacagccaggaccaggtgctggaggccgagccccagttcagcctgcccgtgttcgccttcatcatgaccaagttcagacccgtgcccggcagcgccctgcagatcttcgagctgtgcgcccaggagcagagaaagcccgtgagactggagagcgccgagagactggccgaggccgtgcaggagagacagcagtacgcctggctgtgcagccagctgagaagaaaggccagactgggcagcgtgagcctggacctgtgcgacggcgacaccggcgagcccagatacaccctgcacgtggtggacagcctgcccctgttcgtgcacgaccacttccccaagagctgcatcgacgccgtggagatcgaccccagcatgctggaggtggccacccagtggttcggcttcagccagagcgacagaatgaaggtgcacatcgccgacggcctggactacatcgccagcctggccggcggcggcgaggccagaccctgctacgacgtgatcatgttcgacgtggacagcaaggaccccaccctgggcatgagctgccccccccccgccttcgtggagcagagcttcctgcagaaggtgaagagcatcctgacccccgagggcgtgttcatcctgaacctggtgtgcagagacctgggcctgaaggacagcgtgctggccggcctgaaggccgtgttccccctgctgtacgtgagaagaatcgagggcgaggtgaacgagatcctgttctgccagctgcaccccgagcagaagctggccacccccgagctgctggagaccgcccaggccctggagagaaccctgagaaagcccggcagaggctgggacgacacctacgtgctgagcgacatgctgaagaccgtgaagatcgtgtag

SEQ ID NO: 298228 - DNA, 1191 bp, Artificial Sequence
  derived and/or modified sequence
atgaaagagtgcaatgcaaccagacgtccacaaatgtcttttctgaagatggatatgacccaaatggagtttccggacgcctctttccaggttgtcctggataaggggactctggacgcagtactgactgatgaggaggagaagaccttgcagcaggtggaccggatgctcgccgaagtaggacgtgtcttacaagtgggaggaagatacctgtgcatcagcctggcacaagctcatatcctaaagaaagccgtcggccacttctcacgcgaggggtggatggtgcgcgttcatcaggtcgctaacagccaggaccaggtgttggaagctgagccacagttcagtctccctgtatttgccttcattatgaccaaatttcgcccagtgccagggagcgcactgcaaatcttcgagctctgcgcccaggaacagcgtaaaccagtgcgtctggagtcagctgagaggctggcggaggcggtgcaagaacgacaacagtatgcctggttatgctctcaactccgccgcaaggcccgccttggctctgtcagcttagatctgtgtgatggcgatacaggggaaccccgttacactctacatgtcgtcgacagcctgccgttgttcgtgcacgaccacttcccaaagtcatgtattgatgctgtggagatcgatccctcaatgctggaggtggccacacaatggttcggcttcagccagtcagatcggatgaaagttcatattgctgatggtttggactatattgcttctcttgcaggcggaggtgaagctcgaccttgctatgacgtgataatgttcgatgttgacagcaaggatcctacgctcggaatgtcttgcccaccaccggcgtttgtggagcagtcctttttgcagaaagtaaaatccatcctcacacccgaaggagtgtttatcctgaatctggtgtgccgcgatcttggcctgaaagactccgtgttagccggcctgaaggccgtttttcccttgctctatgtccgtaggatcgagggcgaggtcaatgagattctgttctgccagctccaccccgagcaaaaactcgcaactcccgaattgcttgagaccgcgcaggctcttgagagaaccctgagaaagcccggacggggctgggacgacacctatgtcctctccgatatgctgaagacggtgaagatcgtgtag

SEQ ID NO: 298229 - DNA, 1191 bp, Artificial Sequence
  derived and/or modified sequence
atgaaggaatgtaatgccacccggcggccccagatgtccttcctgaagatggacatgacccagatggagttcccagatgccagcttccaggtggtgctggacaagggcaccctggatgctgtgctgacagatgaggaggagaagaccctgcagcaggtggacaggatgctggccgaggtgggccgggtgctgcaggtgggcggccgctacctgtgcatcagcctggcccaggcccacatcctgaagaaggctgtgggccacttcagccgggagggctggatggtgcgggtgcaccaggtggccaacagccaggaccaggtgctggaggccgagccccagttcagcctgcctgtgtttgccttcatcatgaccaagttccggcctgtgcccggcagcgccctgcagatctttgagctgtgtgcccaggagcagaggaagcctgtgcggctggagagcgctgagcggctggccgaggccgtgcaggagcggcagcagtatgcctggctgtgcagccagctgcggaggaaggcccggctgggctctgtgtccctggacctgtgtgatggagacacaggagagccccgctacaccctgcacgtggtggacagcctgcccctgtttgtgcatgaccacttccccaagagctgcattgatgctgtggagattgaccccagcatgctggaggtggccacccagtggtttggcttcagccagagcgacaggatgaaggtgcacatcgcagatggcctggactacatcgccagcctggccggcggcggggaggcccggccctgctatgatgtgatcatgtttgatgtggacagcaaggaccccaccctgggcatgagctgccccccaccagcctttgtggagcagagcttcctgcagaaggtgaagagcatcctgaccccagagggcgtcttcatcctgaacctggtgtgccgggacctgggcctgaaggacagcgtgctggccggcctgaaggctgtgttccccctgctgtatgtgagaagaattgaaggagaggtgaatgagatcctcttctgccagctgcaccctgagcagaagctggccaccccagagctgctggagacagcccaggccctggagaggaccctgaggaagccaggccggggctgggatgacacctacgtgctgagtgacatgctgaagacagtgaagatcgtgtag

SEQ ID NO: 298230 - DNA, 1191 bp, Artificial Sequence
  derived and/or modified sequence
atgaaggagtgcaacgccacccggcggccccagatgagcttcctgaaaatggatatgacccagatggaatttccagatgcctccttccaggtggtactggataaaggtaccttggatgcagtgctgaccgatgaagaagagaaaacgcttcagcaggttgacaggatgctggccgaggtcggccgagtcttgcaagttggcggcaggtacttatgtatatctctggcgcaggcacatattcttaagaaggccgtggggcacttcagccgtgaaggctggatggttcgggtccaccaggtagcaaactcgcaggaccaggtgctggaggctgagcctcagttctccctgcctgtgtttgcgttcattatgacaaagttcagaccagtcccaggaagtgcactgcagattttcgagctctgcgctcaggagcagcggaaaccagtgcggctagaatctgccgagcgactggccgaagcggtccaagagagacaacagtatgcatggttatgtagtcagctccggcgtaaggcacgtttagggtcagtgagtttggacctttgcgatggtgacaccggcgagccaaggtatactctgcacgtggtcgattccttacctctgtttgtgcacgatcattttccaaagagctgtattgacgccgtggaaattgaccccagtatgctagaagtcgcgacccaatggtttgggttttcgcagtcagacagaatgaaagtccatatcgccgatgggctggactatatcgctagcctggcaggcggaggagaagccaggccttgctacgacgtgattatgttcgacgtcgatagtaaagatcccactctgggcatgagctgccccccacctgcatttgtagagcagagtttcctacagaaagtgaagtctatattgactccagaaggggtttttatccttaatcttgtctgccgcgacctgggactgaaggactcagtgttggccggtctgaaagccgtattcccacttctgtacgtgaggcgcatcgaaggagaagtcaatgagatcctgttctgtcaattacacccagaacagaagttggccacccccgaactgctggagaccgctcaggcactcgagcggaccctaagaaagcctggacggggatgggacgatacctacgtgttgtcggacatgctaaaaaccgtgaaaattgtgtag

SEQ ID NO: 298231 - DNA, 2147 bp, Artificial Sequence
  derived and/or modified sequence
atgaaggaatgtaatgccacccgacggccccagatgagcttcttgaagatggacatgacgcagatggagtttcctgatgcctcgttccaggtggtgttggacaagggcaccctggatgctgtcctgacagatgaggaagagaagaccttacaacaggtggacaggatgctggctgaggttggccgtgtcctgcaggtgggcggtcgctatctctgcatctccctggctcaggctcacatcctgaagaaagcagtgggccacttctcccgggaggggtggatggtgagggtgcaccaagtggccaacagccaggaccaggtgttggaagcagagcctcagttctccttgcctgtctttgccttcatcatgaccaagttcaggccagtccctggctctgcccttcagatctttgagctgtgtgctcaggagcagcgcaagcctgtgcggctggagagtgccgagcggctggccgaggcggtgcaggagcgacagcagtatgcctggctgtgcagccagctgcgccgcaaggccaggctggggagtgtgtctctggacttgtgcgatggggacacgggggagccacgctacaccctccacgtggtggacagcctccccctctttgtccacgatcattttccaaagtcctgcattgatgctgtggagatcgatccctccatgttggaagtggccacccagtggtttggcttctcccagagtgaccgaatgaaggtccacattgcagatggcctggactatatcgccagcttggcaggaggaggagaagcacggccttgctacgatgtcataatgtttgatgttgacagtaaggacccaacactgggaatgagttgtccgcccccagcatttgtggagcaatcttttctacagaaggttaaaagcatcttgactcctgaaggtgtttttattctcaaccttgtgtgccgagacttggggctaaaagactcagtgctggctgggctcaaggcagtgttccccctcctatatgtccggcgaattgagggtgaagtgaatgagatcctgttctgtcagctgcaccctgagcaaaaacttgccacaccagagctcctagaaacagcccaggctttggagcggaccctgaggaagcctgggaggggttgggatgacacgtatgtcttgtcagatatgctcaagacggtgaaaattgtgtgactgcttaggccaagcagccctcctgcctagactgaccttggactcccagcctgccagagaatgaagaaatacaacgcacagtacttttgaagcttcgtatttttcttggtttcacactcagctacatgtgacctccagcttggtgaggttgcctgaagattagggaaaataaaaatgtccttcccatcttgtcctcttcagtaccacttgggttggtttgtctttgcttcctacaccacgtccttgagtggagttccctgctgaagcccctagcacacactgcatgccttaacaagtgtgtgcaagcccctcagaactcaagacatccaaattttattgcgtctctacttatactggtttgcttttgatttattcctctattagttctataggagtgatctcaagtgagatagcagagcaagatgccaaaagaccataaatagagtaaggtttctatagatgtgagacagatttgagagagcatttactctgtctccctgtggatgaaactgctgctgaaatggttccaatttttaggaatctgcttacccacttcattatttgacagctttccttggtgacccaaaccttgtagcctaagccatttgtctttttctcagtggagggagtgtatggacctggccccatggctttgcatgttagagacctggcagactaaagtctctagtgtttgtttgctcacatttgctgagtgacagctatgtgccagactgcataaagggtggtggcagaagtgaaaatgtttaagaatgaccaaaaacattagtaatgaaagttaatgtgttccaggcattcttctaagtggtttacatgcactgtctcatttaatctgagataaaggatacttaagcccaaactatatctaaacccaaatctcacttggctggaaacatcaatcttaaccatttattcagaaccattaaaccaatgattcc

SEQ ID NO: 298232 - DNA, 1191 bp, Artificial Sequence
  derived and/or modified sequence
atgaaggagtgcaacgccacacggcgtccgcagatgtccttcctgaagatggatatgacacagatggagttcccggacgctagctttcaagttgtactggacaagggcaccctggacgcggtactcactgatgaggaggagaaaacactgcaacaggttgatcgcatgttagccgaagtaggtcgggtgctccaggtgggaggaaggtatctttgcataagcctagcccaggctcatatcctgaaaaaggcagtgggacactttagccgcgagggctggatggtgagggtgcatcaggttgctaattcccaagaccaggttctggaagccgagcctcagttttcacttcccgtttttgcatttataatgaccaaattcagaccagttccgggttcagcactgcagattttcgaactgtgcgctcaggaacagagaaaacctgtgaggttagagagtgctgaaaggctggccgaggcagtgcaggagcggcaacagtatgcctggctctgttctcagctccgcaggaaggcaagacttgggagcgtcagcctcgatttgtgcgatggagatacaggcgagccacgctacactctgcatgtggtagacagtctgcctctgttcgttcacgaccactttcctaagtcatgtatcgacgcagtagaaatagacccaagtatgttagaagttgcaacacaatggtttggattctctcagtccgaccggatgaaagtgcatatcgcagacggactggactacatcgcatccctggcgggaggcggagaggcacgaccctgctacgacgtaattatgtttgacgtggattcgaaggatcctaccctggggatgtcttgtccccctccggcatttgtcgagcagtccttcttgcagaaggtcaagagtatattgactcctgaaggcgtcttcattctgaacctggtctgccgagatctgggcctgaaggacagcgtgttggctggcctgaaggcggttttcccactcctatatgtgcgccgtatcgagggagaggtcaatgagatcctcttttgccagctgcacccagaacagaaattggctacacccgagttgctcgaaactgcacaggctcttgagaggaccctgcgaaaaccgggaagaggttgggacgatacctacgtgttgagtgacatgctgaagacagtaaagatagtgtag

SEQ ID NO: 298233 - protein, 264 aa, Artificial Sequence
  derived and/or modified sequence
MTSTFNPRECKLSKQEGQNYGFFLRIEKDTEGHLVRVVEKCSPAEKAGLQDGDRVLRINGVFVDKEEHMQVVDLVRKSGNSVTLLVLDGDSYEKAVKTRVDLKELGQSQKEQGLSDNILSPVMNGGVQTWTQPRLCYLVKEGGSYGFSLKTVQGKKGVYMTDITPQGVAMRAGVLADDHLIEVNGENVEDASHEEVVEKVKKSGSRVMFLLVDKETDKRHVEQKIQFKRETASLKLLPHQPRIVEMKKGSNGYGFYLRAGSEQK

SEQ ID NO: 298234 - DNA, 795 bp, Artificial Sequence
  derived and/or modified sequence
atgacctcgactttcaaccctcgagagtgcaaactatcaaaacaggaggggcaaaactatggattctttttacgcattgagaaagacaccgagggccacctggtgagggtggtcgaaaaatgtagccccgccgaaaaagctggcttacaggacggagatcgcgttctccggattaacggcgttttcgtcgacaaggaggaacacatgcaggttgtggacttagtgcgcaaatcaggcaatagcgttacgcttctggtactcgacggagactcttacgaaaaggctgtgaagacccgggttgatttgaaagaactcggccagtcccagaaagagcaaggactgagcgataacatccttagtccagttatgaacggcggtgtgcagacctggacacaacccaggctctgctacctggtaaaggagggtggatcctatgggttttctttaaaaacagtgcagggcaaaaagggggtctacatgacggatatcaccccacagggcgttgcgatgagggccggtgtcctggcggatgaccatctcattgaggtgaacggcgagaacgtggaggacgctagccacgaagaagtagtagaaaaggttaaaaagagcggatctcgggtcatgttcctgctggtcgacaaggagaccgataagaggcatgtggaacagaagatccagttcaagcgggagaccgcctcgttaaaactgctgcctcaccagccgagaatcgttgagatgaaaaaaggcagtaacggatatgggttctatttgagggcaggctccgaacagaagtag

SEQ ID NO: 298235 - DNA, 795 bp, Artificial Sequence
  derived and/or modified sequence
atgaccagcaccttcaacccccgggagtgcaagctgagcaagcaggagggccagaactacggcttcttcctgcgcatcgagaaggacacagagggccacctggtgcgggtggtggagaagtgcagccctgctgagaaggccggcctgcaggatggagacagagtgctgcgcatcaatggagtgtttgtggacaaggaggagcacatgcaggtggtggacctggtgaggaagagcggcaacagcgtgaccctgctggtgctggatggagacagctatgagaaggctgtgaagaccagggtggacctgaaggagctgggccagagccagaaggagcagggcctgagtgacaacatcctgagccctgtgatgaatggaggagtgcagacctggacccagccccggctgtgctacctggtgaaggagggcggcagctatggcttcagcctgaagacagtgcagggcaagaagggcgtgtacatgacagacatcaccccccagggcgtggccatgagagctggggtgctggctgatgaccacctgattgaggtgaatggagaaaatgtggaggatgccagccatgaggaggtggtggagaaggtgaagaagagcggcagccgggtgatgttcctgctggtggacaaggagacagacaagagacatgtggagcagaagatccagttcaagcgggagacagccagcctgaagctgctgccccaccagcccagaattgtggagatgaagaagggcagcaatggctacggcttctacctgcgggccggcagcgagcagaagtag

SEQ ID NO: 298236 - DNA, 795 bp, Artificial Sequence
  derived and/or modified sequence
atgaccagcaccttcaacccccgggagtgcaagctgagcaagcaggaaggccagaactatggcttttttttgcgcattgagaaggatactgagggtcacctcgtgcgcgttgtagaaaaatgttcacccgcagaaaaagccgggctacaggatggcgatagggtattgcggatcaacggcgtcttcgtcgacaaggaggagcacatgcaggttgttgacctcgtcagaaagagcggaaattcggtcaccctgctagttttggatggtgattcatacgaaaaggccgtgaagacgagagttgatctcaaagagctgggacagtcacagaaggaacaaggattgagcgacaacatactgtcccccgtcatgaatggcggggtccagacatggacacagccacggctctgctacctggttaaagaaggtggctcctatgggttcagtctcaagaccgtacagggtaagaagggggtatatatgactgatatcacccctcagggcgtggctatgcgcgccggggtactcgccgatgaccatctgattgaggttaatggcgagaacgtggaagacgctagccatgaggaagttgttgagaaagtcaaaaagagtgggtctagagtgatgtttttgctggtggacaaagagactgataaacgccacgtagagcagaagattcagtttaagagagaaaccgcatcactgaagttattaccccaccaacctcggatagtggaaatgaaaaaaggatcgaacggatacggattttacctgagggccgggagcgaacagaagtag

SEQ ID NO: 298237 - DNA, 1010 bp, Artificial Sequence
  derived and/or modified sequence
gcaaggcagcaggatggaggggtttgtaaaaatgccttccacctaccctgctgggcttgcccgagaggctctgagtgtgtgaaggggaagacaattatcgctaggctggagaatagaaagagcaccatcagtccagtgagttgcaagcctaatgctcacctgcagagacagaattcctgagtgaacgaacagagcagctcctcttccatctccagaaatgacctccaccttcaacccccgagaatgtaaactgtccaagcaagaagggcaaaactatggcttcttcctgcgaattgagaaggacaccgagggccacctggtccgggtggttgagaagtgtagcccagcagagaaggctggccttcaagatggagacagagttcttaggatcaatggtgtctttgtggacaaagaagaacatatgcaggttgtggatctggtcagaaagagtgggaattcagtgactttactagttctggatggggattcctatgagaaagcagtgaaaacacgggtggacttgaaagagttgggtcaaagtcagaaggagcaaggtttgagtgataatatactttcccctgtgatgaatggaggtgtgcaaacttggacccagccccggctctgctatctcgtgaaggaaggaggcagctatggcttctctctgaaaactgtccaaggtaaaaagggggtgtacatgactgatattacacctcaaggtgtggctatgagagctggagttctggctgatgatcacttgattgaagtgaatggagagaatgtagaggatgccagccatgaggaagtggttgaaaaggtgaagaagtcaggaagccgtgtcatgttcctgctggtggacaaagaaactgacaagcgtcatgttgagcagaagatacaattcaaaagagaaacagccagtttgaaactgttaccccaccagccccgaattgtggagatgaagaaaggaagcaatggctatggtttctatctgagggcaggctcagaacagaaag

SEQ ID NO: 298238 - DNA, 795 bp, Artificial Sequence
  derived and/or modified sequence
atgacctcaacttttaacccaagggagtgtaagctcagcaaacaggagggccagaattatggcttctttctgcggatcgagaaagataccgagggccacctggtgcgtgtcgtcgagaaatgctcaccagctgagaaggccggactccaagacggcgatcgtgttttgcgcattaacggagtttttgttgacaaggaggaacacatgcaggttgtagacttagtgcgcaagtccggaaacagtgtcaccctgctcgttctggatggagactcttatgagaaagctgtcaagactcgtgtggatctgaaggagctgggccagtctcaaaaagaacagggtctctccgataatattctgagtccggtcatgaatggaggggttcaaacgtggacccaaccgcgtttgtgctacctagtaaaggagggaggttcatacggatttagtttaaaaaccgtgcaagggaagaaaggcgtttacatgactgacatcacgccccagggcgttgccatgcgcgctggcgttctcgccgatgaccatctcatcgaagtgaacggggaaaatgtcgaggacgcatctcacgaggaagtcgtggagaaggtgaaaaagtccggatcacgtgtaatgttcttgctcgttgataaagagaccgataagaggcacgttgaacagaaaatccagttcaagcgcgaaaccgcctccctcaaactccttccccatcagcctcggattgtggagatgaagaagggatcaaacggttatggcttttatctcagagccggaagtgagcagaaatag

SEQ ID NO: 298239 - DNA, 795 bp, Artificial Sequence
  derived and/or modified sequence
atgaccagcaccttcaaccccagagagtgcaagctgagcaagcaggagggccagaactacggcttcttcctgagaatcgagaaggacaccgagggccacctggtgagagtggtggagaagtgcagccccgccgagaaggccggcctgcaggacggcgacagagtgctgagaatcaacggcgtgttcgtggacaaggaggagcacatgcaggtggtggacctggtgagaaagagcggcaacagcgtgaccctgctggtgctggacggcgacagctacgagaaggccgtgaagaccagagtggacctgaaggagctgggccagagccagaaggagcagggcctgagcgacaacatcctgagccccgtgatgaacggcggcgtgcagacctggacccagcccagactgtgctacctggtgaaggagggcggcagctacggcttcagcctgaagaccgtgcagggcaagaagggcgtgtacatgaccgacatcaccccccagggcgtggccatgagagccggcgtgctggccgacgaccacctgatcgaggtgaacggcgagaacgtggaggacgccagccacgaggaggtggtggagaaggtgaagaagagcggcagcagagtgatgttcctgctggtggacaaggagaccgacaagagacacgtggagcagaagatccagttcaagagagagaccgccagcctgaagctgctgccccaccagcccagaatcgtggagatgaagaagggcagcaacggctacggcttctacctgagagccggcagcgagcagaagtag

SEQ ID NO: 298240 - protein, 329 aa, Artificial Sequence
  derived and/or modified sequence
MLGQVVTLILLLLLKVYQGKGCQGSADHVVSISGVPLQLQPNSIQTKVDSIAWKKLLPSQNGFHHILKWENGSLPSNTSNDRFSFIVKNLSLLIKAAQQQDSGLYCLEVTSISGKVQTATFQVFVFDKVEKPRLQGQGKILDRGRCQVALSCLVSRDGNVSYAWYRGSKLIQTAGNLTYLDEEVDINGTHTYTCNVSNPVSWESHTLNLTQDCQNAHQEFRFWPFLVIIVILSALFLGTLACFCVWRRKRKEKQSETSPKEFLTIYEDVKDLKTRRNHEQEQTFPGGGSTIYSMIQSQSSAPTSQEPAYTLYSLIQPSRKGDRFYSFSG

SEQ ID NO: 298241 - DNA, 990 bp, Artificial Sequence
  derived and/or modified sequence
atgctgggacaggtggtgaccctaatcttgctgttattactcaaggtgtaccaaggtaaaggctgccaggggagcgcggaccacgtcgtgagtattagtggagttcctttgcaactgcaacccaattccatacaaaccaaggtggactcaatcgcctggaaaaaactgctcccatctcagaatgggtttcaccatatcctgaagtgggaaaacggctctctcccgagcaatacatccaatgatagattctcatttattgtgaagaaccttagtcttcttataaaggctgctcagcagcaggattctggtttgtactgtctagaggtcacctccatttcgggtaaggtgcagactgcaaccttccaggtgtttgtcttcgacaaagtggagaagccaagactgcaaggccagggaaagatcctggaccgtgggcggtgtcaggtcgccctgagttgcctagtcagccgggatggtaacgtttcctatgcttggtaccgcggttctaaactcattcagacagctggaaatttgacctacctagacgaagaggtggacattaatggaacacacacttatacttgcaacgtgtccaaccctgtgagctgggaaagccacactctgaacctgacccaagattgccaaaatgcgcaccaggagttccggttctggccgttcctggtaattatcgtcattttgagcgccctgtttctcggcactttggcctgcttttgcgtgtggcggcgtaaaagaaaggagaagcagagtgaaacctccccaaaggagttcctgaccatttatgaagatgttaaggacttgaagacaagacggaatcacgagcaggagcagacctttcctggggggggctcaacaatctatagtatgatccaaagtcagagttcagctccgaccagccaggaaccagcctacacattgtatagccttattcagccctcacggaagggagacagattttattcatttagcggatag

SEQ ID NO: 298242 - DNA, 990 bp, Artificial Sequence
  derived and/or modified sequence
atgctgggccaggtggtgaccctcatcctgctgctgctgctgaaggtgtaccagggcaagggctgccagggcagcgctgaccacgtggtgtccatctctggagtgcccctgcagctgcagcccaacagcatccagaccaaggtggacagcatcgcctggaagaagctgctgcccagccagaatggcttccaccacatcctgaagtgggagaatggcagcctgcccagcaacaccagcaatgaccgcttctccttcatcgtgaagaacctgagcctgctgatcaaggccgcccagcagcaggacagcggcctgtactgcctggaggtgaccagcatcagcggcaaggtgcagacagccaccttccaggtgtttgtgtttgacaaggtggagaagccccggctgcagggccagggcaagatcctggaccggggccgctgccaggtggccctgagctgcctggtgtccagagatggaaatgtgtcctatgcctggtaccggggcagcaagctgatccagacagctggcaacctgacctacctggatgaggaggtggacatcaatggcacccacacctacacctgcaatgtgagcaaccctgtgtcctgggagagccacaccctgaacctgacccaggactgccagaatgcccaccaggagttccgcttctggcccttcctggtgatcatcgtcatcctgagcgccctcttcctgggcaccctggcctgcttctgtgtgtggaggaggaagaggaaggagaagcagagcgagaccagccccaaggagttcctgaccatctatgaagatgtgaaggacctgaagaccaggaggaaccacgagcaggagcagaccttccctgggggcggcagcaccatctacagcatgatccagagccagagcagcgcccccaccagccaggagcccgcctacaccctgtacagcctcatccagcccagcaggaagggggaccgcttctacagcttcagcggctag

SEQ ID NO: 298243 - DNA, 990 bp, Artificial Sequence
  derived and/or modified sequence
atgctgggccaggtggtgaccctgatcctgctgctgctgctgaaggtttaccaagggaagggatgccagggcagcgccgatcatgtggtttccatcagcggagtgccattacaactccagcccaacagtattcaaacaaaggttgattccattgcgtggaaaaagctactgccctcacaaaacggatttcatcatattctcaagtgggagaatgggagcctgccctccaatacatctaacgacagattctcttttatcgtgaagaacctatccctgttgataaaggcggcccaacagcaggattctggactgtattgtttggaggtaaccagcatttcgggaaaggtgcagaccgcgacgtttcaagtgttcgtgtttgataaagtcgaaaaacccagattgcaaggacaggggaagattctggataggggcaggtgccaggtcgccctgagctgtcttgtgtcaagggacggcaacgtgtcgtacgcttggtacaggggcagcaaactcatccaaactgcgggaaaccttacctacctggatgaggaggttgatattaacggcacacacacgtacacttgtaacgtctcgaatcccgtgagctgggagagccatactctcaatctcacccaggactgccaaaatgctcatcaggagttcaggttctggccattcctggtgatcattgtgatccttagtgccctatttctcggcacattggcgtgtttttgtgtgtggcggaggaaacggaaggagaaacagtctgaaacatcacccaaagagttcctgactatctatgaggacgtgaaggacctcaaaactagaaggaaccatgagcaagagcagacttttcctggaggaggatctactatttattccatgatccagtctcaatcatccgccccgactagccaggagcctgcctacaccctgtattcgctgattcagccttctcgcaaaggtgataggttttacagtttctccggatag

SEQ ID NO: 298244 - DNA, 990 bp, Artificial Sequence
  derived and/or modified sequence
atgttaggccaggtcgtgacacttattctgctgttgctgctgaaggtctatcagggaaagggatgccagggatcagcagaccatgttgtatcgatctccggcgtacctctgcagcttcagccaaactctatccagaccaaggtggacagcatcgcttggaagaagttgctcccgtcccagaatggctttcatcatatcctcaagtgggagaatgggagcttaccctcaaacactagcaacgaccgattcagttttatcgtcaagaatctcagtctacttattaaggcggctcagcagcaagattcgggtctatactgtcttgaagtgactagcatctctggaaaagtacagacagctacctttcaggtcttcgtctttgacaaggtcgaaaaaccacgcctgcagggacagggaaagatcctcgacagaggcaggtgccaggtggccctgtcttgtttagtgagtagagacggcaacgtgagctatgcctggtacagaggatctaagctgatccagacggctggaaacctgacatatttggacgaagaggtggacattaatggcacccacacgtatacatgcaatgtcagcaaccccgtgtcctgggagtctcacactctgaacctgacccaggattgtcagaatgcccatcaggaattccggttctggccatttctggtgatcattgttatcctgtccgccctgtttcttggcacgctagcctgcttttgtgtctggcgccgaaaaagaaaggagaaacagagcgaaaccagccccaaggagttccttacaatatatgaggacgtaaaagatctcaagaccagacggaaccatgagcaggagcagacattccctggcggaggcagcactatttactctatgatccagagccagtcaagcgcaccaactagccaggaaccagcctataccctgtattcgctcattcagccctcacggaagggggatagattttacagtttctctggttag

SEQ ID NO: 298245 - DNA, 1215 bp, Artificial Sequence
  derived and/or modified sequence
cttgtgggaactgtcagaccagctccaggcgctggggctttctcagtggccttgtcagctcacagcaggcgttaacagcctctaattgaggaaactgtggctggacaggttgcaaggcagttctgctccccatcgtcctcttgctgactggggactgctgagcccgtgcacggcagagagtctggtggggtggaggggctggcctggcccctctgtcctgtggaaatgctggggcaagtggtcaccctcatactcctcctgctcctcaaggtgtatcagggcaaaggatgccagggatcagctgaccatgtggttagcatctcgggagtgcctcttcagttacaaccaaacagcatacagacgaaggttgacagcattgcatggaagaagttgctgccctcacaaaatggatttcatcacatattgaagtgggagaatggctctttgccttccaatacttccaatgatagattcagttttatagtcaagaacttgagtcttctcatcaaggcagctcagcagcaggacagtggcctctactgcctggaggtcaccagtatatctggaaaagttcagacagccacgttccaggtttttgtatttgataaagttgagaaaccccgcctacaggggcaggggaagatcctggacagagggagatgccaagtggctctgtcttgcttggtctccagggatggcaatgtgtcctatgcttggtacagagggagcaagctgatccagacagcagggaacctcacctacctggacgaggaggttgacattaatggcactcacacatatacctgcaatgtcagcaatcctgttagctgggaaagccacaccctgaatctcactcaggactgtcagaatgcccatcaggaattcagattttggccgtttttggtgatcatcgtgattctaagcgcactgttccttggcacccttgcctgcttctgtgtgtggaggagaaagaggaaggagaagcagtcagagaccagtcccaaggaatttttgacaatttacgaagatgtcaaggatctgaaaaccaggagaaatcacgagcaggagcagacttttcctggaggggggagcaccatctactctatgatccagtcccagtcttctgctcccacgtcacaagaacctgcatatacattatattcattaattcagccttccaggaagggtgacagattctattcattttctggctga

SEQ ID NO: 298246 - DNA, 990 bp, Artificial Sequence
  derived and/or modified sequence
atgctgggccaggtggtgaccctgatcctgctgctgctgctgaaggtgtaccagggcaagggctgccagggcagcgccgaccacgtggtgagcatcagcggcgtgcccctgcagctgcagcccaacagcatccagaccaaggtggacagcatcgcctggaagaagctgctgcccagccagaacggcttccaccacatcctgaagtgggagaacggcagcctgcccagcaacaccagcaacgacagattcagcttcatcgtgaagaacctgagcctgctgatcaaggccgcccagcagcaggacagcggcctgtactgcctggaggtgaccagcatcagcggcaaggtgcagaccgccaccttccaggtgttcgtgttcgacaaggtggagaagcccagactgcagggccagggcaagatcctggacagaggcagatgccaggtggccctgagctgcctggtgagcagagacggcaacgtgagctacgcctggtacagaggcagcaagctgatccagaccgccggcaacctgacctacctggacgaggaggtggacatcaacggcacccacacctacacctgcaacgtgagcaaccccgtgagctgggagagccacaccctgaacctgacccaggactgccagaacgcccaccaggagttcagattctggcccttcctggtgatcatcgtgatcctgagcgccctgttcctgggcaccctggcctgcttctgcgtgtggagaagaaagagaaaggagaagcagagcgagaccagccccaaggagttcctgaccatctacgaggacgtgaaggacctgaagaccagaagaaaccacgagcaggagcagaccttccccggcggcggcagcaccatctacagcatgatccagagccagagcagcgcccccaccagccaggagcccgcctacaccctgtacagcctgatccagcccagcagaaagggcgacagattctacagcttcagcggctag

SEQ ID NO: 298247 - protein, 505 aa, Artificial Sequence
  derived and/or modified sequence
MSGASSSEQNNNSYETKTPNLRMSEKKCSWASYMTNSPTLIVMIGLPARGKTYVSKKLTRYLNWIGVPTKVFNLGVYRREAVKSYKSYDFFRHDNEEAMKIRKQCALVALEDVKAYLTEENGQIAVFDATNTTRERRDMILNFAEQNSFKVFFVESVCDDPDVIAANILEVKVSSPDYPERNRENVMEDFLKRIECYKVTYRPLDPDNYDKDLSFIKVINVGQRFLVNRVQDYIQSKIVYYLMNIHVQPRTIYLCRHGESEFNLLGKIGGDSGLSVRGKQFAQALRKFLEEQEITDLKVWTSQLKRTIQTAESLGVPYEQWKILNEIDAGVCEEMTYAEIEKRYPEEFALRDQEKYLYRYPGGESYQDLVQRLEPVIMELERQGNVLVISHQAVMRCLLAYFLDKGADELPYLRCPLHTIFKLTPVAYGCKVETIKLNVEAVNTHRDKPTNNFPKNQTPVRMRRNSFTPLSSSNTIRRPRNYSVGSRPLKPLSPLRAQDMQEGAD

SEQ ID NO: 298248 - protein, 472 aa, Artificial Sequence
  derived and/or modified sequence
MTNSPTLIVMIGLPARGKTYVSKKLTRYLNWIGVPTKVFNLGVYRREAVKSYKSYDFFRHDNEEAMKIRKQCALVALEDVKAYLTEENGQIAVFDATNTTRERRDMILNFAEQNSFKVFFVESVCDDPDVIAANILEVKVSSPDYPERNRENVMEDFLKRIECYKVTYRPLDPDNYDKDLSFIKVINVGQRFLVNRVQDYIQSKIVYYLMNIHVQPRTIYLCRHGESEFNLLGKIGGDSGLSVRGKQFAQALRKFLEEQEITDLKVWTSQLKRTIQTAESLGVPYEQWKILNEIDAGVCEEMTYAEIEKRYPEEFALRDQEKYLYRYPGGESYQDLVQRLEPVIMELERQGNVLVISHQAVMRCLLAYFLDKGADELPYLRCPLHTIFKLTPVAYGCKVETIKLNVEAVNTHRDKPTNNFPKNQTPVRMRRNSFTPLSSSNTIRRPRNYSVGSRPLKPLSPLRAQDMQEGAD

SEQ ID NO: 298249 - DNA, 1518 bp, Artificial Sequence
  derived and/or modified sequence
atgagcggcgccagcagctccgagcagaacaacaactcttacgagacaaagacacctaatctcaggatgtccgaaaagaaatgtagttgggcaagttacatgactaactctccaacactcatagtcatgatcggactgccagcgagaggcaaaacgtatgtgtctaaaaaacttacccggtatctcaactggataggggtgcctaccaaggtttttaacttgggtgtgtacagacgagaagcagtcaaatcctataaatcttacgacttcttccgccacgacaatgaggaggccatgaagatcagaaaacagtgcgctttagttgccttggaagacgtcaaggcatacttgactgaggagaacggacagatcgctgtgtttgatgcaacaaacacgacccgggagaggagagacatgatactgaatttcgccgagcagaactcctttaaagttttcttcgtggagtccgtgtgcgatgacccagacgtaattgccgccaatatcctagaagttaaggtttccagtccagactacccagaacgaaatcgcgagaatgtgatggaggattttttgaaacggattgagtgttacaaagtgacatatagacctttggatccagataattacgataaggatctgtcttttatcaaggtaattaatgtgggccagagatttttggtgaatagggtacaggattacattcagtcgaaaatcgtgtactaccttatgaatatccacgtgcaacccagaaccatatatctgtgccgtcacggggagagtgagtttaatctgctcgggaagatcggcggagactctggactgagcgtaaggggcaaacagtttgcacaggctttgaggaagttcctggaggaacaagaaatcaccgacttgaaggtgtggacctcacagctgaaacgtaccatccaaaccgccgagtccctgggcgtcccgtacgagcaatggaagatcttaaacgagatagatgctggggtctgcgaagagatgacctatgcagaaatcgaaaaacggtaccccgaagaatttgcccttcgggatcaggaaaagtacctctatagatatcccggtggtgagagttaccaggaccttgttcagaggctcgaacccgtgatcatggaattggagcgccagggcaacgtgctggtgatcagccaccaagccgtgatgcggtgcctcctggcttatttcctggataagggagccgacgagctcccctacctgaggtgccctctgcataccatcttcaaattaactcccgtggcctatggatgcaaggtggaaacgatcaagctgaatgtggaagcggtgaatacccatagagacaaacctacaaacaattttccgaaaaatcagacaccggtgcgtatgcggcgaaatagctttacaccccttagctctagcaacaccattcggcggcctaggaattattcggtcggatccagacctcttaagcccctatctcccctgagggcgcaggatatgcaggagggagctgattag

SEQ ID NO: 298250 - DNA, 1419 bp, Artificial Sequence
  derived and/or modified sequence
atgactaactcacctaccctaatcgtgatgataggactgcccgccagaggcaagacttatgtgtctaaaaagctcacccggtatctaaattggataggagtccctactaaggtatttaacctgggagtgtatcgccgagaggcagtcaaatcgtacaagtcgtacgacttcttccgacacgataacgaggaagccatgaaaatccggaagcagtgcgccctcgtggcattggaggatgtgaaggcttacctgacggaagaaaatggccagatcgcggtctttgacgcaacgaacaccacacgcgagaggcgagatatgatcctgaatttcgctgagcagaacagtttcaaggtctttttcgttgaatcagtatgcgacgatcccgacgttatagcagcaaacattttggaggtgaaggtgagctcccctgactatccagagagaaatcgtgaaaatgttatggaggattttctcaagcgcatcgaatgctataaagtgacgtataggcctctcgatccagataactatgacaaggatctgtcatttataaaggtgataaacgttggccagagattcctggttaatagggtgcaggattacatccagtcaaagattgtgtactaccttatgaatatacacgtccagcctcgaactatttacctgtgcagacacggagaatctgaattcaatttgttgggaaagattggcggagattcaggcctatctgtccggggaaaacaattcgcgcaggccctgcgtaagttcctggaagaacaggagatcaccgacctgaaagtctggacctctcagctcaagcgaaccatacagacggccgagagcttaggcgttccatacgaacagtggaagattcttaacgagattgatgctggggtctgtgaggagatgacctacgctgagatagaaaaaagataccccgaagagtttgcactaagggatcaagagaaatacctgtatcgctatcctgggggcgagtcctatcaggatttagtgcagcgattagagccggttattatggaactcgagcgtcagggaaatgtgctcgtcatttcacatcaggcagtgatgagatgcctgctggcctacttcttagataagggggccgatgaacttccttacttaaggtgtccactgcacaccattttcaagctgactcccgtggcttacggctgcaaggtcgagacgatcaagctgaacgtggaggcagtgaacactcatagagataaacccacaaacaactttcctaagaatcagacacccgtacgaatgcggcgcaacagttttacccctctttcaagcagtaatacaatccgccggccacggaactacagtgtaggtagtcggccactgaaacctttatcccctttgagggcacaggacatgcaagaaggggcagattag

SEQ ID NO: 298251 - DNA, 1518 bp, Artificial Sequence
  derived and/or modified sequence
atgtctggggccagcagcagcgagcagaacaacaacagctatgagaccaagacccccaacctgaggatgtctgagaagaagtgctcctgggccagctacatgaccaacagccccaccctgattgtgatgattggcctgcctgcccggggcaagacctacgtgtccaagaagctgacccgctacctgaactggattggagtgcccaccaaggtgttcaacctgggcgtgtaccgccgggaggccgtgaagagctacaagagctatgacttcttcagacatgacaatgaggaggccatgaagatcaggaagcagtgtgccctggtggccctggaggatgtgaaggcctacctgacagaggagaatggccagattgctgtgtttgatgccaccaacaccacccgggagcggcgggacatgatcctgaactttgctgagcagaacagcttcaaggtgttctttgtggagagcgtgtgtgatgatcctgatgtgattgctgccaacatcctggaggtgaaggtgagcagcccagactacccagagaggaaccgggagaatgtgatggaggacttcctgaagagaattgagtgctacaaggtgacctaccggcccctggaccctgacaactatgacaaggacctgtccttcatcaaggtgatcaacgtgggccagcgcttcctggtgaacagagtgcaggactacatccagagcaagatcgtgtactacctgatgaacatccacgtgcagcccaggaccatctacctgtgcagacatggagagagcgagttcaacctgctgggcaagattggaggagacagcggcctgtctgtgcggggcaagcagtttgcccaggccctgaggaagttcctggaggagcaggagatcacagacctgaaggtgtggaccagccagctgaagaggaccatccagacagctgagagcctgggcgtgccctatgagcagtggaagatcctgaatgaaattgatgctggggtgtgtgaggagatgacctacgccgagattgagaagcgctacccagaggagtttgccctgcgggaccaggagaagtacctgtaccgctacccaggaggagagagctaccaggacctggtgcagaggctggagcctgtgatcatggagctggagcggcagggcaatgtgctggtgatcagccaccaggccgtgatgcgctgcctgctggcctacttcctggacaagggagcagatgagctgccctacctgcgctgccccctgcacaccatcttcaagctgacccctgtggcctacggctgcaaggtggagaccatcaagctgaatgtggaggccgtgaacacccaccgggacaagcccaccaacaacttccccaagaaccagacccctgtgaggatgagaagaaacagcttcacccccctgagcagcagcaacaccatcagaagacccaggaactacagcgtgggcagccggcccctgaagcccctgagccccctgcgggcccaggacatgcaggagggcgctgactag

SEQ ID NO: 298252 - DNA, 1419 bp, Artificial Sequence
  derived and/or modified sequence
atgaccaacagccccaccctcatcgtgatgattggcctgcctgcccggggcaagacctacgtgtccaagaagctgacccgctacctgaactggattggagtgcccaccaaggtgttcaacctgggcgtgtacagaagagaggccgtgaagagctacaagagctatgacttcttcagacatgacaatgaggaggccatgaagatcaggaagcagtgtgccctggtggccctggaggatgtgaaggcctacctgacagaagaaaatggccagattgctgtgtttgatgccaccaacaccacccgggagcggcgggacatgatcctgaactttgctgagcagaacagcttcaaggtgttctttgtggagagcgtgtgtgatgatcctgatgtgattgctgccaacatcctggaggtgaaggtgagcagcccagactacccagagaggaacagagaaaatgtgatggaggacttcctgaagagaattgagtgctacaaggtgacctaccggcccctggaccctgacaactatgacaaggacctgtccttcatcaaggtgatcaacgtgggccagcgcttcctggtgaacagagtgcaggactacatccagagcaagatcgtgtactacctgatgaacatccacgtgcagcccaggaccatctacctgtgccgccacggggagagcgagttcaacctgctgggcaagattggaggagacagcggcctgtctgtgcggggcaagcagtttgcccaggccctgaggaagttcctggaggagcaggagatcacagacctgaaggtgtggaccagccagctgaagaggaccatccagacagctgagagcctgggcgtgccctatgagcagtggaagatcctgaatgaaattgatgctggggtgtgtgaggagatgacctatgcagaaattgagaagcgctacccagaggagtttgccctgcgggaccaggagaagtacctgtaccgctacccaggaggagagagctaccaggacctggtgcagaggctggagcccgtcatcatggagctggagcggcagggcaatgtgctggtgatcagccaccaggccgtgatgcgctgcctgctggcctacttcctggacaagggagcagatgagctgccctacctgcgctgccccctgcacaccatcttcaagctgacccctgtggcctacggctgcaaggtggagaccatcaagctgaatgtggaggccgtgaacacccaccgggacaagcccaccaacaacttccccaagaaccagacccctgtgaggatgagaagaaattccttcacccccctgagcagcagcaacaccatccggcggcccaggaactacagcgtgggcagccggcccctgaagcccctgagccccctgcgggcccaggacatgcaggagggcgctgactag

SEQ ID NO: 298253 - DNA, 1518 bp, Artificial Sequence
  derived and/or modified sequence
atgagcggcgccagcagcagcgagcagaacaacaacagctacgagacaaagaccccgaacttgcggatgagcgaaaagaaatgcagttgggcgagctacatgacaaacagccctacgctcatcgttatgatcggactcccagcccgcggcaaaacttatgtgtctaaaaaacttactcgctacctgaattggatcggggtcccgactaaagtctttaacttgggggtgtatcgacgggaggccgtgaagtcttataagtcctatgatttttttaggcatgataatgaggaggccatgaaaattagaaagcagtgtgccctcgtggcgctagaggacgtgaaagcctacctgactgaggagaacgggcagatcgccgtctttgacgctaccaacactaccagagagaggcgggacatgatacttaacttcgcagaacagaactcctttaaagtttttttcgtggagtccgtttgtgacgaccctgatgttatagcagctaatattctggaggtcaaggtgtcatcccccgactatcccgaaaggaacagagagaatgtgatggaggatttcttgaagagaatcgaatgctataaggtaacctacaggccgcttgatcccgataactacgacaaggacctgtcatttatcaaagtgattaatgtggggcaaagattcctggtcaacagagtgcaagactacatccagtcgaaaatagtgtattatctcatgaatatccatgtgcaaccccgtacgatttatctgtgtaggcatggcgaatctgagttcaacctgttgggcaaaattggcggggatagcggactgtcagttagagggaaacagttcgcgcaggccctgaggaaattcctggaagaacaagagattaccgacctgaaggtgtggacaagtcagttaaaacgaacgattcaaaccgcagagagtctgggcgtcccctacgaacagtggaagattctcaatgaaatagacgctggtgtatgtgaagagatgacctacgccgaaattgagaagcgctaccctgaggaatttgcacttcgggatcaggaaaaatatttgtacagatacccgggtggggagtcctatcaggacctagtgcagcgcctggaacctgtgatcatggaactggagcggcaggggaatgtgctcgtcatttcccatcaggccgttatgcggtgcctgcttgcatacttcctggacaaaggagccgacgagttaccgtaccttagatgccctctccataccatttttaaactcactcccgttgcctacggatgcaaggtggaaacaataaagttaaacgttgaggcggtgaatacgcacagggacaagcccactaataattttccaaagaatcaaacccccgtaaggatgaggcgaaatagttttacgcccctgtcttccagcaataccatcagaaggcctaggaactattccgttggcagtcgtcctttgaagcctctctcccctctgagagcgcaggatatgcaggagggggccgattag

SEQ ID NO: 298254 - DNA, 1419 bp, Artificial Sequence
  derived and/or modified sequence
atgaccaacagccccaccctgatcgtgatgatcggcctgcccgccaggggcaaaacatacgtgagcaaaaaactgaccaggtatctgaactggatcggcgttccaaccaaggtgttcaacctcggcgtataccgcagggaggccgtcaagagctacaaatcttacgactttttcagacatgataacgaggaggcaatgaaaatccgaaagcagtgcgccctggtagccctagaagatgtaaaagcatatttgactgaggaaaatggccaaatcgcagtttttgatgccactaacacaacacgcgagcggcgtgatatgatcctgaattttgccgaacaaaactcttttaaggttttctttgtggagtcggtatgtgatgacccggacgttatcgcagctaatatcttggaggtgaaggtctccagtcctgactaccccgaaaggaatcgagagaatgttatggaagatttcttaaagcgaattgaatgctacaaagttacataccgacccttggaccccgacaactacgataaggatcttagcttcatcaaggtcatcaacgtgggccaacggttcttggttaaccgggtgcaggattatatccagagtaagatcgtttattacctgatgaatatccacgtccagccacgcacaatttacctatgcagacacggtgagtcagaattcaatcttctgggaaagatcggaggcgatagtggcctgagtgtcaggggtaaacagtttgcccaggcgctgagaaaattcctcgaggaacaggagataacagacctcaaggtctggacttcacaactcaagcggactatccagaccgccgagtctttgggagttccatatgagcagtggaagatactcaacgagatcgatgccggcgtctgtgaggaaatgacctacgctgaaattgagaaacgatatccagaggagtttgcactgcgcgatcaggagaaatacctatacagatatccaggcggagagagctatcaagacctggtacagcggctggaacctgtaatcatggagctggagcggcagggcaatgtgttagtcattagtcaccaggccgtcatgagatgtctgctggcctattttctggacaagggtgccgatgaactgccatacttgcggtgccccctgcataccatcttcaaactcacacccgtggcctatggctgcaaggtagagacaatcaaactgaacgttgaagcagtgaatacgcacagagacaagccgactaacaattttcccaagaaccaaacgcccgttcggatgaggaggaattcgtttactcctctgtcttcctcaaatacgataagaagaccgcgcaactattcagtgggatcccgtcctctgaagccactgagccctctgcgggctcaggacatgcaggagggagccgactag

SEQ ID NO: 298255 - DNA, 1518 bp, Artificial Sequence
  derived and/or modified sequence
atgagcggcgctagttcatccgagcagaataataacagctatgaaacaaagacccccaacttgcggatgtcagagaagaagtgcagctgggcatcgtacatgacaaacagtccaaccctgattgtgatgatagggctcccagcaaggggcaaaacttatgtctccaaaaaactgactcgttatctgaactggattggcgtcccaacaaaagtatttaatctgggggtgtacagacgcgaagcggtcaagtcttacaagtcctacgacttttttaggcacgataatgaggaggcaatgaagatccggaaacagtgcgcgctggtggccttggaggacgtcaaagcgtatctcactgaagagaacggccagattgctgtctttgatgctaccaacactactcgggaacgccgtgacatgattttgaacttcgccgagcagaattcgttcaaagtgttcttcgttgaatcggtttgcgatgatcctgatgttatcgccgctaatatcctcgaagtaaaggtatcgtcaccggactatcctgagcggaacagggagaatgtcatggaagactttctaaaaaggatcgagtgttacaaagtcacgtaccggccactggaccccgataactatgacaaagacctctcattcattaaagtgataaacgtgggccaaagattcctcgtgaatcgagtgcaagactatatccagagcaaaatcgtgtactatctgatgaacatccatgtccaaccaagaacgatctatctatgccgtcatggcgaatcagagttcaatctgctgggaaagatcgggggagattcgggattatcagtgaggggtaagcaatttgcccaggccctgcggaaatttcttgaggaacaggagatcaccgatctcaaggtgtggacttcgcaacttaagaggacaatccaaactgccgaatccttgggagtcccatacgagcaatggaagatccttaacgagattgatgcaggagtgtgtgaggagatgacgtatgcagaaatcgagaagaggtaccccgaagaattcgctctgagagatcaagagaagtacctgtaccgctatcctggcggtgagtcttaccaggatctcgtccaacgattggagccagtgattatggagttggaacggcaggggaacgtgttggtcatttcccaccaagccgttatgaggtgtttgttggcctattttctggacaagggcgctgacgagctaccatacttgcgttgcccactgcatacgatcttcaagctcacgcctgtggcatatggatgcaaggttgagacaatcaaactgaacgtggaggcggtcaacacccacagagacaagcctaccaacaacttcccaaaaaaccagacccctgtgcgcatgagaagaaactcctttactcctctatcctcctcaaatacaattaggagacccaggaactacagtgtgggatctcggccactaaagcccttgtccccactgcgggcacaagatatgcaagagggtgccgactag

SEQ ID NO: 298256 - DNA, 1419 bp, Artificial Sequence
  derived and/or modified sequence
atgacaaattcccccaccttgatagttatgatcggcctgccagcacgagggaagacctacgtcagcaagaagttgacccgctacctcaactggattggcgtgcctacgaaagtcttcaaccttggggtatacaggagggaagcagttaagtcttataaatcgtatgacttctttaggcatgataatgaggaagccatgaagatcaggaagcagtgcgctcttgtcgctctggaggatgtcaaagcatacctcacagaggaaaacggccaaatcgccgtgtttgatgctacaaatactacccgagaacggagagacatgatcctaaacttcgccgagcagaacagctttaaggtttttttcgtggaaagtgtgtgtgacgatccagatgtgattgctgccaacattctggaagtcaaggtctccagtcctgattatcctgagaggaaccgggaaaacgtgatggaagacttcttgaagcggatcgagtgttataaggtgacctacaggcccttggaccccgacaattatgataaggacctcagttttatcaaagtcataaatgtcggtcagcggtttctcgtgaacagggtgcaggattacatccaaagcaaaatcgtgtactatctcatgaacatccacgtgcaacctaggacaatctacctgtgtagacacggcgagtcggagttcaacctcttaggtaagattggcggtgattccggactctctgttaggggaaaacagttcgctcaggcccttagaaagttcctggaggaacaggagattacagatctgaaggtgtggacaagtcagctaaaacgcaccattcagaccgccgaatccctgggggtgccatacgagcagtggaaaattctgaacgaaattgacgccggagtatgcgaagagatgacttatgctgagatcgagaagcgctatccggaagaatttgcattgcgagaccaggaaaaatacctgtaccgataccctggcggagagtcctatcaggatctcgtgcagaggctagaaccggtaatcatggaacttgagcgtcaggggaacgtgctggttatctcacaccaggccgttatgcgctgcttattggcttacttcttggacaagggcgctgacgaactgccttacctgagatgcccactccatacgatttttaaactgaccccggttgcgtacgggtgtaaggtggaaacaataaagctgaacgtcgaggccgtgaatacacaccgcgataagccaaccaataatttccctaaaaatcagacgcccgtcagaatgcgccgtaacagcttcactcctctctccagttcaaacaccattaggcggccacgtaactacagtgtggggtcccgccctcttaagcctttgagcccgttacgcgcacaggatatgcaagaaggcgctgactag

SEQ ID NO: 298257 - DNA, 7094 bp, Artificial Sequence
  derived and/or modified sequence
ggcgactgtagcgccggtcccggccacaagctgtcggctcggttcggtcgcgttacagggcaggcgccggggccaaggcagggagggatcttaggagagatcgtaggacatctgaagagctgccatgtctggggcatcttcctcagaacagaacaacaacagctatgaaaccaaaaccccaaatcttcgaatgtcagagaagaaatgttcatgggcctcctacatgaccaactccccgactctgatcgttatgattggtttgccagcccggggtaaaacctacgtgtccaagaaactaacacgctacctcaactggattggagtccccaccaaagtgtttaatcttggggtgtatcggcgtgaagcagtcaagtcctataagtcctacgacttctttcggcatgacaatgaggaggccatgaagatccgcaaacagtgtgctctggtggcgctggaagatgttaaggcgtatctcactgaggagaatggtcagattgcggtgtttgatgccaccaatacaacccgggagaggagggacatgattttgaactttgctgaacagaattccttcaaggtattctttgtggaatccgtctgtgatgatcctgatgtcattgctgccaatattctggaggttaaggtatcaagccctgactatcctgaaaggaacagagagaacgtgatggaggacttcctgaagagaattgaatgctacaaagttacctaccgacctcttgacccagacaactatgacaaggatctttctttcatcaaggtgataaacgtgggccagcgatttttagtcaacagagtccaggactacatccagagcaagatagtctactacctcatgaatatccacgtccagcctcgcaccatttacctttgccggcatggagaaagcgagttcaatctcttggggaagattgggggtgactctggcctctcggtgcggggaaagcagtttgcccaagctctaaggaaatttctggaggaacaggaaataacagacctcaaagtgtggacaagccagttgaagaggaccatacagactgctgaatctctcggggtgccctatgagcagtggaagattctgaatgagattgatgctggtgtgtgtgaagagatgacctatgcagagattgagaaacggtacccagaagagtttgcacttcgagatcaagagaagtatctgtatcgatatcctggtggggagtcataccaggacctggtgcagcggctggagcctgtcatcatggagctggaacgtcagggcaatgtcctcgtcatctcccaccaggctgtcatgcgctgcctcctggcctacttcttggataagggcgcagatgagctaccatacttgagatgccctctccataccatcttcaaacttactcctgtggcctatgggtgcaaagtggaaacaattaaacttaacgtggaggctgtgaacacgcaccgtgacaagccaactaacaacttccccaagaaccaaacccctgtaaggatgagaaggaacagctttacgcctctgtccagttcgaatacaataaggcgtccaagaaattacagtgttgggagccggcccctcaagcccctcagccctctccgtgcccaggacatgcaagaaggggccgactagccgaagacccaagtcagcattccggtggtgtaactgtgtgtttccctccagccctggcctcctgcccttgtcactaatcaccaaggagtcattaacttcctccctctatgcccacccctgacacttcaccattaatcttaacacagaacatgaggttatgtgtttataggacaacttaagctgttcttcagtttgaaacatcttttcacccaggggcaagttagcaaattgagtcttttaggacagattctcagatgggatgatctggaggaggaggaaaaagatacactcccttggggctgagcatgccccacactcttggatcttctctctgttccctggtgtcttcactaatgtcctcatgttggtgaagtgttgggggatggagggcgggtgagcagtcgggggacaaaaagtctatttttccttcacttttgtctcttcaatgtgtgttttcctcacactccttacttgactgctttcttcccccactttcatgtcccctctggattgtccagtgtaatgcatggcattgtggtgtctgtctaggaaggaaggggtgattgacaagagacaagtctggcccagttaatgctttctgcagtgggtctaaatggatctggactggaggagtctttcctttcctttctcccttcctctccagccaggtcctgtaagggccagcccagactacaggacatccacagaatattctggagcttgcaagtagacatagggtgagagttcttgcctcctttcatgagaaacagttctaagtcttcgatgccctgggagaatctggctctgagcatgtgggaaatgtcttggtttttatttttaatttagagtcaggcctgggtcttttgaggtctgcagagtggggtttaggagagtagggtgggctctagctcttgcagggctcttagagagcagtcatgtcttttctcccatgactctcaggttctttgccaatcacagcaacttttcctgccaaagccagtatcctctggggctgtttagaagggcagttagattcaggagtcaccactgatgtttgagttgctcaaggcaagaggcagagaagagttcactaaaactgcttatttttgaataatttcagcacactgtccttaagaagaaagaaacatcaaaacaaaatagtttttacatgaccatttttttcccaaatgtggaaaagcttgatgatgaatttaatctctctcattggagtattcttttgttcataaagagaaactatctcatcttgatgtccagagaagtccttggaaccctgtgggatctagctcgtaactgtttgtatttctctattcacttctgtcatttcattttctttgtagggttaaacagaaaatgtttagggaagaaattcttagccccttgatgaccatgatggcttattctctttcccaattttgcatgcaaaatgtacgaatatatgtatgtttttctgagaggcaagtttagggttctcatgggattttaaaaagagataggtgactccccaccttaaagttatctgctggtcttttagaggtaaccagtgagaaggagttagctattttccaagggtgttttcatttggtaatggaagactttttgctgtggttctcatccaggagtattccttagaattgcctttaggattgttgaatcataaacatgcctgtgtccaccttatgcttaatactgactcagaatctctgggatctgggtctggacatgcatgtatttaagtagcttcccggatgattctgattcatagctcgggttaagaactccaccttaggaagttaggtggaaaaatactggatagtagtttctcagacaaaagtgtcagcctaggaattctgaattcctcatagtcctgaaaggacagttctttgggtttgatgtttgagcagatcataatgttaaatgatataaccccctggaaggcaggctgctgtgttttagagggttattctaggttctagtcccatctttaaccctttacattgctgagtgatgtggaacaaatcactgaattaaataattgtctctagagagcagctggggattttaagcaccctggagagaggtgcagaccctgccaggatgataaaggttgtcatcactggcaactgactcctgaccccgggtcctttactcgtatgtcccaagtaggataccataggcagcttctaaaggctgcttacctagattcttctcaaaattgtgtccaagatgttaagtaacctgctattcctgtttagtggttacataacatgtacttagtgtctttgtggagctttgggctggtaggggcagggataggggaaagctaaacagaagtagaagaaaaggtccttgtccagaggaaggttattttaagagacaggacatgtaatttataacaaatggacatttgcaatatagcaacagtctgagtctagaagtgttcaaccatcacatcgcttctcctgacttttctgttgtcctatggctatgagactacaggggttgggggatggggatgcccccaccaccaccagtgtgagaatgagatatggttggggaggcgtgtttggcacttttacaaggttgcattgtccacatttgcttggatggtggcatctgtagcccaaatgggcattcagtcttttcttctgctgtgaggtaagagtaattcagacctaatgaatgagaagagggagcactttgatccacagactttggattaacactgtacccactcttagcaaaaggggacttctctaacaagctagcattgtgttaacctgtcattaacccagcattagagacaggtcactgggatgttcattctggctctcagcctgctgttatttccccactctcacctgtgctagttcgctttctccagaagaggagctgaggtggtcttatcctcagataggacatgagaaattggaatttggcaagcaagggcttcagcatcctttagtttctaaagcaagatcccttcagagaagtctagcaggaagaagccaggagaatgtagaatggaaaagagctcttactccaaattttagagaagtttcagctctacttctcatcttttctctcctggtcttacttgaatgcatgttggtaatctgtatacattactatgactgtgtctatcacaagtcctacaaaataaaaatggacttaaaagtactctctgctgaggctgtaagttttgttttgtgagaaataggtaaagacattagcatttaatctactggaataagctggttgctgtggcttatacctgtagtcccagatacttgggaggctgaggcaggagaatcacttgagaccagcctgggcaatatagtgagacctcacctctaaaaaagttttttataaatttacttgtctaaagtggggaaagggaaattattctgttttcttattcttgcttcaagactatgacagatttgaaagagaattctaaagcagatttagagaacctgcttctcttcttatctcctaatccctaaattgtaatttagctcttatctgtattgttgttttgttttggtaaagggatgatttttacattgagttttaaagtagaataagaaaagcttctaaaaacttgcattgtgctagggatctgccctatatctttgcctctggtgtttcgttgttgttgttattgtttgtttgtttccaaagaagttggagttaaggacacaatatatttgtacccctagactgaatgggtgagtattccatatgaggatctgggtaatcctctttgcaacccacatttggtcttcagagacactggcattttgaagaaacatatgatatagctgtttggaaataaattcatctatgttactttttttttcttttttttttttttttatgagcaggagatcttaattgacagaaactcattggtggttggagtggccaatgggcacgggaaaaagtatccagtaatcagaagaattgtatctgggttatgtaatcttatgcacattccattgtctttgccaagcccagaagccatgttgtgttcattgttaagaaatttgatagatttacccagcttttctatgtattttgacttattgaaaatatgtaacaactgagtcgggttgcagcactggtggggtagaatcgactttccctgaaggtgacacagatgtcagaattgtgtccagggatttaatttagacccatactgtccaggagactgtctctagttggatctctgtgctgactgactgacagacagactttagtgtctgtgtgctgactgacagactctagtagtgtctatatgttgaccaactggtagaccaggaggatctgtgtgctgattgactctagtaggatctgtttgtcactgacagactgtagtagtgtctgtgtgctgactgatagatagactatagtaaaatttgggtgttgcctgactaacggtctagggtctgtaagctgacagtctgcctgctttctgattgtatccattgaagtgtatgtacattatggtaattctctgtctattaaatgtgtctaacaaaggaaggaattaagcactccacgtgttttctttataggggagttctgtacactatgattttaaatagatatttcttatatagtagtggccaaattctcattattttgtacaagataaaggttatgcatcacttttatggtattttgtgaactcagctaagggaatgcctgttcagagcctggagttgttacctttacttgaagtcatctcatccagtcccctgctttagggcaggacttcagttccactgttcatttctgaagcttctgtgtccccagcttaccctgttctgaaatgttgtattccattggacagggctgctatttttagtcagccatgcatttggattttacacttaatctagtaagtaaaaatgagaagaaaatttggcatttaaaaattgattttaagggttggcaaaagtattttttccagtaagcctttcactggatatctgtgaccaatgtttacctacgcaatgtttttgtatctgaattgcttatgtacgttttttattatattgacctaacaagaagatcaacttatgctggtatggtgatggttttgctatggcaaaatcaaagggctgatcatacatggtgccctttgggaagggggatggtgtggggctgagcacctctgggttgaatgggaatgggtcagattgggaagcctaggaagagagttctactgtagatttcctaggcactgctctgttgaaataggaacataagtctttagcaacattctgatttaatcgggtgacactgataacaaagtatgccactcagatccatttaaagtgtgcataactgtatttgaaatgtgtttttgtgtgcgtgtgtgtagaatgggtaaataaaattgttgagtaacttgaacctatcagaa

SEQ ID NO: 298258 - DNA, 1679 bp, Artificial Sequence
  derived and/or modified sequence
gacatctgaagagctgccatgtctggggcatcttcctcagaacagaacaacaacagctatgaaaccaaaaccccaaatcttcgaatgtcagagaagaaatgttacgaagtcttgctctgtcgcccaggctggagtgcagtgacgggatcatggctcactgcaaccttgaactcctgagctcaagcaatcctcctgagtagctgggactatagcatgggcctcctacatgaccaactccccgactctgatcgttatgattggtttgccagcccggggtaaaacctacgtgtccaagaaactaacacgctacctcaactggattggagtccccaccaaagtgtttaatcttggggtgtatcggcgtgaagcagtcaagtcctataagtcctacgacttctttcggcatgacaatgaggaggccatgaagatccgcaaacagtgtgctctggtggcgctggaagatgttaaggcgtatctcactgaggagaatggtcagattgcggtgtttgatgccaccaatacaacccgggagaggagggacatgattttgaactttgctgaacagaattccttcaaggtattctttgtggaatccgtctgtgatgatcctgatgtcattgctgccaatattctggaggttaaggtatcaagccctgactatcctgaaaggaacagagagaacgtgatggaggacttcctgaagagaattgaatgctacaaagttacctaccgacctcttgacccagacaactatgacaaggatctttctttcatcaaggtgataaacgtgggccagcgatttttagtcaacagagtccaggactacatccagagcaagatagtctactacctcatgaatatccacgtccagcctcgcaccatttacctttgccggcatggagaaagcgagttcaatctcttggggaagattgggggtgactctggcctctcggtgcggggaaagcagtttgcccaagctctaaggaaatttctggaggaacaggaaataacagacctcaaagtgtggacaagccagttgaagaggaccatacagactgctgaatctctcggggtgccctatgagcagtggaagattctgaatgagattgatgctggtgtgtgtgaagagatgacctatgcagagattgagaaacggtacccagaagagtttgcacttcgagatcaagagaagtatctgtatcgatatcctggtggggagtcataccaggacctggtgcagcggctggagcctgtcatcatggagctggaacgtcagggcaatgtcctcgtcatctcccaccaggctgtcatgcgctgcctcctggcctacttcttggataagggcgcagatgagctaccatacttgagatgccctctccataccatcttcaaacttactcctgtggcctatgggtgcaaagtggaaacaattaaacttaacgtggaggctgtgaacacgcaccgtgacaagccaactaacaacttccccaagaaccaaacccctgtaaggatgagaaggaacagctttacgcctctgtccagttcgaatacaataaggcgtccaagaaattacagtgttgggagccggcccctcaagcccctcagccctctccgtgcccaggacatgcaagaaggggccgactagccgaagacccaagtcagcattccggtggtgtaac

SEQ ID NO: 298259 - DNA, 1518 bp, Artificial Sequence
  derived and/or modified sequence
atgagcggcgccagcagcagcgagcagaacaacaacagctacgagaccaagacccccaacctgagaatgagcgagaagaagtgcagctgggccagctacatgaccaacagccccaccctgatcgtgatgatcggcctgcccgccagaggcaagacctacgtgagcaagaagctgaccagatacctgaactggatcggcgtgcccaccaaggtgttcaacctgggcgtgtacagaagagaggccgtgaagagctacaagagctacgacttcttcagacacgacaacgaggaggccatgaagatcagaaagcagtgcgccctggtggccctggaggacgtgaaggcctacctgaccgaggagaacggccagatcgccgtgttcgacgccaccaacaccaccagagagagaagagacatgatcctgaacttcgccgagcagaacagcttcaaggtgttcttcgtggagagcgtgtgcgacgaccccgacgtgatcgccgccaacatcctggaggtgaaggtgagcagccccgactaccccgagagaaacagagagaacgtgatggaggacttcctgaagagaatcgagtgctacaaggtgacctacagacccctggaccccgacaactacgacaaggacctgagcttcatcaaggtgatcaacgtgggccagagattcctggtgaacagagtgcaggactacatccagagcaagatcgtgtactacctgatgaacatccacgtgcagcccagaaccatctacctgtgcagacacggcgagagcgagttcaacctgctgggcaagatcggcggcgacagcggcctgagcgtgagaggcaagcagttcgcccaggccctgagaaagttcctggaggagcaggagatcaccgacctgaaggtgtggaccagccagctgaagagaaccatccagaccgccgagagcctgggcgtgccctacgagcagtggaagatcctgaacgagatcgacgccggcgtgtgcgaggagatgacctacgccgagatcgagaagagataccccgaggagttcgccctgagagaccaggagaagtacctgtacagataccccggcggcgagagctaccaggacctggtgcagagactggagcccgtgatcatggagctggagagacagggcaacgtgctggtgatcagccaccaggccgtgatgagatgcctgctggcctacttcctggacaagggcgccgacgagctgccctacctgagatgccccctgcacaccatcttcaagctgacccccgtggcctacggctgcaaggtggagaccatcaagctgaacgtggaggccgtgaacacccacagagacaagcccaccaacaacttccccaagaaccagacccccgtgagaatgagaagaaacagcttcacccccctgagcagcagcaacaccatcagaagacccagaaactacagcgtgggcagcagacccctgaagcccctgagccccctgagagcccaggacatgcaggagggcgccgactag

SEQ ID NO: 298260 - DNA, 1419 bp, Artificial Sequence
  derived and/or modified sequence
atgaccaacagccccaccctgatcgtgatgatcggcctgcccgccagaggcaagacctacgtgagcaagaagctgaccagatacctgaactggatcggcgtgcccaccaaggtgttcaacctgggcgtgtacagaagagaggccgtgaagagctacaagagctacgacttcttcagacacgacaacgaggaggccatgaagatcagaaagcagtgcgccctggtggccctggaggacgtgaaggcctacctgaccgaggagaacggccagatcgccgtgttcgacgccaccaacaccaccagagagagaagagacatgatcctgaacttcgccgagcagaacagcttcaaggtgttcttcgtggagagcgtgtgcgacgaccccgacgtgatcgccgccaacatcctggaggtgaaggtgagcagccccgactaccccgagagaaacagagagaacgtgatggaggacttcctgaagagaatcgagtgctacaaggtgacctacagacccctggaccccgacaactacgacaaggacctgagcttcatcaaggtgatcaacgtgggccagagattcctggtgaacagagtgcaggactacatccagagcaagatcgtgtactacctgatgaacatccacgtgcagcccagaaccatctacctgtgcagacacggcgagagcgagttcaacctgctgggcaagatcggcggcgacagcggcctgagcgtgagaggcaagcagttcgcccaggccctgagaaagttcctggaggagcaggagatcaccgacctgaaggtgtggaccagccagctgaagagaaccatccagaccgccgagagcctgggcgtgccctacgagcagtggaagatcctgaacgagatcgacgccggcgtgtgcgaggagatgacctacgccgagatcgagaagagataccccgaggagttcgccctgagagaccaggagaagtacctgtacagataccccggcggcgagagctaccaggacctggtgcagagactggagcccgtgatcatggagctggagagacagggcaacgtgctggtgatcagccaccaggccgtgatgagatgcctgctggcctacttcctggacaagggcgccgacgagctgccctacctgagatgccccctgcacaccatcttcaagctgacccccgtggcctacggctgcaaggtggagaccatcaagctgaacgtggaggccgtgaacacccacagagacaagcccaccaacaacttccccaagaaccagacccccgtgagaatgagaagaaacagcttcacccccctgagcagcagcaacaccatcagaagacccagaaactacagcgtgggcagcagacccctgaagcccctgagccccctgagagcccaggacatgcaggagggcgccgactag

SEQ ID NO: 298261 - protein, 764 aa, Artificial Sequence
  derived and/or modified sequence
MLLFVLTCLLAVFPAISTKSPIFGPEEVNSVEGNSVSITCYYPPTSVNRHTRKYWCRQGARGGCITLISSEGYVSSKYAGRANLTNFPENGTFVVNIAQLSQDDSGRYKCGLGINSRGLSFDVSLEVSQGPGLLNDTKVYTVDLGRTVTINCPFKTENAQKRKSLYKQIGLYPVLVIDSSGYVNPNYTGRIRLDIQGTGQLLFSVVINQLRLSDAGQYLCQAGDDSNSNKKNADLQVLKPEPELVYEDLRGSVTFHCALGPEVANVAKFLCRQSSGENCDVVVNTLGKRAPAFEGRILLNPQDKDGSFSVVITGLRKEDAGRYLCGAHSDGQLQEGSPIQAWQLFVNEESTIPRSPTVVKGVAGGSVAVLCPYNRKESKSIKYWCLWEGAQNGRCPLLVDSEGWVKAQYEGRLSLLEEPGNGTFTVILNQLTSRDAGFYWCLTNGDTLWRTTVEIKIIEGEPNLKVPGNVTAVLGETLKVPCHFPCKFSSYEKYWCKWNNTGCQALPSQDEGPSKAFVNCDENSRLVSLTLNLVTRADEGWYWCGVKQGHFYGETAAVYVAVEERKAAGSRDVSLAKADAAPDEKVLDSGFREIENKAIQDPRLFAEEKAVADTRDQADGSRASVDSGSSEEQGGSSRALVSTLVPLGLVLAVGAVAVGVARARHRKNVDRVSIRSYRTDISMSDFENSREFGANDNMGASSITQETSLGGKEEFVATTESTTETKEPKKAKRSSKEEAEMAYKDFLLQSSTVAAEAQDGPQEA

SEQ ID NO: 298262 - DNA, 2295 bp, Artificial Sequence
  derived and/or modified sequence
atgctgctgttcgtgctaacctgtctgctagctgtattccctgcaatctcgactaagtcccccatcttcggcccagaggaagtgaactctgtggagggcaacagcgtttccattacctgctactaccctcctacatctgttaaccggcacacccgtaaatactggtgccggcagggcgctagaggcggctgcatcacacttatttcaagcgaaggctacgtgtcatccaaatacgccggtagagccaacctaaccaatttccctgagaacggcaccttcgtggtgaatatcgctcagctttcccaagacgacagtggaaggtacaagtgtggcctggggattaacagccgtgggctgtcctttgatgtcagtttagaagtttcccaggggcctggactgctcaatgacacaaaagtctatactgttgaccttggacgtactgttactataaactgcccttttaaaacagagaatgctcagaagaggaaaagcttatataagcaaatcgggttgtatcctgtcctggtcatagattcctcaggctacgtcaaccctaactatactgggaggatacggctagatatccagggtacaggccagctgctttttagtgtcgtcataaaccaactgcgactttcagatgccgggcagtacctatgtcaggctggcgacgactctaacagtaataaaaaaaatgccgacctccaagtcctaaagccagaacccgagctggtgtatgaggacctccgcggttcagttaccttccactgcgctctcggccccgaagtcgcgaatgtggccaaattcctctgccgccaatcctcaggcgaaaactgcgacgtagtagttaataccctgggcaaaagagctccggctttcgaaggtcggatcttactcaacccacaggataaggatggctcattcagcgttgtgataacaggactgcggaaggaggatgccggcaggtatctatgtggggcgcactccgatgggcagctgcaggagggcagcccaatccaggcctggcagttgttcgttaatgaggagtcgaccatcccccggtcaccgactgtcgtgaaaggagttgcaggcggaagcgttgcagtgctctgcccctataacaggaaagaatcaaagagcatcaaatactggtgtctgtgggagggtgcccagaacgggcggtgtccactgcttgtggatagcgaaggctgggtcaaggcgcaatacgagggacgtctctccttgcttgaggagcctggaaacggcaccttcactgtgattctaaatcagcttacttcccgcgatgccggtttctactggtgtctaactaacggcgacacactttggcggaccaccgtagagattaagattatagagggggagccaaatctcaaagtgcccggtaacgtcacagccgtgctgggtgaaacgctgaaggtgccctgtcatttcccatgcaagttcagtagttatgaaaaatattggtgtaaatggaacaatacagggtgccaagcacttccctcacaagacgaggggccatcaaaagcctttgtgaattgtgacgagaactcccgactggtgtctctgactttgaatctggtcacacgggcggacgagggatggtactggtgtggtgttaagcaggggcatttctatggagagaccgccgcagtgtatgttgcggttgaagaaaggaaggctgccggctcaagggatgttagcctggccaaagcagatgcagcccccgacgagaaggtgctcgacagtggattccgagagatcgagaacaaggccatccaggacccccgactatttgcagaggaaaaagctgtcgctgacacaagagaccaggcagacggctctcgcgcgtcagtggattctggatctagcgaggagcagggtgggtccagccgagcgcttgtgagtactctggtgccgctgggcctggtgctcgcagtgggcgcagtcgcagtcggggttgcaagggcccgccaccgaaaaaacgtagatcgtgtgagcatccgatcgtatagaacggatattagcatgagcgactttgagaattcacgagagttcggtgcgaacgacaacatgggggcgagctccataactcaggagacctccctcggtggtaaggaggagtttgtggcaacaaccgagagtaccacagagacaaaggaacctaaaaaggcaaagagaagttctaaagaggaagctgaaatggcatataaagactttctgctacagtcatccactgtagccgctgaagcccaggatggtccccaggaggcttag

SEQ ID NO: 298263 - DNA, 2295 bp, Artificial Sequence
  derived and/or modified sequence
atgctgctgtttgtgctgacctgcctgctggccgtgtttcctgccatcagcaccaagagccccatctttggacctgaggaggtgaacagcgtggagggcaacagcgtgtccatcacctgctactacccacccacctctgtgaacagacacaccaggaagtactggtgccggcagggcgcccggggcggctgcatcaccctcatcagcagcgagggctacgtgagcagcaaatatgccggccgggccaacctgaccaacttcccagaaaatggcacctttgtggtgaacatcgcccagctgagccaggatgattctggccgctacaagtgtggcctgggcatcaacagccggggcctgagctttgatgtgtccctggaggtgtcccagggccctggcctgctgaatgacaccaaggtgtacacagtggacctgggccgcacagtgaccatcaactgccccttcaagacagaaaatgcccagaagaggaagagcctgtacaagcagatcggcctgtaccctgtgctggtgattgacagcagcggctacgtgaaccccaactacacaggccgcatccggctggacatccagggcaccggccagctgctcttctctgtggtgatcaaccagctgcggctgagtgatgctggccagtacctgtgccaggccggagatgacagcaacagcaacaagaagaatgctgacctgcaggtgctgaagccagagcctgagctggtgtatgaggacctgcggggctctgtgaccttccactgtgccctgggccctgaggtggccaacgtggccaagttcctgtgccggcagagcagtggagagaactgtgatgtggtggtgaacaccctgggcaagagggccccagcctttgagggccgcatcctgctgaacccccaggacaaggatggcagcttctctgtggtgatcaccggcctgaggaaggaggatgctggccgctacctgtgtggggcccacagtgatggccagctgcaggagggcagccccatccaggcctggcagctgtttgtgaatgaggagagcaccatccccaggagccccaccgtggtgaagggcgtggccggcggctctgtggccgtgctgtgcccctacaacaggaaggagagcaagagcatcaagtactggtgcctgtgggagggcgcccagaatggccgctgccccctgctggtggacagcgagggctgggtgaaggcccagtatgagggccgcctgagcctgctggaggagcctggaaatggcaccttcaccgtcatcctgaaccagctgaccagcagagatgctggcttctactggtgcctgaccaacggggacaccctgtggaggaccaccgtggagatcaagatcatcgagggggagcccaacctgaaggtgcctggaaatgtgacagctgtgctgggggagaccctgaaggtgccctgccacttcccctgcaagttcagcagctatgagaagtactggtgcaagtggaacaacacaggctgccaggccctgcccagccaggatgagggccccagcaaggcctttgtgaactgtgatgagaacagccggctggtgtccctgaccctgaacctggtgaccagggcagatgagggctggtactggtgtggggtgaagcagggccacttctacggggagacagctgctgtgtatgtggccgtggaggagaggaaggccgccggcagcagagatgtgtccctggccaaggcagatgctgccccagatgagaaggtgctggacagcggcttccgggagattgagaacaaggccatccaggacccccggctgtttgctgaggagaaggctgtggccgacacccgggaccaggctgatggcagccgggcctctgtggacagcggcagcagcgaggagcagggcggcagcagccgggccctggtgtccaccctggtgcccctgggcctggtgctggccgtgggcgctgtggccgtgggcgtggcccgggcccggcacaggaagaatgtggacagagtgtccatccgcagctacagaacagacatctccatgtctgactttgagaacagccgggagtttggagccaatgacaacatgggcgccagcagcatcacccaggagaccagcctgggcggcaaggaggagtttgtggccaccacagagagcaccacagagaccaaggagcccaagaaggccaagaggagcagcaaggaggaggccgagatggcctacaaggacttcctgctgcagagcagcacagtggccgctgaggcccaggacggcccccaggaggcctag

SEQ ID NO: 298264 - DNA, 2295 bp, Artificial Sequence
  derived and/or modified sequence
atgctgctgttcgtgctgacctgcctgctggccgtgttccccgccatttctaccaaaagccctatatttggtcccgaagaagtcaatagcgtggagggcaactcagtgtccattacatgctattacccccctacctctgttaaccgccacacacgcaagtattggtgtagacagggtgctaggggagggtgtatcaccctgatctcatcagagggctacgtgagtagtaagtatgcaggtagagctaatctcaccaatttccccgagaatggtacttttgtggttaacatagctcaactgtcacaggacgactcaggtcgatacaaatgcgggttgggcattaactcacgcggactctcctttgacgttagcctggaggtgtcccagggcccagggctcctgaacgataccaaggtgtacactgtggacctcggaaggactgtgactatcaattgcccttttaagactgaaaatgcacagaagcgcaagtcactatataagcagattggtttataccccgtgctggtgatcgattcttccggatacgtcaatcctaactataccgggaggattaggctggatatccagggcaccggacagcttttatttagcgtcgtgattaaccaactgagactctctgacgccgggcagtatctctgtcaggctggggatgatagcaacagtaacaaaaagaatgcggacctccaggtgttaaagccggagccagagctggtatacgaggatctgagagggtcagtcacctttcactgcgccctgggcccagaggtggccaatgtggcaaaattcttatgtcggcagagttctggagaaaactgcgatgtcgttgttaacaccctgggaaagagagctcctgcctttgagggccggattctactcaacccccaagacaaagatggttccttttctgttgtcattaccggtctgagaaaggaagacgccgggcggtacctatgtggcgcgcatagcgacgggcagctgcaggagggctcacccattcaggcatggcagctctttgtgaatgaagaaagtaccatccctcgctctcccacagtcgtgaagggagttgctggcggtagcgtggccgtcctgtgcccttacaaccgtaaggaaagtaagagtataaagtactggtgtctttgggagggagcccagaacggcaggtgcccactgctagttgactctgaaggctgggttaaagcccagtatgagggccgccttagtctgttggaggaacccggaaatggaacatttacggtgatattgaaccagcttacgtcccgcgacgcgggcttttactggtgcctcaccaatggcgatactctgtggagaactaccgtggaaatcaagattatcgagggggagcctaacctgaaagtgccaggtaatgtcacggctgttctgggtgagacactaaaagtgccctgtcattttccctgcaaattcagtagttacgagaagtattggtgtaagtggaacaatactgggtgtcaagctctcccgtcccaggacgaaggcccaagcaaggccttcgtgaattgcgacgaaaacagccgtctggtaagcctcacactaaacctggtgacccgagccgacgaaggatggtattggtgtggagtgaaacagggccatttttatggagaaacggccgctgtctacgtcgcagtggaagagagaaaggctgcgggttcccgagatgtgagccttgccaaggccgacgccgcaccagacgagaaggtacttgatagtgggttccgcgaaatcgagaacaaggccattcaagaccctcgtttgtttgccgaggagaaagccgtcgctgatacccgcgatcaggcagatgggagcagggcatctgtggactccggaagtagcgaagaacagggcggttcgtctagggccttggtatctaccctggttccactcgggctcgtcttggcggtcggagccgtggctgtgggagttgctcgggccagacaccgcaagaacgttgatcgagtgtctattagaagttatcgcacagatatatccatgtccgactttgagaacagcagagagtttggagcaaatgataatatgggcgcgtcatctataacccaggagacctcactgggaggcaaagaagaatttgtggccacaactgagtcaacaaccgagacaaaggagccgaaaaaagctaagagatctagtaaagaggaggcggagatggcttataaggacttcctgctgcagtctagcactgtcgctgccgaagctcaagacggcccacaagaagcctag

SEQ ID NO: 298265 - DNA, 4279 bp, Artificial Sequence
  derived and/or modified sequence
gagcagagtttcagttttggcagcagcgtccagtgccctgccagtagctcctagagaggcaggggttaccaactggccagcaggctgtgtccctgaagtcagatcaacgggagagaaggaagtggctaaaacattgcacaggagaagtcggcctgagtggtgcggcgctcgggacccaccagcaatgctgctcttcgtgctcacctgcctgctggcggtcttcccagccatctccacgaagagtcccatatttggtcccgaggaggtgaatagtgtggaaggtaactcagtgtccatcacgtgctactacccacccacctctgtcaaccggcacacccggaagtactggtgccggcagggagctagaggtggctgcataaccctcatctcctcggagggctacgtctccagcaaatatgcaggcagggctaacctcaccaacttcccggagaacggcacatttgtggtgaacattgcccagctgagccaggatgactccgggcgctacaagtgtggcctgggcatcaatagccgaggcctgtcctttgatgtcagcctggaggtcagccagggtcctgggctcctaaatgacactaaagtctacacagtggacctgggcagaacggtgaccatcaactgccctttcaagactgagaatgctcaaaagaggaagtccttgtacaagcagataggcctgtaccctgtgctggtcatcgactccagtggttatgtaaatcccaactatacaggaagaatacgccttgatattcagggtactggccagttactgttcagcgttgtcatcaaccaactcaggctcagcgatgctgggcagtatctctgccaggctggggatgattccaatagtaataagaagaatgctgacctccaagtgctaaagcccgagcccgagctggtttatgaagacctgaggggctcagtgaccttccactgtgccctgggccctgaggtggcaaacgtggccaaatttctgtgccgacagagcagtggggaaaactgtgacgtggtcgtcaacaccctggggaagagggccccagcctttgagggcaggatcctgctcaacccccaggacaaggatggctcattcagtgtggtgatcacaggcctgaggaaggaggatgcagggcgctacctgtgtggagcccattcggatggtcagctgcaggaaggctcgcctatccaggcctggcaactcttcgtcaatgaggagtccacgattccccgcagccccactgtggtgaagggggtggcaggaggctctgtggccgtgctctgcccctacaaccgtaaggaaagcaaaagcatcaagtactggtgtctctgggaaggggcccagaatggccgctgccccctgctggtggacagcgaggggtgggttaaggcccagtacgagggccgcctctccctgctggaggagccaggcaacggcaccttcactgtcatcctcaaccagctcaccagccgggacgccggcttctactggtgtctgaccaacggcgatactctctggaggaccaccgtggagatcaagattatcgaaggagaaccaaacctcaaggtaccagggaatgtcacggctgtgctgggagagactctcaaggtcccctgtcactttccatgcaaattctcctcgtacgagaaatactggtgcaagtggaataacacgggctgccaggccctgcccagccaagacgaaggccccagcaaggccttcgtgaactgtgacgagaacagccggcttgtctccctgaccctgaacctggtgaccagggctgatgagggctggtactggtgtggagtgaagcagggccacttctatggagagactgcagccgtctatgtggcagttgaagagaggaaggcagcggggtcccgcgatgtcagcctagcgaaggcagacgctgctcctgatgagaaggtgctagactctggttttcgggagattgagaacaaagccattcaggatcccaggctttttgcagaggaaaaggcggtggcagatacaagagatcaagccgatgggagcagagcatctgtggattccggcagctctgaggaacaaggtggaagctccagagcgctggtctccaccctggtgcccctgggcctggtgctggcagtgggagccgtggctgtgggggtggccagagcccggcacaggaagaacgtcgaccgagtttcaatcagaagctacaggacagacattagcatgtcagacttcgagaactccagggaatttggagccaatgacaacatgggagcctcttcgatcactcaggagacatccctcggaggaaaagaagagtttgttgccaccactgagagcaccacagagaccaaagaacccaagaaggcaaaaaggtcatccaaggaggaagccgagatggcctacaaagacttcctgctccagtccagcaccgtggccgccgaggcccaggacggcccccaggaagcctagacggtgtcgccgcctgctccctgcacccatgacaatcaccttcagaatcatgtcgatcctggggccctcagctcctggggaccccactccctgctctaacacctgcctaggtttttcctactgtcctcagaggcgtgctggtcccctcctcagtgacatcaaagcctggcctaattgttcctattggggatgagggtggcatgaggaggtcccacttgcaacttctttctgttgagagaacctcaggtacggagaagaatagaggtcctcatgggtcccttgaaggaagagggaccagggtgggagagctgattgcagaaaggagagacgtgcagcgcccctctgcacccttatcatgggatgtcaacagaatttttccctccactccatccctccctcccgtccttcccctcttcttctttccttccatcaaaagatgtatttgaattcatactagaattcaggtgctttgctagatgctgtgacaggtatgccaccaacactgctcacagcctttctgaggacaccagtgaaagaagccacagctcttcttggcgtatttatactcactgagtcttaacttttcaccaggggtgctcacctctgcccctattgggagaggtcataaaatgtctcgagtcctaaggccttaggggtcatgtatgatgagcatacacacaggtaattataaacccacattcttaccatttcacacataagaaaattgaggtttggaagagtgaagcgtttttctttttcttttttttttttgagacggagtctctcactgtcgcccaggctggagtgcagtggcgcaatctcggctcactgcaacctccgcctcccaggttgacaccattctcctgcctcaccctcccaagtagctgggactacaggcgcctgccagcacgcctggctaattttttgtatttttagtagagacagggtttcaccgtgttagccaggatggtctcgatctcctgacctcgtgatccgcctgcctctgcctcccaaagtgctgggattacaggcgtgagccaccgcgtccggcctctttttttcttttcttttttttgagacaaagtctcactgtgtcacccagactggaatgcagtgacacaatctcggctcactgaaacctctgccttccaggttcaagctattctcatgcctcagcctctcaagtagctgggactacagatgtgggccaccatgtctggctaattttttttttttttttttttttttgtagagacagggtttcgccatgttgacgagactggtctcgaactcctggcctcaagtgatctgccgcctcagcttctcaaagtactgggattatataggcatgagccactgagcctggccctgaagcgtttttctcaaaggccctcagtgagataaattagatttggcatctcctgtcctgggccagggatctctctacaagagcccctgcccctctgttggaggcacagttttagaataaggaggaggagggagaagagaaaatgtaaaggagggagatctttcccaggccgcaccatttctgtcactcacatggacccaagataaaagaatggccaaaccctcacaacccctgatgtttgaagagttccaagttgaagggaaacaaagaagtgtttgatggtgccagagaggggctgctctccagaaagctaaaatttaatttcttttttcctctgagttctgtacttcaaccagcctacaagctggcacttgctaacaaatcagaaatatgacaattaatgattaaagactgtgattgccaccaacgag

SEQ ID NO: 298266 - DNA, 2295 bp, Artificial Sequence
  derived and/or modified sequence
atgctgctttttgtgctaacgtgccttctggccgtgtttcccgctatctccaccaaaagcccgatttttggtccagaagaggtcaacagcgtcgagggcaacagcgtctctattacatgctactatccacctaccagcgtgaaccgacacactaggaagtactggtgtcgccagggagccagggggggttgtattaccctcatctcctccgagggctatgtgagttccaagtacgcaggcagagcgaacctgactaacttccctgaaaatgggacttttgtggtgaacattgcacagttgtctcaagatgacagcgggagatataagtgcggtctgggtatcaacagtagggggcttagctttgatgtctccctcgaggtgtcgcaaggcccaggacttctaaatgatacaaaggtgtatacagttgacctaggcaggacggttactataaactgtccctttaaaaccgagaatgcacagaagcggaaaagcctgtacaagcagatcgggctctaccctgtgcttgtaattgatagctcgggatacgtgaacccaaattatacagggagaatccgcctggacattcaaggtactggccagttactcttcagtgtggtcattaaccaactacgcctgagtgacgccggacagtacctgtgtcaggccggtgatgactccaattccaataagaagaatgccgacctgcaggtgctcaaaccggaacctgagcttgtgtacgaggacctgagaggaagtgtgacgttccattgtgccctcgggcctgaggtcgctaatgtggccaagttcttgtgtagacagagtagcggcgaaaactgcgacgttgtggtgaatacgctcggaaagagagcccctgcatttgagggaagaattctgctgaaccctcaggacaaagacggctctttctctgtggtgatcactggcttacgaaaagaggatgccggaagatatttgtgcggagcccatagtgacggacagcttcaggaaggctcccctatccaggcttggcagctcttcgtgaatgaagaaagcaccatcccccgaagccctactgtcgttaagggagtggcgggaggctccgtggcggtcctgtgcccgtacaatcgtaaggaaagcaagtcgatcaagtactggtgcctttgggagggggcacagaacggcagatgcccactgttagtggattctgaaggatgggtcaaggcacaatatgaaggtcgccttagcctgctggaagagcctggaaacggtacattcacggtgattttgaaccagctgacttctcgggacgccggtttttactggtgcctaactaacggcgataccctctggcgaaccacagtggagatcaaaattatagagggtgagccgaacctgaaggtgcctggtaatgtaactgcagtgcttggagagactcttaaggtgccttgccattttccatgcaaattcagttcctacgaaaaatactggtgcaagtggaataataccggttgtcaggcactgcccagccaggacgagggcccttccaaagcatttgtaaattgtgatgaaaactctcgcctcgtgagtctcacactcaatttagttactagagccgatgagggctggtactggtgtggtgtgaagcaggggcacttttacggtgagacggccgctgtgtatgtggcagtagaggaacggaaagccgcaggttcccgggacgtctcgctggcgaaggctgatgccgctccagatgaaaaagtcctcgactcagggttcagagaaattgaaaataaggcgatacaggatcccaggctcttcgcagaagaaaaggctgttgcggatacgcgggatcaggcagacggtagcagggcctccgttgacagtggctccagtgaagagcaggggggaagctctcgtgctctcgtgtcaacactggtgccactaggactggtcttggccgttggagctgtggctgtgggcgtggctagagccaggcatagaaaaaacgtggatagagtgagtattaggagttacaggacagatattagcatgtccgactttgagaactccagggaatttggtgccaacgacaatatgggggctagctcaataacacaggaaacctccctggggggtaaggaagagtttgtagccacaaccgaatccacgactgagaccaaggagcctaagaaggccaagagaagcagcaaggaagaagccgaaatggcttacaaagactttttgctacaatcctccaccgtagccgctgaggcccaggacggccctcaggaagcctag

SEQ ID NO: 298267 - DNA, 2295 bp, Artificial Sequence
  derived and/or modified sequence
atgctgctgttcgtgctgacctgcctgctggccgtgttccccgccatcagcaccaagagccccatcttcggccccgaggaggtgaacagcgtggagggcaacagcgtgagcatcacctgctactacccccccaccagcgtgaacagacacaccagaaagtactggtgcagacagggcgccagaggcggctgcatcaccctgatcagcagcgagggctacgtgagcagcaagtacgccggcagagccaacctgaccaacttccccgagaacggcaccttcgtggtgaacatcgcccagctgagccaggacgacagcggcagatacaagtgcggcctgggcatcaacagcagaggcctgagcttcgacgtgagcctggaggtgagccagggccccggcctgctgaacgacaccaaggtgtacaccgtggacctgggcagaaccgtgaccatcaactgccccttcaagaccgagaacgcccagaagagaaagagcctgtacaagcagatcggcctgtaccccgtgctggtgatcgacagcagcggctacgtgaaccccaactacaccggcagaatcagactggacatccagggcaccggccagctgctgttcagcgtggtgatcaaccagctgagactgagcgacgccggccagtacctgtgccaggccggcgacgacagcaacagcaacaagaagaacgccgacctgcaggtgctgaagcccgagcccgagctggtgtacgaggacctgagaggcagcgtgaccttccactgcgccctgggccccgaggtggccaacgtggccaagttcctgtgcagacagagcagcggcgagaactgcgacgtggtggtgaacaccctgggcaagagagcccccgccttcgagggcagaatcctgctgaacccccaggacaaggacggcagcttcagcgtggtgatcaccggcctgagaaaggaggacgccggcagatacctgtgcggcgcccacagcgacggccagctgcaggagggcagccccatccaggcctggcagctgttcgtgaacgaggagagcaccatccccagaagccccaccgtggtgaagggcgtggccggcggcagcgtggccgtgctgtgcccctacaacagaaaggagagcaagagcatcaagtactggtgcctgtgggagggcgcccagaacggcagatgccccctgctggtggacagcgagggctgggtgaaggcccagtacgagggcagactgagcctgctggaggagcccggcaacggcaccttcaccgtgatcctgaaccagctgaccagcagagacgccggcttctactggtgcctgaccaacggcgacaccctgtggagaaccaccgtggagatcaagatcatcgagggcgagcccaacctgaaggtgcccggcaacgtgaccgccgtgctgggcgagaccctgaaggtgccctgccacttcccctgcaagttcagcagctacgagaagtactggtgcaagtggaacaacaccggctgccaggccctgcccagccaggacgagggccccagcaaggccttcgtgaactgcgacgagaacagcagactggtgagcctgaccctgaacctggtgaccagagccgacgagggctggtactggtgcggcgtgaagcagggccacttctacggcgagaccgccgccgtgtacgtggccgtggaggagagaaaggccgccggcagcagagacgtgagcctggccaaggccgacgccgcccccgacgagaaggtgctggacagcggcttcagagagatcgagaacaaggccatccaggaccccagactgttcgccgaggagaaggccgtggccgacaccagagaccaggccgacggcagcagagccagcgtggacagcggcagcagcgaggagcagggcggcagcagcagagccctggtgagcaccctggtgcccctgggcctggtgctggccgtgggcgccgtggccgtgggcgtggccagagccagacacagaaagaacgtggacagagtgagcatcagaagctacagaaccgacatcagcatgagcgacttcgagaacagcagagagttcggcgccaacgacaacatgggcgccagcagcatcacccaggagaccagcctgggcggcaaggaggagttcgtggccaccaccgagagcaccaccgagaccaaggagcccaagaaggccaagagaagcagcaaggaggaggccgagatggcctacaaggacttcctgctgcagagcagcaccgtggccgccgaggcccaggacggcccccaggaggcctag

SEQ ID NO: 298268 - DNA, 522 bp, Artificial Sequence
  derived and/or modified sequence
atgcgaccctggtcttctccagcccagctcgtagccggagctcaacccgccgggcggggcgacccacttggtccccgacccatccctccacccagattccgaagggcctcgagccagcgtgagccaccgtaccccagaccagctgagcccgcactggaactggctgggagcaaatgccaaccggacacccctgccgcttcactctgtcctgctgattcgccgtctcaacatcgggtcatgcctcctggtcctgcctcctgggccaatgtgggcagccggccccacaccgttgcaaatggtcatgaattgtttgaagtgtccgaggaacgcgatgaggaggtggcagcattctgtcacatgttagacatcctccgctcgggatcagatattcaggactattttctgactggctacgtgtggtcggcagtgacgcctagtccggaacacttaggcgatgaggtgaaccttaaggtgaccgtgctttgcgatagactgcaggaggcgttgaccttcacctgctag

SEQ ID NO: 298269 - DNA, 396 bp, Artificial Sequence
  derived and/or modified sequence
atgtctagtactcaggggaacggtgagcattggaaatctcttgagtccgtaggaatcagcagaaaagaacttgcaatggccgaggccctgcagatggaatacgacgctctgagccgcttacggcatgataaagaagagaaccgggccaagcaaaacgctgatccctcactgatcagctgggacgaaccaggcgtcgacttctattcaaagcccgcaggcagaaggacagacctgaaactgctgcggggcctctctggatcggaccctaccctgaattataattccctgagcccacaggagggccctcctaatcacagcactagtcaaggaccccagccagggtccgacccatggccaaagggatccctgagtggtgattacctgtatatattttag

SEQ ID NO: 298270 - DNA, 183 bp, Artificial Sequence
  derived and/or modified sequence
atgtcaagcacccagggcaatggagagcactggaaaagtctcgagtccgtgggcatctcacgcaaggagctggccatggctgaggccctacagatggaatacgacgccctgtcgcggctgaggcacgacaaggaagaaaacagagctaaacaaaacgccgaccccagcctgataagttggtag

SEQ ID NO: 298271 - DNA, 522 bp, Artificial Sequence
  derived and/or modified sequence
atgaggccatggagctcaccagcgcagctagtggccggcgcccaacccgcaggacggggagacccactgggacctcgacccatacctcccccccgcttcaggcgtgcttccagtcagcgagaacctccttacccacgacctgccgaaccagccctggagttggccggatcaaaatgtcaacccgacacccccgccgcctcactatgccctgccgatagcccgagtcagcatagagtgatgccacccgggcctgcgtcctgggccaacgtgggttcccgaccacatacagtggccaatggacacgagctgtttgaagtcagtgaagagcgggatgaagaagtagctgcattttgtcacatgttggatattctgcgcagtgggagcgacatccaggactactttctgacaggttacgtctggtccgcggtaacaccctctcctgagcatctgggagatgaggtcaatctgaaggtgaccgtgctctgcgaccggcttcaagaggcccttacgttcacatgctag

SEQ ID NO: 298272 - DNA, 522 bp, Artificial Sequence
  derived and/or modified sequence
atgaggccctggagcagccctgcccagctggtggccggggcccagcctgctggccgcggggaccccctgggcccccggcccatccccccaccccgcttccggcgggccagcagccagcgggagcccccctaccccaggcctgctgagcccgccctggagctggccggcagcaagtgccagcctgacaccccagctgccagcctgtgcccagctgacagccccagccagcaccgggtgatgcctcctggccctgcctcctgggccaacgtgggcagccggccccacacagtggccaatggacatgagctgtttgaggtgtctgaggagagagatgaggaggtggccgccttctgccacatgctggacatcctgcggagcggcagtgacatccaggactacttcctgaccggctacgtgtggagcgctgtgacccccagccctgagcacctgggagatgaggtgaacctgaaggtgacagtgctgtgtgaccggctgcaggaggccctgaccttcacctgctag

SEQ ID NO: 298273 - DNA, 396 bp, Artificial Sequence
  derived and/or modified sequence
atgagcagcacccagggcaatggagagcactggaagagcctggagagcgtgggcatcagcaggaaggagctggccatggccgaggccctgcagatggagtatgatgccctgagccggctgcggcatgacaaggaggagaacagagccaagcagaatgctgaccccagcctcatctcctgggatgagcccggggtggacttctacagcaagccagctggccgcaggacagacctgaagctgctgcggggcctgagcggcagtgaccccaccctgaactacaacagcctgagcccccaggagggcccccccaaccacagcaccagccagggcccccagcccggcagtgacccctggcccaagggcagcctgagcggggactacctgtacatcttctag

SEQ ID NO: 298274 - DNA, 183 bp, Artificial Sequence
  derived and/or modified sequence
atgagcagcacccagggcaatggagagcactggaagagcctggagagcgtgggcatcagcaggaaggagctggccatggccgaggccctgcagatggagtatgatgccctgagccggctgcggcatgacaaggaggagaacagagccaagcagaatgctgaccccagcctcatctcctggtag

SEQ ID NO: 298275 - DNA, 522 bp, Artificial Sequence
  derived and/or modified sequence
atgcggccctggagcagccccgcccagctggtggccggcgcccagcctgccggacggggtgatccactcgggcctcggcctattcctccaccgaggttccgccgagcctcaagtcagcgtgaacctccatacccgcggccagccgaacccgcccttgagctggccggttctaaatgtcaacccgatacacctgctgcctctctatgtccagccgactcacccagccagcaccgcgtaatgcccccaggcccagcatcttgggcaaacgttggttctcgcccgcataccgttgccaatgggcacgagctgttcgaggtgtctgaagaaagggatgaagaagttgcagccttttgccatatgctggatatcttgcgcagtggctccgatatacaagactatttcctcaccggctacgtgtggtccgctgtcaccccatccccggaacacttaggcgacgaggtcaacctcaaggtgacagtcctgtgcgataggttgcaggaagcattaactttcacatgctag

SEQ ID NO: 298276 - DNA, 396 bp, Artificial Sequence
  derived and/or modified sequence
atgagcagcacccagggcaacggcgagcactggaagagcctggagagtgttggtattagtcggaaagaactcgccatggccgaggctcttcagatggaatacgatgccttgtccagattaagacacgacaaagaggagaacagggctaagcagaacgctgacccttcattgatcagttgggatgagcccggcgtggacttctattccaaacccgccggaaggagaacagatctgaaactcctccgcggactctccggcagcgatccgacactgaattataatagcttgagcccccaggaagggccacccaaccattcgacatcccagggccctcagccggggagcgatccctggccaaaggggagcctatcaggtgactatttgtatatattttag

SEQ ID NO: 298277 - DNA, 183 bp, Artificial Sequence
  derived and/or modified sequence
atgagcagcacccagggcaacggcgagcactggaagagcctggagtcagtgggtatttctcggaaggagttggccatggccgaggctcttcaaatggagtacgatgctctgtctcggcttcgccacgataaggaagaaaaccgcgccaaacagaacgccgatccaagcctcatcagctggtag

SEQ ID NO: 298278 - DNA, 522 bp, Artificial Sequence
  derived and/or modified sequence
atgcggccctggagcagccccgcccagctggtggccggcgcccagcccgccggacgcggcgatccactaggaccacggccaatcccaccaccgcgatttcgacgggccagtagccagagagagcctccataccctcggcccgccgagccagccttagagcttgcaggatccaaatgccagccagacacacctgctgcaagcctgtgccctgcagattctccttcacagcatagggtcatgccccccgggcccgcctcatgggccaacgttggctcacgcccacacactgtagccaatggccatgaactgtttgaagtatccgaggagcgcgatgaggaagtggccgccttctgtcatatgttggacattctgagatcaggaagcgacattcaggactacttcttgacaggatacgtgtggagtgccgtgaccccatcccccgagcacctaggggacgaagtcaaccttaaagtgacagtgttgtgtgatcgattgcaggaggccttgacgtttacctgttag

SEQ ID NO: 298279 - DNA, 830 bp, Artificial Sequence
  derived and/or modified sequence
acatccctagagctcagggatttttaaaggccctgctctgagaggtggggctgttcccgctatttatagggactgggagattcctgttcccagctctgagttcctcacacccagctgggcctgctcactgagtcagggcaccctggtaggtggtcacctctgtcactccttctctctcctgcctcccctactccctcacccttccccatcccctgcatgtcatcagagttctgagacagagctcagcccagaatctccttgaagaagcggacacaaagcaaaaagctcttgccagttctgagtggggaaatgcggccttggtcctccccggctcagcttgttgcaggggctcagcctgctgggaggggggaccccttgggccctcggcctataccaccgccccgctttcgtcgggcttccagccagagggaacctccttatcccaggccagcggagccagctctggaactggctggctccaaatgccagcctgatacccctgctgccagcctctgcccggcagactcccccagccagcatcgggtgatgccaccagggcctgccagctgggcaaacgtgggctcccggccccacactgttgccaatggccatgagttgtttgaggtctcagaagagagagatgaggaggttgctgcattttgccacatgctggatatccttcgatctggctctgacatccaagactacttcctcactggctatgtctggagtgctgtcacccctagcccagagcacctcggggatgaggtcaacctgaaggtgactgtgttgtgtgacaggcttcaagaggcactcactttcacctgcaa

SEQ ID NO: 298280 - DNA, 846 bp, Artificial Sequence
  derived and/or modified sequence
agtgcgccgggtgtccgggagatggcttcccctctctcgcccgctgctgccgctattgtctcacccggggtggcctgactctgcgagctcgcgcacgctctcggcggagagcacccctccccacccccacaagctggtccttgcgccctttgctgcctctccctctgccccttggagcctagggtctgtgcggagcctggagaggggagcggcccgggagcaggcggcgtgcggccggccagctcctctcgcgctggtgcaagaggcgcctggagccgcagagcgagcccgggaggcgcggagcgagcagcccacgtcgccaggcacaagacacgtcggatgttgcagcagagccagcagctagcgcaggcgcccagacaccatgtcacaaccctccagaactgacgttggcaggaagtagagactttgttgcctgtgtcccccatcctcaccatgtcttcgactcagggcaatggggaacactggaagtccctggagtcagtgggcatcagccgcaaagagctagcgatggccgaagccctgcagatggagtatgatgccctgtcccggctccggcatgacaaggaggagaacagagccaagcagaacgcagacccctctctcatcagctgggatgagcctggggtagacttttacagcaagccagcaggaaggcggaccgacctcaagctgttacgcggtctctctggctctgatcctacccttaactacaactcactctccccacaggaagggccgcccaaccactctacctcccaagggccacagcctggctcagatccctggcccaaaggctccctgtctggagactatctctacattttt

SEQ ID NO: 298281 - DNA, 727 bp, Artificial Sequence
  derived and/or modified sequence
ggcttcccctctctcgcccgctgctgccgctattgtctcacccggggtggcctgactctgcgagctcgcgcacgctctcggcggagagcacccctccccacccccacaagctggtccttgcgccctttgctgcctctccctctgccccttggagcctagggtctgtgcggagcctggagaggggagcggcccgggagcaggcggcgtgcggccggccagctcctctcgcgctggtgcaagaggcgcctggagccgcagagcgagcccgggaggcgcggagcgagcagcccacgtcgccaggcacaagacacgtcggatgttgcagcagagccagcagctagcgcagatggcgtcctttgcagcaaaccgtaagttataaggatgagggaagaagagtagagggccaaaaggattccattttgaggaaaaactacagtttgccttgccaggtagaagaatcaggcgcccagacaccatgtcacaaccctccagaactgacgttggcaggaagtagagactttgttgcctgtgtcccccatcctcaccatgtcttcgactcagggcaatggggaacactggaagtccctggagtcagtgggcatcagccgcaaagagctagcgatggccgaagccctgcagatggagtatgatgccctgtcccggctccggcatgacaaggaggagaacagagccaagcagaacgcagacccctctctcatcagctggg

SEQ ID NO: 298282 - DNA, 1659 bp, Artificial Sequence
  derived and/or modified sequence
atgcggccttggtcctccccggctcagcttgttgcaggggctcagcctgctgggaggggggaccccttgggccctcggcctataccaccgccccgctttcgtcgggcttccagccagagggaacctccttatcccaggccagcggagccagctctggaactggctggctccaaatgccagcctgatacccctgctgccagcctctgcccggcagactcccccagccagcatcgggtgatgccaccagggcctgccagctgggcaaacgtgggctcccggccccacactgttgccaatggccatgagttgtttgaggtctcagaagagagagatgaggaggttgctgcattttgccacatgctggatatccttcgatctggctctgacatccaagactacttcctcactggctatgtctggagtgctgtcacccctagcccagagcacctcggggatgaggtcaacctgaaggtgactgtgttgtgtgacaggcttcaagaggcactcactttcacctgcaactgttcctccactgtagacttgcttatctaccagaccctgtgctacacccatgatgacctgaggaatgtggacgtgggtgactttgtgctaaagccctgcgggctggaggagttcctgcagaacaagcatgccttgggcagtcatgagtacatccaatactgccgcaagtttgacattgacattcggctacagctgatggagcagaaggttgtgcgcagtgacctggcccggacggtgaatgatgaccagagcccctccaccttgaactacctcgtccatctccaagagaggcctgtcaagcagaccatcagcaggcaggccctgagtcttctgttcgacacttaccacaatgaggtggatgccttcctgctggctgatgtaggaaaccatcaggaggtagaaggtttcacatgtagggagggccagagccctccccacttggattcatgcggagtctcaagcctcaaaaccatgagagtcaacatttgtcttaaatgtcacaacgccaaagaaaatctgacagtgatcttcaaaaataatcccttgctgagtgtgatggcccacgcctgtaatcctaaccctttgggaaactgaggtgggagaattgcttgaaccccaaagttcaaggccagcctgggcaacacagcaagaccccatctctacaaaaaatacaaaagttagccagggagacttcccactgaaggctgacagggtggtccagtccgtcaaggccatctgcaacgccctggccgccgtggaaacccctgagatcaccagtgctctcaaccagctgcccccctgcccctcccgcatgcagcctaaaattcagaaggatcccagtgtcttggctgtgagggaaaaccgagagaaggtcgtggaagccctgaccgctgccatcttggacctggtggagctgtactgcaacacattcaacgcagacttccagacggcagtgcccgggagccgcaagcatgacctggtccaggaggcctgccatttcgccaggtccctggccttcactgtctatgccacccaccgcatccccatcatctgggctaccagctatgaagatttctacctctcctgctccctcagccatggcggcaaggagctgtgcagccccctgcagacccgaag

SEQ ID NO: 298283 - DNA, 522 bp, Artificial Sequence
  derived and/or modified sequence
atgaggccttggtcctctccagcccaactggttgcaggcgctcagcccgctggccgaggggatcctttaggtcctaggcctatcccccctccgaggtttcggagggcttcttcacagcgggaaccaccgtatccacgacccgcagagccggctttggagctggctggctcaaaatgtcagcctgacactcccgcagcaagtctttgccccgctgacagcccaagtcagcacagggtcatgcctccaggaccggcttcgtgggcgaatgtgggctcacgccctcatacagttgccaatggacacgaacttttcgaagtgagtgaggagagagatgaagaggtggccgctttctgtcacatgttggacatcctgcggagtggatccgatattcaggactatttcttaacaggttacgtatggagtgccgtgacgcccagccccgagcacctcggagatgaggttaacttaaaagtgaccgtcctttgcgacaggctgcaggaagccctgactttcacctgctag

SEQ ID NO: 298284 - DNA, 396 bp, Artificial Sequence
  derived and/or modified sequence
atgtcaagtacacaaggcaacggagagcactggaaatcactcgagtccgtagggataagcaggaaggagctggctatggcagaggccctgcaaatggaatatgacgctttatctagactgaggcacgataaggaagagaatagggccaaacagaatgccgatcctagtctgatatcttgggacgagcccggagtcgatttctatagcaagccagctggacgccgtacagacctgaaactattgcggggacttagtgggtcagacccgacgctgaattacaactcactcagtccgcaggagggtcctccaaaccactcaacatcacagggccctcagccaggcagtgacccctggcccaaaggctcactgtctggagactacttatatatattctag

SEQ ID NO: 298285 - DNA, 183 bp, Artificial Sequence
  derived and/or modified sequence
atgtcatcaacccagggcaacggggagcactggaagagtctcgaatccgtaggcatctcacgcaaagaactggcgatggcagaggcactgcagatggaatatgacgccctgtcacggttacgccacgataaagaagagaacagagccaaacagaatgctgatccctccttgatcagttggtag

SEQ ID NO: 298286 - DNA, 522 bp, Artificial Sequence
  derived and/or modified sequence
atgcggccttggtcttcacctgcacagcttgtggctggggctcaacccgcagggagaggagatccactgggcccacgccctattccaccaccgcgattcaggcgcgcttcctcacaaagggagcccccttatcctcggccagctgagcccgcactggaactcgccggaagcaagtgtcagccagatacaccagcggcatctctgtgccccgcagactctcccagtcagcatagagtcatgccgcctggcccagcctcttgggccaacgtgggctctcggccacatactgtcgctaacgggcacgagctcttcgaggtgtctgaagaaagagacgaagaagtagcagccttttgccacatgttggacatactgaggtcgggatctgacatacaggattatttcctgacgggctacgtgtggagcgccgtgaccccttcacctgaacatctgggagatgaggtgaacctgaaggtgacagtgctctgtgatcggctgcaggaagctttgacattcacttgttag

SEQ ID NO: 298287 - DNA, 522 bp, Artificial Sequence
  derived and/or modified sequence
atgagaccctggagcagccccgcccagctggtggccggcgcccagcccgccggcagaggcgaccccctgggccccagacccatccccccccccagattcagaagagccagcagccagagagagcccccctaccccagacccgccgagcccgccctggagctggccggcagcaagtgccagcccgacacccccgccgccagcctgtgccccgccgacagccccagccagcacagagtgatgccccccggccccgccagctgggccaacgtgggcagcagaccccacaccgtggccaacggccacgagctgttcgaggtgagcgaggagagagacgaggaggtggccgccttctgccacatgctggacatcctgagaagcggcagcgacatccaggactacttcctgaccggctacgtgtggagcgccgtgacccccagccccgagcacctgggcgacgaggtgaacctgaaggtgaccgtgctgtgcgacagactgcaggaggccctgaccttcacctgctag

SEQ ID NO: 298288 - DNA, 396 bp, Artificial Sequence
  derived and/or modified sequence
atgagcagcacccagggcaacggcgagcactggaagagcctggagagcgtgggcatcagcagaaaggagctggccatggccgaggccctgcagatggagtacgacgccctgagcagactgagacacgacaaggaggagaacagagccaagcagaacgccgaccccagcctgatcagctgggacgagcccggcgtggacttctacagcaagcccgccggcagaagaaccgacctgaagctgctgagaggcctgagcggcagcgaccccaccctgaactacaacagcctgagcccccaggagggcccccccaaccacagcaccagccagggcccccagcccggcagcgacccctggcccaagggcagcctgagcggcgactacctgtacatcttctag

SEQ ID NO: 298289 - DNA, 183 bp, Artificial Sequence
  derived and/or modified sequence
atgagcagcacccagggcaacggcgagcactggaagagcctggagagcgtgggcatcagcagaaaggagctggccatggccgaggccctgcagatggagtacgacgccctgagcagactgagacacgacaaggaggagaacagagccaagcagaacgccgaccccagcctgatcagctggtag

SEQ ID NO: 298290 - protein, 95 aa, Artificial Sequence
  derived and/or modified sequence
MAIGKRLATLPTKEQKTQRLISELSLLNHKLPARVWLPTAGFDHHVVRVPHTQAVVLNSKDKAPYLIYVEVLECENFDTTSVPARIPENRIRSTR

SEQ ID NO: 298291 - protein, 749 aa, Artificial Sequence
  derived and/or modified sequence
MSFIDPYQHIIVEHQYSHKFTVVVLRATKVTKGAFGDMLDTPDPYVELFISTTPDSRKRTRHFNNDINPVWNETFEFILDPNQENVLEITLMDANYVMDETLGTATFTVSSMKVGEKKEVPFIFNQVTEMVLEMSLEVCSCPDLRFSMALCDQEKTFRQQRKEHIRESMKKLLGPKNSEGLHSARDVPVVAILGSGGGFRAMVGFSGVMKALYESGILDCATYVAGLSGSTWYMSTLYSHPDFPEKGPEEINEELMKNVSHNPLLLLTPQKVKRYVESLWKKKSSGQPVTFTDIFGMLIGETLIHNRMNTTLSSLKEKVNTAQCPLPLFTCLHVKPDVSELMFADWVEFSPYEIGMAKYGTFMAPDLFGSKFFMGTVVKKYEENPLHFLMGVWGSAFSILFNRVLGVSGSQSRGSTMEEELENITTKHIVSNDSSDSDDESHEPKGTENEDAGSDYQSDNQASWIHRMIMALVSDSALFNTREGRAGKVHNFMLGLNLNTSYPLSPLSDFATQDSFDDDELDAAVADPDEFERIYEPLDVKSKKIHVVDSGLTFNLPYPLILRPQRGVDLIISFDFSARPSDSSPPFKELLLAEKWAKMNKLPFPKIDPYVFDREGLKECYVFKPKNPDMEKDCPTIIHFVLANINFRKYRAPGVPRETEEEKEIADFDIFDDPESPFSTFNFQYPNQAFKRLHDLMHFNTLNNIDVIKEAMVESIEYRRQNPSRCSVSLSNVEARRFFNKEFLSKPKA

SEQ ID NO: 298292 - protein, 49 aa, Artificial Sequence [sequence omitted]

SEQ ID NO: 298293 - DNA, 2250 bp, Artificial Sequence
  derived and/or modified sequence
atgagcttcatcgacccctaccagcacatcatcgtggagcaccagtacagccacaagttcaccgtggtggtgctgagagccaccaaggtgaccaagggcgccttcggcgacatgctggacacccccgacccctacgtggagctgttcatcagcaccacccccgacagcagaaagagaaccagacacttcaacaacgacatcaaccccgtgtggaacgagaccttcgagttcatcctggaccccaaccaggagaacgtgctggagatcaccctgatggacgccaactacgtgatggacgagaccctgggcaccgccaccttcaccgtgagcagcatgaaggtgggcgagaagaaggaggtgcccttcatcttcaaccaggtgaccgagatggtgctggagatgagcctggaggtgtgcagctgccccgacctgagattcagcatggccctgtgcgaccaggagaagaccttcagacagcagagaaaggagcacatcagagagagcatgaagaagctgctgggccccaagaacagcgagggcctgcacagcgccagagacgtgcccgtggtggccatcctgggcagcggcggcggcttcagagccatggtgggcttcagcggcgtgatgaaggccctgtacgagagcggcatcctggactgcgccacctacgtggccggcctgagcggcagcacctggtacatgagcaccctgtacagccaccccgacttccccgagaagggccccgaggagatcaacgaggagctgatgaagaacgtgagccacaaccccctgctgctgctgaccccccagaaggtgaagagatacgtggagagcctgtggaagaagaagagcagcggccagcccgtgaccttcaccgacatcttcggcatgctgatcggcgagaccctgatccacaacagaatgaacaccaccctgagcagcctgaaggagaaggtgaacaccgcccagtgccccctgcccctgttcacctgcctgcacgtgaagcccgacgtgagcgagctgatgttcgccgactgggtggagttcagcccctacgagatcggcatggccaagtacggcaccttcatggcccccgacctgttcggcagcaagttcttcatgggcaccgtggtgaagaagtacgaggagaaccccctgcacttcctgatgggcgtgtggggcagcgccttcagcatcctgttcaacagagtgctgggcgtgagcggcagccagagcagaggcagcaccatggaggaggagctggagaacatcaccaccaagcacatcgtgagcaacgacagcagcgacagcgacgacgagagccacgagcccaagggcaccgagaacgaggacgccggcagcgactaccagagcgacaaccaggccagctggatccacagaatgatcatggccctggtgagcgacagcgccctgttcaacaccagagagggcagagccggcaaggtgcacaacttcatgctgggcctgaacctgaacaccagctaccccctgagccccctgagcgacttcgccacccaggacagcttcgacgacgacgagctggacgccgccgtggccgaccccgacgagttcgagagaatctacgagcccctggacgtgaagagcaagaagatccacgtggtggacagcggcctgaccttcaacctgccctaccccctgatcctgagaccccagagaggcgtggacctgatcatcagcttcgacttcagcgccagacccagcgacagcagcccccccttcaaggagctgctgctggccgagaagtgggccaagatgaacaagctgcccttccccaagatcgacccctacgtgttcgacagagagggcctgaaggagtgctacgtgttcaagcccaagaaccccgacatggagaaggactgccccaccatcatccacttcgtgctggccaacatcaacttcagaaagtacagagcccccggcgtgcccagagagaccgaggaggagaaggagatcgccgacttcgacatcttcgacgaccccgagagccccttcagcaccttcaacttccagtaccccaaccaggccttcaagagactgcacgacctgatgcacttcaacaccctgaacaacatcgacgtgatcaaggaggccatggtggagagcatcgagtacagaagacagaaccccagcagatgcagcgtgagcctgagcaacgtggaggccagaagattcttcaacaaggagttcctgagcaagcccaaggcctag

SEQ ID NO: 298294 - DNA, 2250 bp, Artificial Sequence
  derived and/or modified sequence
atgagctttatagatccttaccagcacatcattgttgaacaccaatactcacataaattcaccgtggtggttctgcgtgcaactaaagtgaccaagggcgcatttggggacatgcttgacacacctgacccatatgttgaactcttcatttccactactcccgatagtcgaaaaaggacgagacacttcaataacgatataaaccctgtgtggaatgaaactttcgagttcattttggaccccaatcaagagaatgtgctggagattactctgatggacgccaattacgttatggatgagacgctggggaccgcaacattcactgtgagcagcatgaaggtgggggagaaaaaggaggtgcccttcatcttcaaccaagttactgaaatggtgctggagatgtcactcgaggtgtgctcctgtcccgatctgaggttttcaatggcactctgcgatcaggaaaagaccttccggcagcagcggaaagaacacataagggaatccatgaaaaaactgctcggccctaaaaacagcgaagggctccacagtgcccgcgatgtgcctgttgttgctatactcgggtcaggtgggggcttcagagccatggtgggtttcagcggagtcatgaaggcactgtatgagtcaggtatcctggactgtgctacatacgtggccgggctgagtggctcaacttggtacatgtctacattgtatagtcaccccgatttccctgagaaaggcccagaagaaataaatgaggagctgatgaaaaacgtgtcccacaacccattgcttctcctaacacctcagaaagtcaaacgctacgttgagagtctctggaagaagaagtccagcggtcaaccagttacattcacggatatttttggaatgttaatcggggaaactctgattcacaacagaatgaatacaactctttctagtcttaaagaaaaggtcaacactgctcagtgtccacttcccctattcacctgcctgcatgtcaagccagacgtttctgaactcatgttcgccgattgggttgagttctccccctacgagatcggaatggccaaatacggaacattcatggctccagatctgttcgggtctaagttttttatgggaacggtggtgaagaagtacgaggagaatccgttgcattttttgatgggggtgtggggtagcgccttctctatcctgttcaaccgcgttcttggagtcagtgggagccagagtcgaggatcgaccatggaggaggagctcgagaatatcacaactaaacatatcgtttctaacgattcaagcgactccgacgacgaaagtcatgagcctaagggaacagagaacgaagatgctgggagtgattatcaaagtgacaatcaagctagctggattcacaggatgatcatggcactcgtgagcgactcagctctgttcaacacccgggaaggcagggccgggaaggtgcataacttcatgctcgggctgaatctgaacacatcgtacccattatcacctttgtcggacttcgctacgcaagattcttttgacgacgacgaattggatgccgccgtggccgatccggatgagtttgaacggatttatgaacccctggatgtaaaaagcaagaaaattcacgtcgttgactccggcctgactttcaatctgccatatccgctgattctgcggccccaacgcggagttgatctgatcatttcctttgacttcagcgccagaccgagcgatagcagtcccccattcaaggaattgttgttggccgagaaatgggctaagatgaataagctgcccttccctaagatcgacccctacgttttcgacagagagggcttaaaggagtgttacgtgtttaaaccaaagaacccagatatggaaaaggactgccctacgataatccatttcgtgttggccaatataaacttcagaaagtatagggcccctggtgtccccagagagacagaggaggaaaaggagattgctgactttgacatcttcgatgacccagaatctcctttttcgacctttaacttccagtatcctaaccaggcatttaagagactccacgatctgatgcattttaatacactcaacaatattgatgtcattaaagaggctatggtcgaatctatcgaatacaggcggcaaaacccatcccggtgcagcgtgagcctcagcaacgttgaagctcgcagatttttcaataaggagttcctctctaaacctaaggcctag

SEQ ID NO: 298295 - DNA, 2250 bp, Artificial Sequence
  derived and/or modified sequence
atgtccttcatcgacccctaccagcacatcatcgtggagcaccagtacagccacaagttcaccgtggtggtgctgcgggccaccaaggtgaccaagggggcctttggagacatgctggacaccccagacccctacgtggagctgttcatcagcaccaccccagacagcaggaagaggaccaggcacttcaacaatgacatcaaccctgtgtggaatgagacctttgagttcatcctggaccccaaccaggagaatgtgctggagatcaccctgatggatgccaactacgtgatggatgagaccctgggcacagccaccttcaccgtgtcctccatgaaggtgggggagaagaaggaggtgcccttcatcttcaaccaggtgacagagatggtgctggagatgagcctggaggtgtgcagctgcccagacctgcgcttctccatggccctgtgtgaccaggagaagaccttccggcagcagaggaaggagcacatccgggagagcatgaagaagctgctgggccccaagaacagcgagggcctgcacagcgccagagatgtgcctgtggtggccatcctgggcagcggcggcggcttccgggccatggtgggcttcagcggcgtgatgaaggccctgtatgaaagtggcatcctggactgtgccacctacgtggccggcctgagcggcagcacctggtacatgagcaccctgtacagccacccagacttccctgagaagggccctgaggagatcaatgaggagctgatgaagaatgtgagccacaaccccctgctgctgctgaccccccagaaggtgaagagatatgtggagagcctgtggaagaagaagagcagcggccagcctgtgaccttcacagacatcttcggcatgctgattggagagaccctcatccacaacaggatgaacaccaccctgagcagcctgaaggagaaggtgaacacagcccagtgccccctgcccctcttcacctgcctgcacgtgaagccagatgtgtctgagctgatgtttgctgactgggtggagttcagcccctatgagatcggcatggccaagtatggcaccttcatggccccagacctgtttggcagcaagttcttcatgggcaccgtggtgaagaagtatgaggagaaccccctgcacttcctgatgggcgtgtggggcagcgccttcagcatcctcttcaacagagtgctgggcgtgtctggcagccagagccggggcagcaccatggaggaggagctggagaacatcaccaccaagcacatcgtgtccaatgacagcagtgacagtgatgatgagagccatgagcccaagggcacagaaaatgaagatgctggcagtgactaccagagcgacaaccaggcctcctggatccacaggatgatcatggccctggtgtctgacagcgccctcttcaacacccgggagggccgggccggcaaggtgcacaacttcatgctgggcctgaacctgaacaccagctaccccctgagccccctgagtgactttgccacccaggacagctttgatgatgatgagctggatgctgctgtggccgaccctgatgaatttgagcgcatctatgagcccctggatgtgaagagcaagaagatccacgtggtggacagcggcctgaccttcaacctgccctaccccctcatcctgcggccccagaggggcgtggacctgatcatcagctttgacttcagcgcccggcccagcgacagcagcccccccttcaaggagctgctgctggccgagaagtgggccaagatgaacaagctgcccttccccaagattgacccctacgtgtttgaccgggagggcctgaaggaatgttatgtgttcaagcccaagaacccagacatggagaaggactgccccaccatcatccactttgtgctggccaacatcaacttcaggaagtaccgggcccctggggtgccccgggagacagaggaggagaaggagattgctgactttgacatctttgatgatcctgagagccccttcagcaccttcaacttccagtaccccaaccaggccttcaagaggctgcatgacctgatgcacttcaacaccctgaacaacattgatgtgatcaaggaggccatggtggagagcattgagtaccgccggcagaaccccagccgctgcagcgtgtccctgagcaatgtggaggcccggcgcttcttcaacaaggagttcctgagcaagcccaaggcctag

SEQ ID NO: 298296 - DNA, 2250 bp, Artificial Sequence
  derived and/or modified sequence
atgagcttcatcgacccctaccagcacatcatcgtggagcaccagtacagccacaagtttaccgtcgtggttctacgtgctacgaaggttacgaagggggccttcggcgacatgttggacacacccgatccttatgtcgaactttttattagcactactccggactctaggaaacggacacgccactttaataatgacattaacccggtctggaacgaaaccttcgagtttattctggatcccaatcaggaaaacgtgctggagatcaccttgatggacgcaaactatgtaatggatgaaactctcgggaccgcaaccttcaccgtgagctctatgaaggtgggagaaaagaaagaagtccccttcatcttcaaccaggtgacagaaatggtacttgaaatgtctctggaggtgtgctcatgccccgatcttcggttcagtatggctttgtgcgaccaagagaaaacatttaggcagcagagaaaggagcacattagagagtctatgaaaaaacttctcggaccgaagaattccgagggtttacacagcgctcgggatgtgccagtggtggcgatcctgggaagcggtgggggattcagggccatggtgggcttctccggcgtaatgaaagctctgtacgaaagtggaatcttggactgtgccacatacgtggccgggctgagtggcagcacatggtacatgagcaccttatacagccatcctgacttccctgagaaaggtccagaggagataaatgaggaactgatgaagaacgtgtcacataatcccctgctgctgctcaccccacagaaagtgaaaaggtatgtggaatccctgtggaaaaaaaagagctcggggcaacccgtcaccttcactgatatcttcgggatgctgataggcgagacactgatccacaatagaatgaataccactctgtcttccctgaaagagaaggtgaacacagcccaatgtcccttgcccctgtttacttgtctccacgtgaagcccgatgtgtcggaactcatgttcgccgactgggtggagttcagtccgtacgaaatcgggatggccaagtatggcaccttcatggcacccgaccttttcggatccaagtttttcatgggaaccgtggtgaagaagtacgaagaaaaccccctccacttcctgatgggtgtctgggggtcagctttctcgatcctgtttaaccgtgtgttgggagtttccgggagtcagagtagagggtcaaccatggaagaggagcttgagaacatcactacgaagcacatcgtgtcgaacgatagtagcgactccgacgacgaatcccacgaaccgaaagggactgaaaacgaagacgccggatctgattaccagagcgacaaccaggcgtcctggatccacagaatgatcatggccttggtgagcgattccgctctgtttaatacacgcgaagggcgggccggtaaagttcataacttcatgctgggactcaatttgaatacgtcgtatcccctgagccccctcagcgacttcgcaactcaggacagctttgacgatgacgaactggatgcagccgtggcagaccctgatgagtttgagaggatttatgaacctctcgacgtcaagagcaagaagattcacgtggtggattctggcctcacattcaatctgccatatccactgatcctgaggccacagagaggcgtggatctgataataagttttgacttctcagctagacccagcgattcttcccctcccttcaaggagctcttgctggccgagaaatgggccaagatgaacaagctgccatttccaaaaattgacccttatgtgttcgatcgagaaggcctgaaagagtgttacgtgttcaagccaaaaaacccagatatggagaaagactgccctaccataatccactttgtgctcgccaacattaactttagaaagtaccgggccccgggggtcccccgggagactgaggaggaaaaggagatcgccgacttcgatatcttcgatgatcccgaatctccatttagcaccttcaacttccagtaccccaatcaggcgttcaaaaggcttcatgatcttatgcattttaatactctcaataatatcgatgtgattaaagaagcaatggtagaatctatcgagtaccggcggcaaaatccgtcaagatgttcggtgagcctttctaacgttgaggctaggaggttctttaacaaggaattcctctctaagcctaaagcttag

SEQ ID NO: 298297 - DNA, 2250 bp, Artificial Sequence
  derived and/or modified sequence
atgtcttttattgacccttatcaacacattattgtggagcaccagtactcccacaagttcaccgtggtagtccttagagccacaaaggtcacaaaaggcgctttcggggacatgctcgacacccctgatccctacgtggagctgttcatttcaacaacgcctgattccagaaaacgaactagacatttcaacaatgacattaacccagtttggaacgaaacatttgagtttatcctggacccaaaccaggaaaatgtactagagatcacgttgatggacgccaactacgtgatggatgagacgcttggcaccgccacctttaccgtaagctcaatgaaggtgggcgagaagaaagaggttcccttcattttcaatcaggtcacagagatggtgcttgagatgtccctcgaagtatgttcgtgtcctgatcttcgattctccatggctctttgcgatcaggaaaagactttcaggcagcagcggaaggaacatatacgcgaatccatgaagaaactcttaggccctaagaacagtgaagggctgcattctgcaagggatgtgcccgtggtggccattctggggagcggtgggggtttccgtgctatggtggggttcagcggtgtcatgaaggctctgtacgaatccggcatactggactgtgccacctacgtcgcaggactgtccggctccacttggtacatgtctactctgtactcacacccagatttccctgagaaggggccagaggagatcaatgaggagctaatgaagaatgtgtctcacaatcctctgctgttgctgacaccccaaaaggttaaaagatacgtcgaaagcctgtggaaaaagaaaagtagtggccaacctgtgacgttcaccgatatctttggaatgctgattggcgaaactctgatccacaatagaatgaacaccaccctgagctctttaaaggagaaagtgaacaccgctcagtgtcccctgcccctcttcacgtgcctgcatgtgaagcccgacgtgtcagagttgatgttcgccgactgggtggaattcagcccatacgagattggaatggccaaatatggcacctttatggcaccagatttgtttggctccaagttcttcatggggactgttgtgaagaaatatgaggaaaatcctttacatttcctcatgggcgtgtggggttccgctttctcaattctcttcaaccgagtgctgggggtaagtggctctcagtcccggggaagcaccatggaggaggagctagaaaacattaccacgaagcacattgtgtccaatgattccagtgatagtgatgatgaatcacatgaaccaaaggggacggaaaatgaggacgccggttccgactatcagagcgataatcaggcttcctggatacaccgcatgatcatggcccttgtgagtgattccgcccttttcaatacccgagagggaagggcagggaaggtacataatttcatgctggggcttaatctgaatacatcataccccctatcccccctcagcgatttcgcgacacaggacagctttgacgacgacgagctcgatgccgcagtcgccgatcctgatgagttcgagcggatctacgagccactagacgtgaagtccaagaagatacatgtggttgatagcggcctcactttcaacctgccttatccactaatactgcggcctcagcgtggagtggatctgattataagctttgattttagtgctaggccttccgattcttcgccaccatttaaggagctgcttctggcggagaagtgggccaaaatgaacaagctacccttccctaagatcgacccatacgtgtttgaccgggagggcctaaaagagtgctatgtgttcaagccaaagaatccagatatggagaaagattgccctacaatcattcatttcgtgcttgctaatattaattttaggaaataccgtgcgcctggagtcccccgtgagactgaggaagaaaaggaaattgccgactttgatatcttcgatgaccctgagagccctttcagtacatttaacttccagtacccaaatcaggctttcaagagactgcatgacctcatgcattttaacacactgaataatatcgatgttatcaaggaagctatggttgaaagtattgagtatcgcaggcagaatccctctcgttgttcggtcagccttagcaacgtggaggctcgcaggttcttcaacaaagagtttctctccaaacccaaggcttag

SEQ ID NO: 298298 - DNA, 2875 bp, Artificial Sequence
  derived and/or modified sequence
aggataagactttctctaagtccggagctgaaaaaggatcctgactgaaagctagaggcattgaggagcctgaagattctcaggttttaaagacgctagagtgccaaagaagactttgaagtgtgaaaacatttcctgtaattgaaaccaaaatgtcatttatagatccttaccagcacattatagtggagcaccagtattcccacaagtttacggtagtggtgttacgtgccaccaaagtgacaaagggggcctttggtgacatgcttgatactccagatccctatgtggaactttttatctctacaacccctgacagcaggaagagaacaagacatttcaataatgacataaaccctgtgtggaatgagacctttgaatttattttggatcctaatcaggaaaatgttttggagattacgttaatggatgccaattatgtcatggatgaaactctagggacagcaacatttactgtatcttctatgaaggtgggagaaaagaaagaagttccttttattttcaaccaagtcactgaaatggttctagaaatgtctcttgaagtttgctcatgcccagacctacgatttagtatggctctgtgtgatcaggagaagactttcagacaacagagaaaagaacacataagggagagcatgaagaaactcttgggtccaaagaatagtgaaggattgcattctgcacgtgatgtgcctgtggtagccatattgggttcaggtgggggtttccgagccatggtgggattctctggtgtgatgaaggcattatacgaatcaggaattctggattgtgctacctacgttgctggtctttctggctccacctggtatatgtcaaccttgtattctcaccctgattttccagagaaagggccagaggagattaatgaagaactaatgaaaaatgttagccacaatccccttttacttctcacaccacagaaagttaaaagatatgttgagtctttatggaagaagaaaagctctggacaacctgtcacctttactgatatctttgggatgttaataggagaaacactaattcataatagaatgaatactactctgagcagtttgaaggaaaaagttaatactgcacaatgccctttacctcttttcacctgtcttcatgtcaaacctgacgtttcagagctgatgtttgcagattgggttgaatttagtccatacgaaattggcatggctaaatatggtacttttatggctcccgacttatttggaagcaaattttttatgggaacagtcgttaagaagtatgaagaaaaccccttgcatttcttaatgggtgtctggggcagtgccttttccatattgttcaacagagttttgggcgtttctggttcacaaagcagaggctccacaatggaggaagaattagaaaatattaccacaaagcatattgtgagtaatgatagctcggacagtgatgatgaatcacacgaacccaaaggcactgaaaatgaagatgctggaagtgactatcaaagtgataatcaagcaagttggattcatcgtatgataatggccttggtgagtgattcagctttattcaataccagagaaggacgtgctgggaaggtacacaacttcatgctgggcttgaatctcaatacatcttatccactgtctcctttgagtgactttgccacacaggactcctttgatgatgatgaactggatgcagctgtagcagatcctgatgaatttgagcgaatatatgagcctctggatgtcaaaagtaaaaagattcatgtagtggacagtgggctcacatttaacctgccgtatcccttgatactgagacctcagagaggggttgatctcataatctcctttgacttttctgcaaggccaagtgactctagtcctccgttcaaggaacttctacttgcagaaaagtgggctaaaatgaacaagctcccctttccaaagattgatccttatgtgtttgatcgggaagggctgaaggagtgctatgtctttaaacccaagaatcctgatatggagaaagattgcccaaccatcatccactttgttctggccaacatcaacttcagaaagtacagggctccaggtgttccaagggaaactgaggaagagaaagaaatcgctgactttgatatttttgatgacccagaatcaccattttcaaccttcaattttcaatatccaaatcaagcattcaaaagactacatgatcttatgcacttcaatactctgaacaacattgatgtgataaaagaagccatggttgaaagcattgaatatagaagacagaatccatctcgttgctctgtttcccttagtaatgttgaggcaagaagatttttcaacaaggagtttctaagtaaacccaaagcatagttcatgtactggaaatggcagcagtttctgatgctgaggcagtttgcaatcccatgacaactggatttaaaagtacagtacagatagtcgtactgatcatgagagactggctgatactcaaagttgcagttacttagctgcatgagaataatactattataagttaggttgacaaatgatgttgattatgtaaggatatacttagctacattttcagtcagtatgaacttcctgatacaaatgtagggatatatactgtatttttaaacatttctcaccaactttcttatgtgtgttctttttaaaaattttttttcttttaaaatatttaacagttcaatctcaataagacctcgcattatgtatgaatgttattcactgactagatttattcataccatgagacaacactatttttatttatatatgcatatatatacatacatgaaataaatacatcaatataaaaataa

SEQ ID NO: 298299 - protein, 1097 aa, Artificial Sequence
  derived and/or modified sequence
MENWTGRPWLYLLLLLSLPQLCLDQEVLSGHSLQTPTEEGQGPEGVWGPWVQWASCSQPCGVGVQRRSRTCQLPTVQLHPSLPLPPRPPRHPEALLPRGQGPRPQTSPETLPLYRTQSRGRGGPLRGPASHLGREETQEIRAARRSRLRDPIKPGMFGYGRVPFALPLHRNRRHPRSPPRSELSLISSRGEEAIPSPTPRAEPFSANGSPQTELPPTELSVHTPSPQAEPLSPETAQTEVAPRTRPAPLRHHPRAQASGTEPPSPTHSLGEGGFFRASPQPRRPSSQGWASPQVAGRRPDPFPSVPRGRGQQGQGPWGTGGTPHGPRLEPDPQHPGAWLPLLSNGPHASSLWSLFAPSSPIPRCSGESEQLRACSQAPCPPEQPDPRALQCAAFNSQEFMGQLYQWEPFTEAPLLPLRHAFFLLPGAGSGDSTGVQGSQRCELNCRPRGFRFYVRHTEKVQDGTLCQPGAPDICVAGRCLSPGCDGILGSGRRPDGCGVCGGDDSTCRLVSGNLTDRGGPLGYQKILWIPAGALRLQIAQLRPSSNYLALRGPGGRSIINGNWAVDPPGSYRAGGTVFRYNRPPREEGKGESLSAEGPTTQPVDVYMIFQEENPGVFYQYVISSPPPILENPTPEPPVPQLQPEILRVEPPLAPAPRPARTPGTLQRQVRIPQMPAPPHPRTPLGSPAAYWKRVGHSACSASCGKGVWRPIFLCISRESGEELDERSCAAGARPPASPEPCHGTPCPPYWEAGEWTSCSRSCGPGTQHRQLQCRQEFGGGGSSVPPERCGHLPRPNITQSCQLRLCGHWEVGSPWSQCSVRCGRGQRSRQVRCVGNNGDEVSEQECASGPPQPPSREACDMGPCTTAWFHSDWSSKCSAECGTGIQRRSVVCLGSGAALGPGQGEAGAGTGQSCPTGSRPPDMRACSLGPCERTWRWYTGPWGECSSECGSGTQRRDIICVSKLGTEFNVTSPSNCSHLPRPPALQPCQGQACQDRWFSTPWSPCSRSCQGGTQTREVQCLSTNQTLSTRCPPQLRPSRKRPCNSQPCSQRPDDQCKDSSPHCPLVVQARLCVYPYYTATCCRSCAHVLERSPQDPS

SEQ ID NO: 298300 - DNA, 68 bp, Artificial Sequence
  derived and/or modified sequence
accacacacaaaatacaccacacaccacacacacaccacacactatacacacaccacacaccacacac

SEQ ID NO: 298301 - DNA, 3906 bp, Artificial Sequence
  derived and/or modified sequence
gtgtgtcccccactgcactcctgaacttggaggacagggtcgccgcgagggacgcagagagcaccctccacgcccagatgcctgcgtagtttttgtgaccagtccgctcctgcctccccctggggcagtagagggggagcgatggagaactggactggcaggccctggctgtatctgctgctgcttctgtccctccctcagctctgcttggatcaggaggtgttgtccggacactctcttcagacacctacagaggagggccagggccccgaaggtgtctggggaccttgggtccagtgggcctcttgctcccagccctgcggggtgggggtgcagcgcaggagccggacatgtcagctccctacagtgcagctccacccgagtctgcccctccctccccggcccccaagacatccagaagccctcctcccccggggccagggtcccagaccccagacttctccagaaaccctccccttgtacaggacacagtctcggggaaggggtggcccacttcgaggtcccgcttcccacctagggagagaggagacccaggagattcgagcggccaggaggtcccggcttcgagaccccatcaagccaggaatgttcggttatgggagagtgccctttgcattgccactgcaccggaaccgcaggcaccctcggagcccacccagatctgagctgtccctgatctcttctagaggggaagaggctattccgtcccctactccaagagcagagccattctccgcaaacggcagcccccaaactgagctccctcccacagaactgtctgtccacaccccatccccccaagcagaacctctaagccctgaaactgctcagacagaggtggcccccagaaccaggcctgcccccctacggcatcaccccagagcccaggcctctggcacagagcccccctcacccacgcactccttaggagaaggtggcttcttccgtgcatcccctcagccacgaaggccaagttcccagggttgggccagtccccaggtagcagggagacgccctgatccttttccttcggtccctcggggccgaggccagcagggccaagggccttggggaacgggggggactcctcacgggccccgcctggagcctgaccctcagcacccgggcgcctggctgcccctgctgagcaacggcccccatgccagctccctctggagcctctttgctcccagtagccctattccaagatgttctggggagagtgaacagctaagagcctgcagccaagcgccctgcccccctgagcagccagacccccgggccctgcagtgcgcagcctttaactcccaggaattcatgggccagctgtatcagtgggagcccttcactgaagcccctctgcttcccctgcgccatgccttctttcttctccctggggctgggtcaggagacagcacaggtgtccagggctcccagcgctgtgaactgaactgccggccccgtggcttccgcttctatgtccgtcacactgaaaaggtccaggatgggaccctgtgtcagcctggagcccctgacatctgtgtggctggacgctgtctgagccccggctgtgatgggatccttggctctggcaggcgtcctgatggctgtggagtctgtgggggtgatgattctacctgtcgccttgtttcggggaacctcactgaccgagggggccccctgggctatcagaagatcttgtggattccagcgggagccttgcggctccagattgcccagctccggcctagctccaactacctggcacttcgtggccctgggggccggtccatcatcaatgggaactgggctgtggatccccctgggtcctacagggccggcgggaccgtctttcgatataaccgtcctcccagggaggagggcaaaggggagagtctgtcggctgaaggccccaccacccagcctgtggatgtctatatgatctttcaggaggaaaacccaggcgttttttatcagtatgtcatctcttcacctcctccaatccttgagaaccccaccccagagccccctgtcccccagcttcagccggagattctgagggtggagcccccacttgctccggcaccccgcccagcccggaccccaggcaccctccagcgtcaggtgcggatcccccagatgcccgccccgccccatcccaggacacccctggggtctccagctgcgtactggaaacgagtgggacactctgcatgctcagcgtcctgcgggaaaggtgtctggcgccccattttcctctgcatctcccgtgagtcgggagaggaactggatgaacgcagctgtgccgcgggtgccaggcccccagcctcccctgaaccctgccacggcaccccatgccccccatactgggaggctggcgagtggacatcctgcagccgctcctgtggccccggcacccagcaccgccagctgcagtgccggcaggaatttggggggggtggctcctcggtgcccccggagcgctgtggacatctcccccggcccaacatcacccagtcttgccagctgcgcctctgtggccattgggaagttggctctccttggagccagtgctccgtgcggtgcggccggggccagagaagccggcaggttcgctgtgttgggaacaatggtgatgaagtgagcgagcaggagtgtgcgtcaggccccccgcagccccccagcagagaggcctgtgacatggggccctgtactactgcctggttccacagcgactggagctccaagtgctcagccgagtgtgggacgggaatccagcggcgctctgtggtctgccttgggagtggggcagccctcgggccaggccagggggaagcaggagcaggaactgggcagagctgtccaacaggaagccggccccctgacatgcgcgcctgcagcctggggccctgtgagagaacttggcgctggtacacagggccctggggtgagtgctcctccgaatgtggctctggcacacagcgtagagacatcatctgtgtatccaaactggggacggagttcaacgtgacttctccgagcaactgttctcacctccccaggccccctgccctgcagccctgtcaagggcaggcctgccaggaccgatggttttccacgccctggagcccatgttctcgctcctgccaagggggaacgcagacacgggaggtccagtgcctgagcaccaaccagaccctcagcacccgatgccctcctcaactgcggccctccaggaagcgcccctgtaacagccaaccctgcagccagcgccctgatgatcaatgcaaggacagctctccacattgccccctggtggtacaggcccggctctgcgtctacccctactacacagccacctgttgccgctcttgcgcacatgtcctggagcggtctccccaggatccctcctgaaaggggtccggggcaccttcacggttttctgtgccaccatcggtcacccattgatcggcccactctgaaccccctggctctccagcctgtcccagtctcagcagggatgtcctccaggtgacagagggtggcaaggtgactgacacaaagtgactttcagggctgtggtcaggcccatgtggtggtgtgatgggtgtgtgcacatatgcctcaggtgtgcttttgggactgcatggatatgtgtgtgctcaaacgtgtatcacttttcaaaaagaggttacacagactgagaaggacaagacctgtttccttgagactttcctaggtggaaaggaaagcaagtctgcagttccttgctaatctgagctacttagagtgtggtctccccaccaactccagttttgtgccctaagcctcatttctcatgttcagacctcacatcttctaagccgccctgtgtctctgacccct

SEQ ID NO: 298302 - protein, 1074 aa, Artificial Sequence
  derived and/or modified sequence
MENWTGRPWLYLLLLLSLPQLCLDQEVLSGHSLQTPTEEGQGPEGVWGPWVQWASCSQPCGVGVQRRSRTCQLPTVQLHPSLPLPPRPPRHPEALLPRGQGPRPQTSPETLPLYRTQSRGRGGPLRGPASHLGREETQEIRAARRSRLRDPIKPGMFGYGRVPFALPLHRNRRHPRSPPRSELSLISSRGEEAIPSPTPRAEPFSANGSPQTELPPTELSVHTPSPQAEPLSPETAQTEVAPRTRPAPLRHHPRAQASGTEPPSPTHSLGEGGFFRASPQPRRPSSQGWASPQVAGRRPDPFPSVPRGRGQQGQGPWGTGGTPHGPRLEPDPQHPGAWLPLLSNGPHASSLWSLFAPSSPIPRCSGESEQLRACSQAPCPPEQPDPRALQCAAFNSQEFMGQLYQWEPFTEVQGSQRCELNCRPRGFRFYVRHTEKVQDGTLCQPGAPDICVAGRCLSPGCDGILGSGRRPDGCGVCGGDDSTCRLVSGNLTDRGGPLGYQKILWIPAGALRLQIAQLRPSSNYLALRGPGGRSIINGNWAVDPPGSYRAGGTVFRYNRPPREEGKGESLSAEGPTTQPVDVYMIFQEENPGVFYQYVISSPPPILENPTPEPPVPQLQPEILRVEPPLAPAPRPARTPGTLQRQVRIPQMPAPPHPRTPLGSPAAYWKRVGHSACSASCGKGVWRPIFLCISRESGEELDERSCAAGARPPASPEPCHGTPCPPYWEAGEWTSCSRSCGPGTQHRQLQCRQEFGGGGSSVPPERCGHLPRPNITQSCQLRLCGHWEVGSPWSQCSVRCGRGQRSRQVRCVGNNGDEVSEQECASGPPQPPSREACDMGPCTTAWFHSDWSSKCSAECGTGIQRRSVVCLGSGAALGPGQGEAGAGTGQSCPTGSRPPDMRACSLGPCERTWRWYTGPWGECSSECGSGTQRRDIICVSKLGTEFNVTSPSNCSHLPRPPALQPCQGQACQDRWFSTPWSPCSRSCQGGTQTREVQCLSTNQTLSTRCPPQLRPSRKRPCNSQPCSQRPDDQCKDSSPHCPLVVQARLCVYPYYTATCCRSCAHVLERSPQDPS

SEQ ID NO: 298303 - DNA, 4197 bp, Artificial Sequence
  derived and/or modified sequence
ccgccgcggagcgaggttgcctggagagagcgcctgggcgcagaagggttaacgggccaccgggggctcgcagagcaggagggtgctctcggacggtgtgtcccccactgcactcctgaacttggaggacagggtcgccgcgagggacgcagagagcaccctccacgcccagatgcctgcgtagtttttgtgaccagtccgctcctgcctccccctggggcagtagagggggagcgatggagaactggactggcaggccctggctgtatctgctgctgcttctgtccctccctcagctctgcttggatcaggaggtgttgtccggacactctcttcagacacctacagaggagggccagggccccgaaggtgtctggggaccttgggtccagtgggcctcttgctcccagccctgcggggtgggggtgcagcgcaggagccggacatgtcagctccctacagtgcagctccacccgagtctgcccctccctccccggcccccaagacatccagaagccctcctcccccggggccagggtcccagaccccagacttctccagaaaccctccccttgtacaggacacagtctcggggaaggggtggcccacttcgaggtcccgcttcccacctagggagagaggagacccaggagattcgagcggccaggaggtcccggcttcgagaccccatcaagccaggaatgttcggttatgggagagtgccctttgcattgccactgcaccggaaccgcaggcaccctcggagcccacccagatctgagctgtccctgatctcttctagaggggaagaggctattccgtcccctactccaagagcagagccattctccgcaaacggcagcccccaaactgagctccctcccacagaactgtctgtccacaccccatccccccaagcagaacctctaagccctgaaactgctcagacagaggtggcccccagaaccaggcctgcccccctacggcatcaccccagagcccaggcctctggcacagagcccccctcacccacgcactccttaggagaaggtggcttcttccgtgcatcccctcagccacgaaggccaagttcccagggttgggccagtccccaggtagcagggagacgccctgatccttttccttcggtccctcggggccgaggccagcagggccaagggccttggggaacgggggggactcctcacgggccccgcctggagcctgaccctcagcacccgggcgcctggctgcccctgctgagcaacggcccccatgccagctccctctggagcctctttgctcccagtagccctattccaagatgttctggggagagtgaacagctaagagcctgcagccaagcgccctgcccccctgagcagccagacccccgggccctgcagtgcgcagcctttaactcccaggaattcatgggccagctgtatcagtgggagcccttcactgaagtccagggctcccagcgctgtgaactgaactgccggccccgtggcttccgcttctatgtccgtcacactgaaaaggtccaggatgggaccctgtgtcagcctggagcccctgacatctgtgtggctggacgctgtctgagccccggctgtgatgggatccttggctctggcaggcgtcctgatggctgtggagtctgtgggggtgatgattctacctgtcgccttgtttcggggaacctcactgaccgagggggccccctgggctatcagaagatcttgtggattccagcgggagccttgcggctccagattgcccagctccggcctagctccaactacctggcacttcgtggccctgggggccggtccatcatcaatgggaactgggctgtggatccccctgggtcctacagggccggcgggaccgtctttcgatataaccgtcctcccagggaggagggcaaaggggagagtctgtcggctgaaggccccaccacccagcctgtggatgtctatatgatctttcaggaggaaaacccaggcgttttttatcagtatgtcatctcttcacctcctccaatccttgagaaccccaccccagagccccctgtcccccagcttcagccggagattctgagggtggagcccccacttgctccggcaccccgcccagcccggaccccaggcaccctccagcgtcaggtgcggatcccccagatgcccgccccgccccatcccaggacacccctggggtctccagctgcgtactggaaacgagtgggacactctgcatgctcagcgtcctgcgggaaaggtgtctggcgccccattttcctctgcatctcccgtgagtcgggagaggaactggatgaacgcagctgtgccgcgggtgccaggcccccagcctcccctgaaccctgccacggcaccccatgccccccatactgggaggctggcgagtggacatcctgcagccgctcctgtggccccggcacccagcaccgccagctgcagtgccggcaggaatttggggggggtggctcctcggtgcccccggagcgctgtggacatctcccccggcccaacatcacccagtcttgccagctgcgcctctgtggccattgggaagttggctctccttggagccagtgctccgtgcggtgcggccggggccagagaagccggcaggttcgctgtgttgggaacaatggtgatgaagtgagcgagcaggagtgtgcgtcaggccccccgcagccccccagcagagaggcctgtgacatggggccctgtactactgcctggttccacagcgactggagctccaagtgctcagccgagtgtgggacgggaatccagcggcgctctgtggtctgccttgggagtggggcagccctcgggccaggccagggggaagcaggagcaggaactgggcagagctgtccaacaggaagccggccccctgacatgcgcgcctgcagcctggggccctgtgagagaacttggcgctggtacacagggccctggggtgagtgctcctccgaatgtggctctggcacacagcgtagagacatcatctgtgtatccaaactggggacggagttcaacgtgacttctccgagcaactgttctcacctccccaggccccctgccctgcagccctgtcaagggcaggcctgccaggaccgatggttttccacgccctggagcccatgttctcgctcctgccaagggggaacgcagacacgggaggtccagtgcctgagcaccaaccagaccctcagcacccgatgccctcctcaactgcggccctccaggaagcgcccctgtaacagccaaccctgcagccagcgccctgatgatcaatgcaaggacagctctccacattgccccctggtggtacaggcccggctctgcgtctacccctactacacagccacctgttgccgctcttgcgcacatgtcctggagcggtctccccaggatccctcctgaaaggggtccggggcaccttcacggttttctgtgccaccatcggtcacccattgatcggcccactctgaaccccctggctctccagcctgtcccagtctcagcagggatgtcctccaggtgacagagggtggcaaggtgactgacacaaagtgactttcagggctgtggtcaggcccatgtggtggtgtgatgggtgtgtgcacatatgcctcaggtgtgcttttgggactgcatggatatgtgtgtgctcaaacgtgtatcacttttcaaaaagaggttacacagactgagaaggacaagacctgtttccttgagactttcctaggtggaaaggaaagcaagtctgcagttccttgctaatctgagctacttagagtgtggtctccccaccaactccagttttgtgccctaagcctcatttctcatgttcagacctcacatcttctaagccgccctgtgtctctgaccccttctcatttgcctagtatctctgcccctgcctccctaattagctagggctggggtcagccactgccaatcctgccttactcaggaaggcaggaggaaagagactgcctctccagagcaaggcccagctgggcagagggtgaaaaagagaaatgtgagcatccgctcccccaccaccccgcccagcccctagccccactccctgcctcctgaaatggttcccacccagaactaatttattttttattaaagatggtcatgacaaatg

SEQ ID NO: 298304 - DNA, 4167 bp, Artificial Sequence
  derived and/or modified sequence
gaggatcctaaagggatggaccagtttcaccccctcctccatattctctgagctgtcctcccagccccaagctctctggacactggagaggtaaccaccaggcttctgtccctgcagagagcaccctccacgcccagatgcctgcgtagtttttgtgaccagtccgctcctgcctccccctggggcagtagagggggagcgatggagaactggactggcaggccctggctgtatctgctgctgcttctgtccctccctcagctctgcttggatcaggaggtgttgtccggacactctcttcagacacctacagaggagggccagggccccgaaggtgtctggggaccttgggtccagtgggcctcttgctcccagccctgcggggtgggggtgcagcgcaggagccggacatgtcagctccctacagtgcagctccacccgagtctgcccctccctccccggcccccaagacatccagaagccctcctcccccggggccagggtcccagaccccagacttctccagaaaccctccccttgtacaggacacagtctcggggaaggggtggcccacttcgaggtcccgcttcccacctagggagagaggagacccaggagattcgagcggccaggaggtcccggcttcgagaccccatcaagccaggaatgttcggttatgggagagtgccctttgcattgccactgcaccggaaccgcaggcaccctcggagcccacccagatctgagctgtccctgatctcttctagaggggaagaggctattccgtcccctactccaagagcagagccattctccgcaaacggcagcccccaaactgagctccctcccacagaactgtctgtccacaccccatccccccaagcagaacctctaagccctgaaactgctcagacagaggtggcccccagaaccaggcctgcccccctacggcatcaccccagagcccaggcctctggcacagagcccccctcacccacgcactccttaggagaaggtggcttcttccgtgcatcccctcagccacgaaggccaagttcccagggttgggccagtccccaggtagcagggagacgccctgatccttttccttcggtccctcggggccgaggccagcagggccaagggccttggggaacgggggggactcctcacgggccccgcctggagcctgaccctcagcacccgggcgcctggctgcccctgctgagcaacggcccccatgccagctccctctggagcctctttgctcccagtagccctattccaagatgttctggggagagtgaacagctaagagcctgcagccaagcgccctgcccccctgagcagccagacccccgggccctgcagtgcgcagcctttaactcccaggaattcatgggccagctgtatcagtgggagcccttcactgaagtccagggctcccagcgctgtgaactgaactgccggccccgtggcttccgcttctatgtccgtcacactgaaaaggtccaggatgggaccctgtgtcagcctggagcccctgacatctgtgtggctggacgctgtctgagccccggctgtgatgggatccttggctctggcaggcgtcctgatggctgtggagtctgtgggggtgatgattctacctgtcgccttgtttcggggaacctcactgaccgagggggccccctgggctatcagaagatcttgtggattccagcgggagccttgcggctccagattgcccagctccggcctagctccaactacctggcacttcgtggccctgggggccggtccatcatcaatgggaactgggctgtggatccccctgggtcctacagggccggcgggaccgtctttcgatataaccgtcctcccagggaggagggcaaaggggagagtctgtcggctgaaggccccaccacccagcctgtggatgtctatatgatctttcaggaggaaaacccaggcgttttttatcagtatgtcatctcttcacctcctccaatccttgagaaccccaccccagagccccctgtcccccagcttcagccggagattctgagggtggagcccccacttgctccggcaccccgcccagcccggaccccaggcaccctccagcgtcaggtgcggatcccccagatgcccgccccgccccatcccaggacacccctggggtctccagctgcgtactggaaacgagtgggacactctgcatgctcagcgtcctgcgggaaaggtgtctggcgccccattttcctctgcatctcccgtgagtcgggagaggaactggatgaacgcagctgtgccgcgggtgccaggcccccagcctcccctgaaccctgccacggcaccccatgccccccatactgggaggctggcgagtggacatcctgcagccgctcctgtggccccggcacccagcaccgccagctgcagtgccggcaggaatttggggggggtggctcctcggtgcccccggagcgctgtggacatctcccccggcccaacatcacccagtcttgccagctgcgcctctgtggccattgggaagttggctctccttggagccagtgctccgtgcggtgcggccggggccagagaagccggcaggttcgctgtgttgggaacaatggtgatgaagtgagcgagcaggagtgtgcgtcaggccccccgcagccccccagcagagaggcctgtgacatggggccctgtactactgcctggttccacagcgactggagctccaagtgctcagccgagtgtgggacgggaatccagcggcgctctgtggtctgccttgggagtggggcagccctcgggccaggccagggggaagcaggagcaggaactgggcagagctgtccaacaggaagccggccccctgacatgcgcgcctgcagcctggggccctgtgagagaacttggcgctggtacacagggccctggggtgagtgctcctccgaatgtggctctggcacacagcgtagagacatcatctgtgtatccaaactggggacggagttcaacgtgacttctccgagcaactgttctcacctccccaggccccctgccctgcagccctgtcaagggcaggcctgccaggaccgatggttttccacgccctggagcccatgttctcgctcctgccaagggggaacgcagacacgggaggtccagtgcctgagcaccaaccagaccctcagcacccgatgccctcctcaactgcggccctccaggaagcgcccctgtaacagccaaccctgcagccagcgccctgatgatcaatgcaaggacagctctccacattgccccctggtggtacaggcccggctctgcgtctacccctactacacagccacctgttgccgctcttgcgcacatgtcctggagcggtctccccaggatccctcctgaaaggggtccggggcaccttcacggttttctgtgccaccatcggtcacccattgatcggcccactctgaaccccctggctctccagcctgtcccagtctcagcagggatgtcctccaggtgacagagggtggcaaggtgactgacacaaagtgactttcagggctgtggtcaggcccatgtggtggtgtgatgggtgtgtgcacatatgcctcaggtgtgcttttgggactgcatggatatgtgtgtgctcaaacgtgtatcacttttcaaaaagaggttacacagactgagaaggacaagacctgtttccttgagactttcctaggtggaaaggaaagcaagtctgcagttccttgctaatctgagctacttagagtgtggtctccccaccaactccagttttgtgccctaagcctcatttctcatgttcagacctcacatcttctaagccgccctgtgtctctgaccccttctcatttgcctagtatctctgcccctgcctccctaattagctagggctggggtcagccactgccaatcctgccttactcaggaaggcaggaggaaagagactgcctctccagagcaaggcccagctgggcagagggtgaaaaagagaaatgtgagcatccgctcccccaccaccccgcccagcccctagccccactccctgcctcctgaaatggttcccacccagaactaatttattttttattaaagatggtcatgacaaatgagaaa

SEQ ID NO: 298305 - DNA, 2908 bp, Artificial Sequence
  derived and/or modified sequence
aggggccccagtggccgccgcggagcgaggttgcctggagagagcgcctgggcgcagaagggttaacgggccaccgggggctcgcagagcaggagggtgctctcggacggtgtgtcccccactgcactcctgaacttggaggacagggtcgccgcgagggacgcagagagcaccctccacgcccagatgcctgcgtagtttttgtgaccagtccgctcctgcctccccctggggcagtagagggggagcgatggagaactggactggcaggccctggctgtatctgctgctgcttctgtccctccctcagctctgcttggatcaggaggtgttgtccggacactctcttcagacacctacagaggagggccagggccccgaaggtgtctggggaccttgggtccagtgggcctcttgctcccagccctgcggggtgggggtgcagcgcaggagccggacatgtcagctccctacagtgcagctccacccgagtctgcccctccctccccggcccccaagacatccagaagccctcctcccccggggccagggtcccagaccccagacttctccagaaaccctccccttgtacaggacacagtctcggggaaggggtggcccacttcgaggtcccgcttcccacctagggagagaggagacccaggagattcgagcggccaggaggtcccggcttcgagaccccatcaagccaggaatgttcggttatgggagagtgccctttgcattgccactgcaccggaaccgcaggcaccctcggagcccacccagatctgagctgtccctgatctcttctagaggggaagaggctattccgtcccctactccaagagcagagccattctccgcaaacggcagcccccaaactgagctccctcccacagaactgtctgtccacaccccatccccccaagcagaacctctaagccctgaaactgctcagacagaggtggcccccagaaccaggcctgcccccctacggcatcaccccagagcccaggcctctggcacagagcccccctcacccacgcactccttaggagaaggtggcttcttccgtgcatcccctcagccacgaaggccaagttcccagggttgggccagtccccaggtagcagggagacgccctgatccttttccttcggtccctcggggccgaggccagcagggccaagggccttggggaacgggggggactcctcacgggccccgcctggagcctgaccctcagcacccgggcgcctggctgcccctgctgagcaacggcccccatgccagctccctctggagcctctttgctcccagtagccctattccaagatgttctggggagagtgaacagctaagagcctgcagccaagcgccctgcccccctgagcagccagacccccgggccctgcagtgcgcagcctttaactcccaggaattcatgggccagctgtatcagtgggagcccttcactgaagtccagggctcccagcgctgtgaactgaactgccggccccgtggcttccgcttctatgtccgtcacactgaaaaggtccaggatgggaccctgtgtcagcctggagcccctgacatctgtgtggctggacgctgtctgagccccggctgtgatgggatccttggctctggcaggcgtcctgatggctgtggagtctgtgggggtgatgattctacctgtcgccttgtttcggggaacctcactgaccgagggggccccctgggctatcagaagatcttgtggattccagcgggagccttgcggctccagattgcccagctccggcctagctccaactacctggcacttcgtggccctgggggccggtccatcatcaatgggaactgggctgtggatccccctgggtcctacagggccggcgggaccgtctttcgatataaccgtcctcccagggaggagggcaaaggggagagtctgtcggctgaaggccccaccacccagcctgtggatgtctatatgatctttcaggaggaaaacccaggcgttttttatcagtatgtcatctcttcacctcctccaatccttgagaaccccaccccagagccccctgtcccccagcttcagccggagattctgagggtggagcccccacttgctccggcaccccgcccagcccggaccccaggcaccctccagcgtcaggtgcggatcccccagatgcccgccccgccccatcccaggacacccctggggtctccagctgcgtactggaaacgagtgggacactctgcatgctcagcgtcctgcgggaaaggtgtctggcgccccattttcctctgcatctcccgtgagtcgggagaggaactggatgaacgcagctgtgccgcgggtgccaggcccccagcctcccctgaaccctgccacggcaccccatgccccccatactgggaggctggcgagtggacatcctgcagccgctcctgtggccccggcacccagcaccgccagctgcagtgccggcaggaatttggggggggtggctcctcggtgcccccggagcgctgtggacatctcccccggcccaacatcacccagtcttgccagctgcgcctctgtggccattgggaagttggctctccttggagccagtgctccgtgcggtgcggccggggccagagaagccggcaggttcgctgtgttgggaacaatggtgatgaagtgagcgagcaggagtgtgcgtcaggccccccgcagccccccagcagagaggcctgtgacatggggccctgtactactgcctggttccacagcgactggagctccaaggtgagcccggaacccccagccatatcctgcatcctgggtaaccacgcccaggacacctcagcctttccagcatagctcaataaacttgtattgatcaag

SEQ ID NO: 298306 - DNA, 570 bp, Artificial Sequence
  derived and/or modified sequence
atggtgcagggcagcagcagaaccgccagacccctgcccgcccccgcctgcggcctgagccccggccccgactgcaacgccagctggcaggacagagccgccgacttctgccccgtgagagccgtgtgcaaggtgggcccctgcccctgctgccagctgaagaccgaccccagactgggcaagagaaccggcctggacctgttcagcgtgtggagcagaagcgccatgctggcccccgccggcagcgtgctggccatgcccaccctgagaccccccagaaacagcgtgggcgacagcggcgcctgctgcctgagaaccaccggcctggacatcagcaaggtgctgcccgagagcttcctgagctgccccctgctggagctgccctggcacctgagcagctgggtgctgaaccccggcctgcccaccctgagaaccccccacgccagctacagctgcttcgccgcccaggccagaagccccgagagagccgccggcggcgcctggcccctgaccggcaagccctggcccagaaccggcatcctgagccccagccacagcgagatcctgtag

SEQ ID NO: 298307 - protein, 436 aa, Artificial Sequence
  derived and/or modified sequence
MGSLALAGVLMAVESVGVMILPVALFRGTSLTEGAPWAIRRSCGFQREPCGSRLPSSGLAPTTWHFVALGRSIINGNWAVDPPGSYRAGGTVFRYNRPPREEGKGESLSAEGPTTQPVDVYMIFQEENPGVFYQYVISSPPPILENPTPEPPVPQLQPEILRVEPPLAPAPRPARTPGTLQRQVRIPQMPAPPHPRTPLGSPAAYWKRVGHSACSASCGKGVWRPIFLCISRESGEELDERSCAAGARPPASPEPCHGTPCPPYWEAGEWTSCSRSCGPGTQHRQLQCRQEFGGGGSSVPPERCGHLPRPNITQSCQLRLCGHWEVGSPWSQCSVRCGRGQRSRQVRCVGNNGDEVSEQECASGPPQPPSREACDMGPCTTAWFHSDWSSKCSAECGTGIQRRSVVCLGSGAALGPGQGEAGAGTGQSCPTGSRPP

SEQ ID NO: 298308 - DNA, 618 bp, Artificial Sequence
  derived and/or modified sequence
atggaggacggcggacagcgagaggaggagacgcgcagaaatgccacatgtggcgctgctgccaaaagtgagaataggggtaagaggcacgcatcagcaggaaagaaaggcgcaggcggaacctcccccactgcacccagcacgaagaggcccctccctggactgagtgcgccactgggtgccggtagcgcctctagccctccccttagggcaccggtgccaaggagtgagtgccccggacggcgtaggccagtgctggccgctcgctccgacgccctggaatcatcgcctatctccctgcccgcaacgcccgtcaggaggcctttgctgtcttactccgcacctacccacttgggaacccctggaggcgcaagggggcacttgcagggcgaggggctcagaggccagggcaagccacctgtgtggcgcgttcgcagagccctcccccctggctggacccagcaagcggaagcccaggagcagggctctgcaacgcgagcagggctgggagccaggcgaggggtcggtactgcctcatggggttggacttgggctacatgcggtcggaagggcgctcggaacagaaaacgaagcgatgagagacccagacctccatag

SEQ ID NO: 298309 - DNA, 4195 bp, Artificial Sequence
  derived and/or modified sequence
ccgccgcggagcgaggttgcctggagagagcgcctgggcgcagaagggttaacgggccaccgggggctcgcagagcaggagggtgctctcggacggtgtgtcccccactgcactcctgaacttggaggacagggtcgccgcgagggacgcagagagcaccctccacgcccagatgcctgcgtagtttttgtgaccagtccgctcctgcctccccctggggcagtagagggggagcgatggagaactggactggcaggccctggctgtatctgctgctgcttctgtccctccctcagctctgcttggatcaggaggtgttgtccggacactctcttcagacacctacagaggagggccagggccccgaaggtgtctggggaccttgggtccagtgggcctcttgctcccagccctgcggggtgggggtgcagcgcaggagccggacatgtcagctccctacagtgcagctccacccgagtctgcccctccctccccggcccccaagacatccagaagccctcctcccccggggccagggtcccagaccccagacttctccagaaaccctccccttgtacaggacacagtctcggggaaggggtggcccacttcgaggtcccgcttcccacctagggagagaggagacccaggagattcgagcggccaggaggtcccggcttcgagaccccatcaagccaggaatgttcggttatgggagagtgccctttgcattgccactgcaccggaaccgcaggcaccctcggagcccacccagatctgagctgtccctgatctcttctagaggggaagaggctattccgtcccctactccaagagcagagccattctccgcaaacggcagcccccaaactgagctccctcccacagaactgtctgtccacaccccatccccccaagcagaacctctaagccctgaaactgctcagacagaggtggcccccagaaccaggcctgcccccctacggcatcaccccagagcccaggcctctggcacagagcccccctcacccacgcactccttaggagaaggtggcttcttccgtgcatcccctcagccacgaaggccaagttcccagggttgggccagtccccaggtagcagggagacgccctgatccttttccttcggtccctcggggccgaggccagcagggccaagggccttggggaacgggggggactcctcacgggccccgcctggagcctgaccctcagcacccgggcgcctggctgcccctgctgagcaacggcccccatgccagctccctctggagcctctttgctcccagtagccctattccaagatgttctggggagagtgaacagctaagagcctgcagccaagcgccctgcccccctgagcagccagacccccgggccctgcagtgcgcagcctttaactcccaggaattcatgggccagctgtatcagtgggagcccttcactgaagtccagggctcccagcgctgtgaactgaactgccggccccgtggcttccgcttctatgtccgtcacactgaaaaggtccaggatgggaccctgtgtcagcctggagcccctgacatctgtgtggctggacgctgtctgagccccggctgtgatgggatccttggctctggcaggcgtcctgatggctgtggagtctgtgggggtgatgattctacctgtcgccttgtttcggggaacctcactgaccgagggggccccctgggctatcagaagatcttgtggattccagcgggagccttgcggctccagattgcccagctccggcctagctccaactacctggcacttcgtggccctggggcggtccatcatcaatgggaactgggctgtggatccccctgggtcctacagggccggcgggaccgtctttcgatataaccgtcctcccagggaggagggcaaaggggagagtctgtcggctgaaggccccaccacccagcctgtggatgtctatatgatctttcaggaggaaaacccaggcgttttttatcagtatgtcatctcttcacctcctccaatccttgagaaccccaccccagagccccctgtcccccagcttcagccggagattctgagggtggagcccccacttgctccggcaccccgcccagcccggaccccaggcaccctccagcgtcaggtgcggatcccccagatgcccgccccgccccatcccaggacacccctggggtctccagctgcgtactggaaacgagtgggacactctgcatgctcagcgtcctgcgggaaaggtgtctggcgccccattttcctctgcatctcccgtgagtcgggagaggaactggatgaacgcagctgtgccgcgggtgccaggcccccagcctcccctgaaccctgccacggcaccccatgccccccatactgggaggctggcgagtggacatcctgcagccgctcctgtggccccggcacccagcaccgccagctgcagtgccggcaggaatttggggggggtggctcctcggtgcccccggagcgctgtggacatctcccccggcccaacatcacccagtcttgccagctgcgcctctgtggccattgggaagttggctctccttggagccagtgctccgtgcggtgcggccggggccagagaagccggcaggttcgctgtgttgggaacaatggtgatgaagtgagcgagcaggagtgtgcgtcaggccccccgcagccccccagcagagaggcctgtgacatggggccctgtactactgcctggttccacagcgactggagctccaagtgctcagccgagtgtgggacgggaatccagcggcgctctgtggtctgccttgggagtggggcagccctcgggccaggccagggggaagcaggagcaggaactgggcagagctgtccaacaggaagccggccccctgacatgcgcgcctgcagcctggggccctgtgagagaacttggcgctggtacacagggccctggggtgagtgctcctccgaatgtggctctggcacacagcgtagagacatcatctgtgtatccaaactggggacggagttcaacgtgacttctccgagcaactgttctcacctccccaggccccctgccctgcagccctgtcaagggcaggcctgccaggaccgatggttttccacgccctggagcccatgttctcgctcctgccaagggggaacgcagacacgggaggtccagtgcctgagcaccaaccagaccctcagcacccgatgccctcctcaactgcggccctccaggaagcgcccctgtaacagccaaccctgcagccagcgccctgatgatcaatgcaaggacagctctccacattgccccctggtggtacaggcccggctctgcgtctacccctactacacagccacctgttgccgctcttgcgcacatgtcctggagcggtctccccaggatccctcctgaaaggggtccggggcaccttcacggttttctgtgccaccatcggtcacccattgatcggcccactctgaaccccctggctctccagcctgtcccagtctcagcagggatgtcctccaggtgacagagggtggcaaggtgactgacacaaagtgactttcagggctgtggtcaggcccatgtggtggtgtgatgggtgtgtgcacatatgcctcaggtgtgcttttgggactgcatggatatgtgtgtgctcaaacgtgtatcacttttcaaaaagaggttacacagactgagaaggacaagacctgtttccttgagactttcctaggtggaaaggaaagcaagtctgcagttccttgctaatctgagctacttagagtgtggtctccccaccaactccagttttgtgccctaagcctcatttctcatgttcagacctcacatcttctaagccgccctgtgtctctgaccccttctcatttgcctagtatctctgcccctgcctccctaattagctagggctggggtcagccactgccaatcctgccttactcaggaaggcaggaggaaagagactgcctctccagagcaaggcccagctgggcagagggtgaaaaagagaaatgtgagcatccgctcccccaccaccccgcccagcccctagccccactccctgcctcctgaaatggttcccacccagaactaatttattttttattaaagatggtcatgacaaatg

SEQ ID NO: 298310 - DNA, 1311 bp, Artificial Sequence
  derived and/or modified sequence
atgggcagccttgcccttgccggagttctgatggcagtcgaaagcgttggcgttatgatcttgccagtggccctgtttcgcggcaccagcctgaccgagggcgccccctgggctataagacggtcctgtgggtttcaaagagagccgtgtgggtctaggttaccaagctcagggctggctcccacgacatggcatttcgtggctctgggcaggagtatcataaatggcaactgggctgtggacccccccggctcatatcgcgccggcggaacggttttcaggtacaatcgaccaccaagggaggaagggaagggtgagtccttgtccgccgagggccctaccacgcaaccagtggatgtgtacatgatcttccaggaagagaaccccggcgttttttaccagtacgtgatcagcagccctcccccaatccttgagaaccctacaccagagccacccgttccacagctccagccagaaatcttacgggtagaaccaccactggctcctgcacccagacccgctcggacccccggcaccctccagcgacaggtcagaatccctcagatgcccgcccccccacaccccagaactccgttaggatcccctgccgcatattggaagcgcgttgggcactctgcctgttccgcttcctgcggcaaaggtgtgtggcgcccaatttttctttgtatcagccgagagagcggcgaagaactggatgagcgcagctgcgccgcaggggcgaggcccccagcctcaccagagccttgccatggcaccccctgccccccatactgggaagcaggcgagtggacttcttgttctcgctcctgcggccctggcacacagcatagacagttacaatgtcgccaggagtttggagggggggggtcatctgtgccccccgagagatgcggacacttaccaagaccaaacataactcagagctgccaactgcgcctatgcggacactgggaagttggctctccatggagccagtgcagtgttcgttgcggtaggggtcaacggagccggcaggtccggtgtgtggggaacaatggggatgaggtgtccgagcaagaatgcgcatcaggtccacctcaaccaccatccagggaggcttgcgacatgggcccgtgcaccactgcctggtttcactcagattggtcaagcaagtgctcagctgagtgtggcacaggaatccagaggaggtcagtggtttgtctcggaagtggcgctgctctgggtcctgggcagggcgaggcaggcgccgggaccgggcagagctgcccaacaggaagtagacctccctag

SEQ ID NO: 298311 - DNA, 1311 bp, Artificial Sequence
  derived and/or modified sequence
atgggcagcctggccctggccggcgtgctgatggctgtggagagcgtgggcgtgatgatcctgcctgtggccctcttccggggcaccagcctgacagagggcgccccctgggccatccgccgcagctgtggcttccagcgggagccctgtggcagccggctgcccagcagcggcctggcccccaccacctggcactttgtggccctgggccgcagcatcatcaatggaaactgggccgtggaccccccaggcagctaccgggccggcggcaccgtcttccgctacaaccggcccccccgggaggagggcaagggggagagcctgtctgctgagggccccaccacccagcctgtggatgtgtacatgatcttccaggaggagaaccctggggtcttctaccagtatgtgatcagcagccccccacccatcctggagaaccccaccccagagccccctgtgccccagctgcagcctgagatcctgcgggtggagccccccctggccccagcccccaggcctgcccggaccccaggcaccctgcagaggcaggtgcgcatcccccagatgcctgccccaccccaccccaggacccccctgggcagccctgctgcctactggaagagggtgggccacagcgcctgcagcgccagctgtgggaagggcgtgtggaggcccatcttcctgtgcatcagccgggagagcggggaggagctggatgagaggagctgtgccgccggggcccggcccccagccagccctgagccctgccacggcaccccctgccccccctactgggaggccggggagtggaccagctgcagccgcagctgtggccctggcacccagcaccggcagctgcagtgccggcaggagtttggaggcggcggcagctctgtgcccccagagcgctgtggccacctgccccggcccaacatcacccagagctgccagctgcggctgtgtggccactgggaggtgggcagcccctggagccagtgcagcgtgcgctgtggccggggccagaggagccggcaggtgcgctgtgtgggcaacaatggagatgaggtgtctgagcaggagtgtgccagcggccccccccagccccccagccgggaggcctgtgacatgggcccctgcaccacagcctggttccacagcgactggagcagcaaatgttctgcagaatgtggcaccggcatccagaggagatctgtggtgtgcctgggcagcggggccgccctgggccctggccagggcgaggccggggccggcaccggccagagctgccccaccggcagcaggcctccttag

SEQ ID NO: 298312 - DNA, 1311 bp, Artificial Sequence
  derived and/or modified sequence
atgggcagcctggccctggccggcgtgctgatggccgtggagagcgtgggagtcatgattctgccagtggctttgtttaggggaacatccttgaccgagggggccccctgggccattcggagaagctgcggatttcaaagggaaccctgtggaagtaggctgcccagttccggattggctcccacgacatggcacttcgtcgctctgggcaggagtatcatcaacggaaattgggccgtagatcctcctggcagttatcgcgcaggagggaccgttttcaggtataatcggccgccaagggaggaaggcaaaggtgagtctctgtcagcagagggcccaacaacccagccagtggatgtgtacatgatttttcaggaggagaaccccggagtgttttatcagtatgtaataagcagccctccacctatcctggagaaccccaccccagagcccccagtcccccagctgcagcccgaaattttgcgagtggagccgcctctagcgccagcgccgaggccagctcgaaccccaggtacacttcagcgccaggtgagaataccacagatgcccgccccgccacacccaagaacgccacttgggtcccctgcagcgtattggaaacgcgtcgggcactccgcctgctccgcaagctgtggtaagggcgtttggaggccgatctttctgtgtatctctagggaaagcggcgaggaattggacgaaaggtcttgcgccgcaggtgctagaccacccgcctcccccgaaccttgtcatggaaccccctgccctccttattgggaagcaggcgagtggacaagttgttctcgaagctgcggacccggtactcagcataggcagttgcagtgtaggcaggagttcggcgggggcgggtcttccgtgcctcccgagagatgcggtcatttgcccaggcctaatataactcagtcgtgccagctgagactttgcggccattgggaggttggaagcccctggtcacagtgttctgtccgctgcggccgggggcagcgcagcagacaggtccggtgtgtcggcaacaatggggacgaggtctctgaacaggaatgcgctagtggacctcctcagcctccctcccgggaggcttgcgatatgggaccttgtactactgcctggttccacagtgattggagttcaaagtgctcggcggagtgcgggacagggattcagcgccgctccgtggtatgcctggggagcggcgctgcgctcggtcccgggcaaggcgaagccggcgctggaactggacagtcatgtccaactgggtctaggcccccatag

SEQ ID NO: 298313 - DNA, 1311 bp, Artificial Sequence
  derived and/or modified sequence
atgggctctctggccctggcgggagtgctgatggcagtcgaaagcgttggtgtcatgattcttccggtcgctttgttcaggggtacctccctcacagagggcgcaccctgggctatcagacgctcatgtgggttccagagggagccttgcggtagtcggctgcccagctcagggcttgccccaactacttggcactttgtggcgctgggcaggagcatcatcaacggcaactgggcggtggacccccctggttcgtacagggcgggtggtactgtgttccgctataaccggccaccaagggaggaggggaagggcgaaagcttgtccgccgaggggcctactacccagcccgtggacgtgtatatgatttttcaagaggagaacccaggagtcttttatcagtatgtaattagctctcctccacccatcctcgaaaatcccacaccggagccaccggtgccacagctgcagcccgaaatcctgcgcgtggagcctcctctcgcacctgccccacgtcccgcacgtacacccggtactttgcaacggcaggtcaggatcccacagatgccggcaccccctcatccccgaacacccttggggtcgcctgctgcctattggaagagagtcggccactcagcctgcagcgcttcctgcggcaagggagtctggaggccaatattcctctgcatcagtcgggaaagcggggaggagctggatgagcgcagttgcgccgctggtgcaaggccgccagcaagccccgagccgtgccatggaaccccgtgccccccttattgggaggcgggagaatggacctcctgctcccgctcctgtggcccaggcactcaacaccggcagctccagtgcaggcaggagttcggcggtgggggaagtagtgtgcccccagagcgttgcggccacttgcctcggccaaacataacccagtcttgtcagttgcgactgtgtgggcattgggaggtggggagtccctggagccagtgttccgtgaggtgtgggagaggccagaggtcacggcaggttagatgtgtgggaaataacggagatgaggtctctgagcaggaatgtgcaagcgggccacctcaacccccaagccgggaggcctgtgacatgggaccttgcacaaccgcctggtttcatagtgactggtctagcaaatgtagcgccgaatgtgggacaggaatccagcggagaagtgtcgtctgtctgggatccggagcggcacttggtcccggacaaggagaagcgggtgccggaactgggcagtcatgcccaactggttcacgacccccatag

SEQ ID NO: 298314 - DNA, 1311 bp, Artificial Sequence
  derived and/or modified sequence
atgggcagcctggccctggccggcgtgctgatggccgtggagagcgtgggcgtgatgatcctgcccgtggccctgttcagaggcaccagcctgaccgagggcgccccctgggccatcagaagaagctgcggcttccagagagagccctgcggcagcagactgcccagcagcggcctggcccccaccacctggcacttcgtggccctgggcagaagcatcatcaacggcaactgggccgtggacccccccggcagctacagagccggcggcaccgtgttcagatacaacagaccccccagagaggagggcaagggcgagagcctgagcgccgagggccccaccacccagcccgtggacgtgtacatgatcttccaggaggagaaccccggcgtgttctaccagtacgtgatcagcagccccccccccatcctggagaaccccacccccgagccccccgtgccccagctgcagcccgagatcctgagagtggagccccccctggcccccgcccccagacccgccagaacccccggcaccctgcagagacaggtgagaatcccccagatgcccgcccccccccaccccagaacccccctgggcagccccgccgcctactggaagagagtgggccacagcgcctgcagcgccagctgcggcaagggcgtgtggagacccatcttcctgtgcatcagcagagagagcggcgaggagctggacgagagaagctgcgccgccggcgccagaccccccgccagccccgagccctgccacggcaccccctgccccccctactgggaggccggcgagtggaccagctgcagcagaagctgcggccccggcacccagcacagacagctgcagtgcagacaggagttcggcggcggcggcagcagcgtgccccccgagagatgcggccacctgcccagacccaacatcacccagagctgccagctgagactgtgcggccactgggaggtgggcagcccctggagccagtgcagcgtgagatgcggcagaggccagagaagcagacaggtgagatgcgtgggcaacaacggcgacgaggtgagcgagcaggagtgcgccagcggccccccccagccccccagcagagaggcctgcgacatgggcccctgcaccaccgcctggttccacagcgactggagcagcaagtgcagcgccgagtgcggcaccggcatccagagaagaagcgtggtgtgcctgggcagcggcgccgccctgggccccggccagggcgaggccggcgccggcaccggccagagctgccccaccggcagcagacccccctag

SEQ ID NO: 298315 - protein, 741 aa, Artificial Sequence
  derived and/or modified sequence
MKTRMKIFVMIHFHLMNSTQTNGLDFQKQPVPVGGAISTAQAQAFLGHLHQVQLAGTSLQAAAQSLNVQSKSNEESGDSQQPSQPSQQPSVQAAIPQTQLMLAGGQITGLTLTPAQQQLLLQQAQAQAQLLAAAVQQHSASQQHSAAGATISASAATPMTQIPLSQPIQIAQDLQQLQQLQQQNLNLQQFVLVHPTTNLQPAQFIISQTPQGQQGLLQAQNLLTQLPQQSQANLLQSQPSITLTSQPATPTRTIAATPIQTLPQSQSTPKRIDTPSLEEPSDLEELEQFAKTFKQRRIKLGFTQGDVGLAMGKLYGNDFSQTTISRFEALNLSFKNMCKLKPLLEKWLNDAENLSSDSSLSSPSALNSPGIEGLSRRRKKRTSIETNIRVALEKSFLENQKPTSEEITMIADQLNMEKEVIRVWFCNRRQKEKRINPPSSGGTSSSPIKAIFPSPTSLVATTPSLVTSSAATTLTVSPVLPLTSAAVTNLSVTGTSDTTSNNTATVISTAPPASSAVTSPSLSPSPSASASTSEASSASETSTTQTTSTPLSSPLGTSQVMVTASGLQTAAAAALQGAAQLPANASLAAMAAAAGLNPSLMAPSQFAAGGALLSLNPGTLSGALSPALMSNSTLATIQALASGGSLPITSLDATGNLVFANAGGAPNIVTAPLFLNPQNLSLLTSNPVSLVSAAAASAGNSAPVASLHATSTSAESIQNSLFTVASASGAASTTTTASKAQ

SEQ ID NO: 298316 - protein, 254 aa, Artificial Sequence [sequence omitted]

SEQ ID NO: 298317 - protein, 136 aa, Artificial Sequence
  derived and/or modified sequence
MNNPSETSKPSMESGDGNTGTQTNGLDFQKQPVPVGGAISTAQAQAFLGHLHQVQLAGTSLQAAAQSLNVQSKSNEESGDSQQPSQPSQQPSVQAAIPQTQLMLAGGQITGLTLTPAQQQLLLQQAQAQAQLLAAA

SEQ ID NO: 298318 - protein, 113 aa, Artificial Sequence
  derived and/or modified sequence
MNNPSETSKPSMESGDGNTGTGTAAGCCSAAALRQPAAQCCWSHHLRLCCHAHDADPPVSAHTDRTGSSTTATASTAESQPATVCVGASNHQFAASAVYHLTDAPGPAGSPAS

SEQ ID NO: 298319 - protein, 653 aa, Artificial Sequence
  derived and/or modified sequence
MNNPSETSKPSMESGDGNTGTQTNGLDFQKQPVPVGGAISTAQAQAFLGHLHQVQLAGTSLQAAAQSLNVQSKSNEESGDSQQPSQPSQQPSVQAAIPQTQLMLAGGQITGLTLTPAQQQLLLQQAQAQAQLLAAAVQQHSASQQHSAAGATISASAATPMTQIPLSQPIQIAQDLQQLQQLQQQNLNLQQFVLVHPTTNLQPAQFIISQTPQGQQGLLQAQNLLTQLPQQSQANLLQSQPSITLTSQPATPTRTIAATPIQTLPQSQSTPKRIDTPSLEEPSDLEELEQFAKTFKQRRIKLGFTQGDVGLAMGKLYGNDFSQTTISRFEALNLSFKNMCKLKPLLEKWLNDAENLSSDSSLSSPSALNSPGIEGLSRRRKKRTSIETNIRVALEKSFLENQKPTSEEITMIADQLNMEKEVIRVWFCNRRQKEKRINPPSSGGTSSSPIKAIFPSPTSLVATTPSLVTSSAATTLTVSPVLPLTSAAVTNLSVTGTSDTTSNNTATVISTAPPASSAVTSPSLSPSPSASASTSEASSASETSTTQTTSTPLSSPLGTSQVMVTASGLQTAAAAALQGAAQLPANASLAAMAAAAGLNPSLMAPSQFAAGGALLSLNPGTLSGALSPALMSNSTLATIQGLLHGLENFLTKN

SEQ ID NO: 298320 - DNA, 2232 bp, Artificial Sequence
  derived and/or modified sequence
atgaacaatccctcagagactagcaagccgtcaatggaatctggggatggaaataccgggacgcagaccaacggactggactttcagaagcagccagtccccgtgggtggtgctataagcaccgctcaagcacaggctttccttgggcacttgcatcaggttcagttggcgggcacttcccttcaggccgctgctcagtctctaaacgtgcagtctaagtctaacgaagagtccggcgatagccagcagccctcccagccctcccagcagccttctgtccaggccgccattccccagacccagctgatgctggcagggggtcagatcacgggtctcacgctgaccccagcccagcagcaactgttgcttcagcaggctcaggctcaagctcagctgctggccgccgccgttcagcagcatagcgcctcccagcagcattccgccgctggggccacaatcagcgcaagtgccgcgacccccatgactcagatacccttgtctcagcctattcaaattgctcaggacctgcagcagctgcagcagcttcagcagcagaatcttaacttgcagcagttcgtcctggtacaccccaccactaatcttcagccagctcagtttataatctcccagaccccacagggacagcagggtctgttgcaagcacagaaccttttgacgcaactgccccagcagagccaggccaacctgctgcagagccagccttctattactctgacttctcaaccagctacaccaacgcgcactatagccgccacccctatccagactcttccacaatcccagtctacccccaaacggatcgacacaccgtctttggaggaaccatctgacttggaagagttagaacagttcgctaagacgtttaaacagcggaggattaaactgggcttcacccagggagacgtcggcctggctatgggcaagctgtatggcaatgacttttctcaaacaactatcagccgcttcgaagccctcaacctgtcatttaagaacatgtgtaagcttaaacccctccttgaaaaatggctgaatgatgcagaaaacttatcttccgattcaagtctgtctagtccctcagccctgaatagcccaggcatcgaggggttatcccggagaaggaaaaagcgaacctccattgagacaaacatccgggtcgctctcgaaaagagctttttggaaaaccaaaagcctacctcagaggagataacaatgattgcagaccagttgaacatggagaaagaggtcattcgggtctggttttgcaaccgacgacaaaaagaaaagagaatcaaccctccttcctccggaggcacttcatcttcacctatcaaggcaatctttccgagcccgacttctctggtcgcgaccacgccaagtctggtgacctctagcgctgctacaaccctgactgtcagtcctgtcctgcccttaaccagcgccgccgtcaccaacctgagcgttacaggcaccagtgatactaccagcaacaataccgcgactgttataagtactgcgccaccagctagctctgcagttaccagcccctccctttcccctagcccctctgccagcgcatcaacaagcgaggccagctccgcttctgagaccagcacgacgcagacaacgagtacccccttgtcatccccgctgggcacctcacaggtaatggtaacggcgtctggactgcaaacagctgcagcagctgctctgcagggcgccgctcagctcccagccaatgcctctcttgcggctatggctgcagctgccggactgaacccttccctcatggcgccttcacagttcgcagccggaggagctctactgagcttgaaccctggtacactaagcggggctctctcccctgctctaatgtcgaattctacactggccactatccaagcactggcatcagggggctcccttccgattactagcttagatgccaccggaaatctagtgttcgccaacgccggaggcgctcctaatattgtgaccgcacccctgtttctcaaccctcaaaatctgtcactgcttaccagtaatcctgtatcgctggtgtcagccgccgcagcctctgccggcaacagcgctcccgtcgcatccttgcatgcaacttctactagcgccgaatcaattcagaattcgttgtttacagtggcttctgcctctggggccgcctctactacaaccaccgcgtctaaagcccagtag

SEQ ID NO: 298321 - DNA, 2226 bp, Artificial Sequence
  derived and/or modified sequence
atgaagacccgaatgaagattttcgttatgattcattttcatttaatgaatagtacacagacaaatgggctcgatttccagaaacagcccgttccagtgggaggagccatctcaactgcccaagcgcaagcattcttgggccacctccatcaggtccagctggctggtactagtctccaggcagccgcccagagccttaatgtgcaaagtaaaagcaacgaagagtccggagattcacagcaaccgagtcagccttcccagcagcctagcgtccaggccgcaattccacagactcagttaatgctcgccggaggacagataaccgggctcaccctgacacctgctcaacagcaactgttgctgcagcaggcccaagcacaggcacagctgctagccgcagccgtgcaacagcactcggcttcacagcagcactcagctgccggggccactattagcgcttctgccgccacacctatgacacagatcccccttagccagcccatccagatagctcaagacctccagcaattacaacaattgcagcagcagaatcttaacttacaacagtttgtcctggtccaccccaccaccaaccttcagcctgcacagtttataatctcccagacaccccaagggcagcaaggcttgctgcaagcccagaacttgctaacccagctccctcaacagagccaggctaacctgctccagtcccagccatcaatcaccctgacaagccaacctgccactcctacgagaactattgcagccactccaattcagaccttgccgcaatcccagagcacacccaagcgaatagacactccaagtcttgaagaaccatccgatcttgaggagctcgaacagtttgcaaaaacgtttaagcagcggcgcataaagctaggttttacccagggagacgtgggtctggctatggggaaactgtatggaaacgatttctcgcagaccacaatctcccgcttcgaggcccttaatcttagtttcaagaatatgtgcaagctcaagccccttctcgagaagtggttgaacgacgcggaaaatctatcgagtgattccagcctgagttctccatccgcattgaacagtcccggcatagaaggactgtcccgccgccgcaaaaaaagaacatctatcgaaaccaatatccgcgtggcccttgaaaagtcatttctcgagaaccagaaacctacctctgaagagatcactatgattgctgaccagcttaacatggaaaaggaggttatcagagtctggttctgcaatcgaagacagaaggaaaagcgaattaaccccccctcctctggaggaaccagttcgtcacctattaaggcaattttccccagccctacatccttggtcgctactacaccatccctggtcactagcagtgcggccacaactctcacggtgtccccagtcttgccgctcaccagcgccgcggtaacaaacctgtccgtgaccggtacttcagacactaccagcaataacactgcaactgtgatcagcaccgccccgcctgcttccagcgccgttacttcacccagcctgtctcctagtccgagtgcctctgcctccaccagcgaagcctcttcagcctctgagacttctacaacacagaccacttctacccctctaagctcacctcttgggacctctcaggtcatggtgactgcttccggacttcagacagcggccgccgcagccctccagggggccgcacagctccccgccaacgcgagtctggccgcgatggctgccgccgcggggcttaacccttcgctgatggcaccgtcccagttcgccgcgggaggcgcactgctgtccctgaacccgggtactctctcaggtgccctgtctcctgcccttatgtccaattctacgttggccacaattcaagccttggcatccggcgggtctctccccatcacttccctggacgctactggcaacctcgtgttcgccaacgccgggggcgcccctaatattgtgaccgccccactgtttctgaatccacaaaacctgagcctcttgacttcaaacccagtgtcactggttagtgctgccgcagcgtctgcaggaaacagcgctccggtcgctagccttcacgctaccagcacaagtgccgagtccattcagaactccctcttcaccgtggcctcagccagtggtgccgccagcacaaccacaactgcgtctaaagctcagtag

SEQ ID NO: 298322 - DNA, 2301 bp, Artificial Sequence
  derived and/or modified sequence
atggctgatggaggggcggcttcccaagatgagagcagcgccgctgctgccgccgctgctgactcaagaatgaacaatccgtctgaaactagtaagccgagtatggaatctggcgacggaaatacaggaacccagacgaacggtttagacttccagaaacagccagttcctgtagggggggcaatatccactgcccaggctcaggcatttctgggacacctacaccaggtgcagctagctggcacttcgttgcaagccgcggcacaatccctgaacgtccagagcaaatcgaatgaagagtccggagactcgcaacagccctcacaaccatcacagcagccgagtgtgcaggccgcaattccccagacacagctgatgctcgctgggggacagattacaggtctcactttgacacccgcccagcaacagctgctgctccagcaggctcaggcccaagcccaactgctggccgcggccgtccagcaacactctgcgagtcagcaacattctgccgccggcgccaccattagcgcttcagccgctactcctatgacacaaatccccctgagtcaacctattcagatcgcacaggacttgcaacaactgcagcagctccagcagcagaacctgaacttgcaacaatttgtattagtgcacccgacaacaaatctgcagcctgctcagttcatcatttcacagacacctcaaggtcagcagggcctgctccaggcgcagaacctcctaacccagcttcctcagcagagccaagctaatctgctacagtcccaaccatccattaccctcacatcccagcccgccactccgacaaggactatcgcggccacccccatccaaaccttaccccaatcccagagtacaccaaagcgaatagacaccccatccctggaggagcctagcgacctggaagagttggagcagtttgccaagacgtttaagcagcgccgcattaaacttgggtttacccaaggtgacgttggactcgccatgggtaaactctatggcaatgatttctcccagacaactatctctagatttgaagcactgaatctttccttcaaaaacatgtgcaagctcaagccactgttggaaaagtggttgaatgatgctgagaacctgagttcagattcaagcctttctagcccttctgccctaaattcacctggtatcgagggtctgtcccggcgaagaaaaaagcgaacatccatcgagaccaatatccgcgtagccctggaaaaatcttttctcgagaatcagaagcccacatcagaagaaatcaccatgatcgcagaccagctgaatatggaaaaggaagtcataagggtgtggttttgcaacagaaggcagaaagaaaagagaatcaatccgccttcttcaggaggaacgagtagctcaccaataaaagcgatttttccatcccctacttctctggttgctactactccctctctggttacatcatccgctgcaactacgctgacggtgtctcccgtgctccctctgacaagcgccgctgtaacgaatctctctgttacgggcacttcagatacgacgtctaacaacacagctaccgttattagtacagctcccccggccagcagcgccgtgacatccccttccctgtcaccctctccctctgcttctgcaagcacatcagaggcctcctccgcctccgaaacatccaccactcagactacctctacgccactgagctcaccccttggcacatctcaggtcatggtcaccgcttctggacttcagacagcggcagctgctgcgttacaaggggctgcccagcttccggccaacgcaagtctcgctgccatggcagccgccgctggactgaaccccagcttgatggctccgagccagtttgccgcaggcggcgctctactctcactgaatccaggcactctgtcgggggcattatccccggctctcatgtccaacagtactttagcaactattcaggcattagccagtgggggctccctgccaatcacttccctggacgcaactggtaacttggtcttcgcaaacgcgggaggtgcgcccaatatcgtgacagccccgttgtttttgaatccccagaacttaagcctcctgaccagcaacccagtttcacttgttagtgccgcagccgcctctgccggtaactcagctccagtggcctctctccatgctacttccacttctgcggaatccatccagaatagcttatttactgtggcatcggctagcggggcagcatccaccaccacaactgcatctaaggcccagtag

SEQ ID NO: 298323 - DNA, 1962 bp, Artificial Sequence
  derived and/or modified sequence
atgaacaacccaagtgagacgagtaagccttccatggaaagtggtgacgggaacaccggcactcagactaatgggttggatttccaaaagcagcccgtgcctgtcggcggcgcaataagcactgcccaggctcaagctttcttggggcacttacaccaggtgcagctcgccggcacaagtctccaggcagctgcccaaagcctcaatgtgcagagcaaatctaacgaggagagtggagattcccaacagccatctcagccatctcagcaaccttcagtgcaggccgccattcctcagacccagctgatgctcgccggggggcaaatcacaggtctgaccctcacaccggcccagcagcagctcttgcttcaacaggcccaggcacaagcccagttgttggccgcagccgtgcagcaacatagcgcatctcagcaacactcagctgccggcgctaccatctcagctagcgccgcgacccccatgacccagattcctcttagccaacccatccagatcgcacaggatttgcagcagctgcagcagctgcaacagcagaatctcaatcttcagcagttcgtacttgtccacccaaccacaaacctgcagcccgcccagttcattatttctcagactcctcagggacagcaaggtctcctccaggcccagaacctcttaacccagttaccccagcagtcccaggccaatctgctgcaatcacaaccgtccatcaccctgacctcccaaccggccacaccgaccagaaccattgctgccacccctattcagaccttgccccagtcacagtcaacgccaaaacggatagacactcctagtctggaggaaccgagtgatctggaggaactggagcaattcgcaaaaacatttaagcagaggcgaatcaaactcggatttacacaaggcgatgtaggactggccatgggaaagctatacggaaacgatttctcacagacaacgataagccggtttgaggcactcaatctttcattcaaaaacatgtgcaagctgaaaccccttctggagaaatggctcaatgatgcggaaaatttatctagtgacagctccctgtcctccccctctgcactgaacagcccgggaatcgagggtctctcccgacggcgcaaaaaacgaacctcaattgaaaccaacataagagttgctctggagaagagttttctcgagaatcagaagccaacttctgaagaaataacgatgatcgctgaccagctgaacatggaaaaagaggtgatccgtgtgtggttttgtaaccgccggcaaaaagagaagcggattaacccaccctcttcgggaggcacgtctagctctccaatcaaagcgatatttccgtccccaacgtctctagttgccactacaccatccctcgtgaccagttcagcagctaccaccctgacggtttcccctgtcctgccgctgacatctgcggccgtaactaacctgtccgttacaggaacatcagacacaactagcaataatacagcaactgtcatcagcaccgccccccccgcctccagcgcagtgaccagtcctagccttagtccctctccctccgcgtccgcgagcacctctgaggcgtcttctgcgtctgagacgagtacaacccaaaccacttctacccctctgtcttctcctttaggcacatcccaagtgatggtaacagcctcaggactgcaaaccgcagcagccgccgcgttgcaaggagctgcccagctacccgccaatgcttccttagctgcgatggctgctgcagccggccttaatcctagcctgatggcaccatcacagtttgctgcaggtggcgccctcctgagcctcaacccaggaacactcagcggagctttgtccccggccctgatgagcaatagtaccctggcgaccatccagggcctacttcatggtctggagaatttcctcacgaagaattag

SEQ ID NO: 298324 - DNA, 279 bp, Artificial Sequence
  derived and/or modified sequence
atgaacaacccttccgaaactagtaagccttcgatggagtccggggatggcaatacagggactcagactaatgggctcgactttcagaagcagcccgttccagtgggcggagctattagtacggcacaggcgcaggctttcctgggtcacctgcatcaggtgcaattggctggaacctcacttcaagctgcagctcagtctctcaacgttcagtcaaagtccaacgaggagagcggcgattcacagcagccaagccagccatcacagcaacctagttag

SEQ ID NO: 298325 - DNA, 765 bp, Artificial Sequence
  derived and/or modified sequence
atgaacaatccatccgagacctctaaaccatctatggaatcaggagacggcaacacagggacccagaccaatgggctcgatttccaaaaacagcctgtacccgtcggaggggccatatctacagcacaagcccaggcctttctgggccatctacaccaggtccagctcgccggcacttccctgcaggctgccgcccagtccctcaatgtgcagtcaaagtccaacgaagaatcaggggactcccagcagccttctcaacccagccagcagccatctgttcaagctgccatcccacagacacagctgatgctcgccggaggccagatcacaggcctcacattaactcctgcccagcaacagcttcttctacagcaggctcaagcccaggcacagctgcttgcggcggccgttcagcagcacagtgcctcccagcagcacagcgccgccggggccacgatttctgcctccgccgccacccctatgactcagattcctctcagtcaaccaattcagatcgctcaggacttgcagcagctccagcagcttcagcaacaaaacctgaacctgcaacagttcgtactggtgcatcctactacaaacctgcaacccgcccaatttattatttcccagaccccacagggtcagcaaggtctactgcaggctcagaatcttttgacgcagttacctcaacagagccaggccaacctcttacaatcccagcctagcattactttgacaagtcagatatggcctagtcctgcatag

SEQ ID NO: 298326 - DNA, 2232 bp, Artificial Sequence
  derived and/or modified sequence
atgaacaaccctagcgaaacaagcaaacctagcatggaatctggtgatggcaatacaggtactcagactaatggactggatttccagaagcagcctgtgccggttggtggcgccataagcacagcgcaagcccaggctttccttggccatctgcaccaggttcagctcgcgggcacctctctgcaggccgccgcccagagcctgaatgtacaatctaagtctaacgaggagagcggcgatagccagcagcctagccagccatcccagcaaccaagcgtgcaggccgctatcccccagacccagcttatgttggccggggggcagatcacaggccttacattaaccccagcccaacaacagttgctgctgcagcaggcccaggcacaggcccagctcttagcggcagctgtgcaacagcacagcgcatcccaacagcatagcgcggccggggccactatctctgcctccgccgccaccccaatgactcagattccactgagccagcccattcagattgcccaggacctccagcagctgcagcagctgcagcagcagaacctgaatctgcaacagttcgtcttagtacacccgaccaccaacctgcagcccgcacagttcatcatctcccagaccccacaaggacagcaaggtctccttcaggcccaaaacttactcacgcagctgccccagcagtctcaggcgaatctgctccagtcccagcccagcataaccctcacctcccaacccgccactcctacgagaacaattgctgccacacctatacagacactgccacagagtcagagtacccctaagcgcattgatacgccaagtctcgaggaaccatctgacctggaagagttagagcaatttgccaagacgttcaagcagcggcggattaaacttggctttactcaaggcgatgttgggctagccatggggaaactctacgggaatgatttctcacagaccacaatcagtaggtttgaggctttaaacctgagcttcaagaatatgtgcaagttgaaacctctacttgagaagtggctgaacgatgcagaaaacctgtcttctgacagttccttgagctctccgtccgctctgaacagcccggggatcgaagggctgagtagaaggcgaaagaaaagaacaagtatcgaaaccaatatccgggtggctctagagaagagcttcctcgagaatcaaaagcctacctccgaggagattaccatgatagccgaccaactgaatatggaaaaagaagtcattcgtgtgtggttttgtaacaggcggcagaaggaaaaacgcataaaccctccgtcatctggggggacatcatccagtccaattaaggccatttttccctcccccacctctctggtcgcaactaccccaagcctggtgacctctagcgctgccactaccctgactgttagcccagtgctacccctgaccagcgccgctgtgacaaacctctctgtgacaggcacctccgataccacttccaataacaccgcaactgtaatcagcaccgccccacctgccagctcagccgtgaccagcccgtctctctccccttctccatctgcttccgcctccacttcagaggcctcatccgccagcgaaacctctacaacccaaacaactagtacccccctgtcttctccactaggcacaagccaggtaatggtaactgcatccggattacagacagcggcagccgcagctttacagggagcggcccaactaccagcgaatgcctccctcgcagcgatggcagccgccgctggcctcaatcccagtttaatggccccatcccagtttgctgccgggggtgcactgctgtctctgaaccccggcacactgtcaggtgcactgagtcccgctcttatgtccaatagcacactcgctaccattcaggcccttgcttcaggagggtctctgcctatcaccagccttgatgcaacgggcaacctggtgttcgcaaatgctggcggcgccccaaatatagttacagcacccctgtttttaaacccacagaatttgagtctgcttaccagcaatcctgtgtcgctggtttccgcagcggccgccagtgctggtaattccgcgcccgttgctagtctacatgccacgagcacatcggcagagagtattcagaacagcctttttacggtggcttccgcaagcggggctgcatccactacaaccaccgctagcaaagctcagtag

SEQ ID NO: 298327 - DNA, 411 bp, Artificial Sequence
  derived and/or modified sequence
atgaacaacccaagtgagacctcgaagccctccatggagtccggcgatggcaacaccggcacgcagaccaacggtctcgactttcagaaacagcctgtacccgttggcggggccattagcaccgcgcaggcacaagccttcctgggacacttgcaccaagtacaactcgccggcacaagcttgcaggccgcagcgcaatcgttaaacgtacaatccaagtccaacgaggagagcggcgattcccagcagcctagccaaccttctcagcagcctagtgtgcaagccgcgattccccagacacaactgatgctggccggcgggcagataacagggcttacactgacccctgctcagcagcagctgctgctgcagcaggctcaggcccaggcgcaactgttggccgctgcatag

SEQ ID NO: 298328 - DNA, 1587 bp, Artificial Sequence
  derived and/or modified sequence
atggcggacggaggagccgcatctcaagatgaatccagtgccgccgcagcagccgcggcggattcacgaatgaacaatccttccgagactagcaagcctagcatggaatccggcgacggtaacaccggtacacagacgaacggcctggacttccagaaacagccagtcccagttgggggggctatctcaaccgctcaggctcaggcctttctaggacatttgcaccaagttcagctcgctggaacctcactgcaagccgcagcccaatctctgaatgtgcagagcaagtccaatgaggagtcgggtgatagccaacagccgtcccagccctctcagcagccttctgtccaagcggccattccccagactcagctgatgttggctggaggacagattactgggctgactcttaccccggcacagcagcaattgcttttgcaacaggcacaggcacaggctcagctcctcgccgctgcagtacaacaacatagcgccagtcagcagcattcagctgccggcgcaaccatcagcgcaagcgccgcaactccgatgactcaaattccactgagtcaacccattcagatagcacaggacttgcagcagcttcaacaactccagcagcagaatttgaatctgcagcaattcgtgctagtccaccccaccacaaatctgcaacctgcccagtttataattagtcagactcctcagggtcagcaaggtctattgcaagcccagaatttgctaactcagcttccccagcaaagtcaggccaacctgcttcagtcccagcctagtataacgttaacctcacagcctgcgacacctaccaggactattgccgccacaccaattcaaacgcttccacagtcccagagtactcccaagagaatcgataccccctcattagaggagccttccgatctcgaggaactggaacagttcgccaagacatttaagcaaagaaggatcaagctggggtttacacagggcgacgtcggactggccatgggaaaattgtacggcaacgatttcagtcagacgactatatctaggttcgaagcactgaatctctccttcaaaaatatgtgtaaactaaaacccctcctcgagaagtggcttaatgatgctgagaatctgtcaagtgactccagcttatctagtccatccgccttgaacagtccggggatcgaggggttgtcccggcgcagaaagaaacggaccagtatcgagaccaatattagggttgccctggagaaatccttcctggagaaccagaagccaacctcagaggagataacgatgattgccgatcaacttaacatggagaaagaggtgatccgcgtgtggttctgcaatcgccgccagaaggagaagagaatcaatcccccgtccagcggagggacgtcctcttcgccaatcaaggcaatcttcccctctccgacttccctcgtggccactacacccagcctcgttacatcctccgccgccactacactgaccgtatcccccgtcctcccactcacatccgcagcggtgacaaatcttagcgctttgcagaccccaccccctaccactcaacagccctag

SEQ ID NO: 298329 - DNA, 165 bp, Artificial Sequence
  derived and/or modified sequence
atgaataatccaagtgagacatcgaaaccctcgatggagtcaggggacggaaataccggtacccagaccaatggattggatttccagaagcagcccgtgcctgttgggggggcaatttcgaccgcacaggcacaggcttttcttgggcatttacatcaggtgtag

SEQ ID NO: 298330 - DNA, 2232 bp, Artificial Sequence
  derived and/or modified sequence
atgaacaaccccagcgagaccagcaagcccagcatggagagcggagatggcaacacaggcacccagaccaacggcctggacttccagaagcagcctgtgcctgtgggcggggccatcagcacagcccaggcccaggccttcctgggccacctgcaccaggtgcagctggccggcaccagcctgcaggccgccgcccagagcctgaatgtgcagagcaagagcaatgaggagagcggggacagccagcagcccagccagcccagccagcagcccagcgtgcaggccgccatcccccagacccagctgatgctggccggcggccagatcaccggcctgaccctgaccccagcccagcagcagctgctgctgcagcaggcccaggcccaggcccagctgctggccgctgctgtgcagcagcacagcgccagccagcagcacagcgctgctggggccaccatcagcgccagcgctgccacccccatgacccagatccccctgagccagcccatccagatcgcccaggacctgcagcagctgcagcagctgcagcagcagaacctgaacctgcagcagtttgtgctggtgcaccccaccaccaacctgcagcctgcccagttcatcatcagccagaccccccagggccagcagggcctgctgcaggcccagaacctgctgacccagctgccccagcagagccaggccaacctgctgcagagccagcccagcatcaccctgaccagccagcctgccacccccaccaggaccatcgccgccacccccatccagaccctgccccagagccagagcacccccaagagaattgacacccccagcctggaggagcccagcgacctggaggagctggagcagtttgccaagaccttcaagcagaggcgcatcaagctgggcttcacccagggagatgtgggcctggccatgggcaagctgtatggaaatgacttcagccagaccaccatcagcagatttgaggccctgaacctgtccttcaagaacatgtgcaagctgaagcccctgctggagaagtggctgaatgatgctgagaacctgagcagtgacagcagcctgagcagccccagcgccctgaacagccctggcatcgagggcctgagcagaagaaggaagaagaggaccagcattgagaccaacatccgggtggccctggagaagagcttcctggagaaccagaagcccaccagcgaggagatcaccatgattgctgaccagctgaacatggagaaggaggtgatccgggtgtggttctgcaacagacggcagaaggagaagaggatcaacccccccagcagcggcggcaccagcagcagccccatcaaggccatcttccccagccccaccagcctggtggccaccacccccagcctggtgaccagcagcgctgccaccaccctgactgtgtcccctgtgctgcccctgaccagcgctgctgtgaccaacctgtctgtgacaggcaccagtgacaccaccagcaacaacacagccaccgtcatcagcacagcccccccagccagcagcgctgtgaccagccccagcctgagccccagccccagcgccagcgccagcaccagcgaggccagcagcgccagcgagaccagcaccacccagaccaccagcacccccctgagcagccccctgggcaccagccaggtgatggtgacagccagcggcctgcagacagctgctgctgctgccctgcagggcgccgcccagctgcctgccaatgccagcctggccgccatggctgctgctgctggcctgaaccccagcctgatggcccccagccagtttgctgctgggggcgccctgctgagcctgaaccctggcaccctgagcggggccctgagccctgccctgatgagcaacagcaccctggccaccatccaggccctggccagcggcggcagcctgcccatcaccagcctggatgccaccggcaacctggtgtttgccaatgctgggggcgcccccaacatcgtgacagcccccctcttcctgaacccccagaacctgagcctgctgaccagcaaccctgtgtccctggtgtctgctgctgctgccagcgctggcaacagcgcccctgtggccagcctgcacgccaccagcaccagcgctgagagcatccagaacagcctcttcaccgtggccagcgccagcggggccgccagcaccaccaccacagccagcaaggcccagtag

SEQ ID NO: 298331 - DNA, 2226 bp, Artificial Sequence
  derived and/or modified sequence
atgaagaccaggatgaagatctttgtgatgatccacttccacctgatgaacagcacccagaccaacggcctggacttccagaagcagcctgtgcctgtgggcggggccatcagcacagcccaggcccaggccttcctgggccacctgcaccaggtgcagctggccggcaccagcctgcaggccgccgcccagagcctgaatgtgcagagcaagagcaatgaggagagcggggacagccagcagcccagccagcccagccagcagcccagcgtgcaggccgccatcccccagacccagctgatgctggccggcggccagatcaccggcctgaccctgaccccagcccagcagcagctgctgctgcagcaggcccaggcccaggcccagctgctggccgctgctgtgcagcagcacagcgccagccagcagcacagcgctgctggggccaccatcagcgccagcgctgccacccccatgacccagatccccctgagccagcccatccagatcgcccaggacctgcagcagctgcagcagctgcagcagcagaacctgaacctgcagcagtttgtgctggtgcaccccaccaccaacctgcagcctgcccagttcatcatcagccagaccccccagggccagcagggcctgctgcaggcccagaacctgctgacccagctgccccagcagagccaggccaacctgctgcagagccagcccagcatcaccctgaccagccagcctgccacccccaccaggaccatcgccgccacccccatccagaccctgccccagagccagagcacccccaagagaattgacacccccagcctggaggagcccagcgacctggaggagctggagcagtttgccaagaccttcaagcagaggcgcatcaagctgggcttcacccagggagatgtgggcctggccatgggcaagctgtatggaaatgacttcagccagaccaccatcagcagatttgaggccctgaacctgtccttcaagaacatgtgcaagctgaagcccctgctggagaagtggctgaatgatgctgagaacctgagcagtgacagcagcctgagcagccccagcgccctgaacagccctggcatcgagggcctgagcagaagaaggaagaagaggaccagcattgagaccaacatccgggtggccctggagaagagcttcctggagaaccagaagcccaccagcgaggagatcaccatgattgctgaccagctgaacatggagaaggaggtgatccgggtgtggttctgcaacagacggcagaaggagaagaggatcaacccccccagcagcggcggcaccagcagcagccccatcaaggccatcttccccagccccaccagcctggtggccaccacccccagcctggtgaccagcagcgctgccaccaccctgactgtgtcccctgtgctgcccctgaccagcgctgctgtgaccaacctgtctgtgacaggcaccagtgacaccaccagcaacaacacagccaccgtcatcagcacagcccccccagccagcagcgctgtgaccagccccagcctgagccccagccccagcgccagcgccagcaccagcgaggccagcagcgccagcgagaccagcaccacccagaccaccagcacccccctgagcagccccctgggcaccagccaggtgatggtgacagccagcggcctgcagacagctgctgctgctgccctgcagggcgccgcccagctgcctgccaatgccagcctggccgccatggctgctgctgctggcctgaaccccagcctgatggcccccagccagtttgctgctgggggcgccctgctgagcctgaaccctggcaccctgagcggggccctgagccctgccctgatgagcaacagcaccctggccaccatccaggccctggccagcggcggcagcctgcccatcaccagcctggatgccaccggcaacctggtgtttgccaatgctgggggcgcccccaacatcgtgacagcccccctcttcctgaacccccagaacctgagcctgctgaccagcaaccctgtgtccctggtgtctgctgctgctgccagcgctggcaacagcgcccctgtggccagcctgcacgccaccagcaccagcgctgagagcatccagaacagcctcttcaccgtggccagcgccagcggggccgccagcaccaccaccacagccagcaaggcccagtag

SEQ ID NO: 298332 - DNA, 2301 bp, Artificial Sequence
  derived and/or modified sequence
atggctgatggaggagctgccagccaggatgagagcagcgctgctgctgctgctgctgctgacagcaggatgaacaaccccagcgagaccagcaagcccagcatggagagcggagatggcaacacaggcacccagaccaacggcctggacttccagaagcagcctgtgcctgtgggcggggccatcagcacagcccaggcccaggccttcctgggccacctgcaccaggtgcagctggccggcaccagcctgcaggccgccgcccagagcctgaatgtgcagagcaagagcaatgaggagagcggggacagccagcagcccagccagcccagccagcagcccagcgtgcaggccgccatcccccagacccagctgatgctggccggcggccagatcaccggcctgaccctgaccccagcccagcagcagctgctgctgcagcaggcccaggcccaggcccagctgctggccgctgctgtgcagcagcacagcgccagccagcagcacagcgctgctggggccaccatcagcgccagcgctgccacccccatgacccagatccccctgagccagcccatccagatcgcccaggacctgcagcagctgcagcagctgcagcagcagaacctgaacctgcagcagtttgtgctggtgcaccccaccaccaacctgcagcctgcccagttcatcatcagccagaccccccagggccagcagggcctgctgcaggcccagaacctgctgacccagctgccccagcagagccaggccaacctgctgcagagccagcccagcatcaccctgaccagccagcctgccacccccaccaggaccatcgccgccacccccatccagaccctgccccagagccagagcacccccaagagaattgacacccccagcctggaggagcccagcgacctggaggagctggagcagtttgccaagaccttcaagcagaggcgcatcaagctgggcttcacccagggagatgtgggcctggccatgggcaagctgtatggaaatgacttcagccagaccaccatcagcagatttgaggccctgaacctgtccttcaagaacatgtgcaagctgaagcccctgctggagaagtggctgaatgatgctgagaacctgagcagtgacagcagcctgagcagccccagcgccctgaacagccctggcatcgagggcctgagcagaagaaggaagaagaggaccagcattgagaccaacatccgggtggccctggagaagagcttcctggagaaccagaagcccaccagcgaggagatcaccatgattgctgaccagctgaacatggagaaggaggtgatccgggtgtggttctgcaacagacggcagaaggagaagaggatcaacccccccagcagcggcggcaccagcagcagccccatcaaggccatcttccccagccccaccagcctggtggccaccacccccagcctggtgaccagcagcgctgccaccaccctgactgtgtcccctgtgctgcccctgaccagcgctgctgtgaccaacctgtctgtgacaggcaccagtgacaccaccagcaacaacacagccaccgtcatcagcacagcccccccagccagcagcgctgtgaccagccccagcctgagccccagccccagcgccagcgccagcaccagcgaggccagcagcgccagcgagaccagcaccacccagaccaccagcacccccctgagcagccccctgggcaccagccaggtgatggtgacagccagcggcctgcagacagctgctgctgctgccctgcagggcgccgcccagctgcctgccaatgccagcctggccgccatggctgctgctgctggcctgaaccccagcctgatggcccccagccagtttgctgctggaggagccctgctgagcctgaaccctggcaccctgagcggggccctgagccctgccctgatgagcaacagcaccctggccaccatccaggccctggccagcggcggcagcctgcccatcaccagcctggatgccactggaaacctggtgtttgccaatgccggcggggcccccaacatcgtgacagcccccctcttcctgaacccccagaacctgagcctgctgaccagcaaccctgtgtccctggtgtctgctgctgctgccagcgctggcaacagcgcccctgtggccagcctgcacgccaccagcaccagcgctgagagcatccagaacagcctcttcaccgtggccagcgccagcggggccgccagcaccaccaccacagccagcaaggcccagtag

SEQ ID NO: 298333 - DNA, 1962 bp, Artificial Sequence
  derived and/or modified sequence
atgaacaaccccagcgagaccagcaagcccagcatggagagcggagatggcaacacaggcacccagaccaacggcctggacttccagaagcagcctgtgcctgtgggcggggccatcagcacagcccaggcccaggccttcctgggccacctgcaccaggtgcagctggccggcaccagcctgcaggccgccgcccagagcctgaatgtgcagagcaagagcaatgaggagagcggggacagccagcagcccagccagcccagccagcagcccagcgtgcaggccgccatcccccagacccagctgatgctggccggcggccagatcaccggcctgaccctgaccccagcccagcagcagctgctgctgcagcaggcccaggcccaggcccagctgctggccgctgctgtgcagcagcacagcgccagccagcagcacagcgctgctggggccaccatcagcgccagcgctgccacccccatgacccagatccccctgagccagcccatccagatcgcccaggacctgcagcagctgcagcagctgcagcagcagaacctgaacctgcagcagtttgtgctggtgcaccccaccaccaacctgcagcctgcccagttcatcatcagccagaccccccagggccagcagggcctgctgcaggcccagaacctgctgacccagctgccccagcagagccaggccaacctgctgcagagccagcccagcatcaccctgaccagccagcctgccacccccaccaggaccatcgccgccacccccatccagaccctgccccagagccagagcacccccaagagaattgacacccccagcctggaggagcccagcgacctggaggagctggagcagtttgccaagaccttcaagcagaggcgcatcaagctgggcttcacccagggagatgtgggcctggccatgggcaagctgtatggaaatgacttcagccagaccaccatcagcagatttgaggccctgaacctgtccttcaagaacatgtgcaagctgaagcccctgctggagaagtggctgaatgatgctgagaacctgagcagtgacagcagcctgagcagccccagcgccctgaacagccctggcatcgagggcctgagcagaagaaggaagaagaggaccagcattgagaccaacatccgggtggccctggagaagagcttcctggagaaccagaagcccaccagcgaggagatcaccatgattgctgaccagctgaacatggagaaggaggtgatccgggtgtggttctgcaacagacggcagaaggagaagaggatcaacccccccagcagcggcggcaccagcagcagccccatcaaggccatcttccccagccccaccagcctggtggccaccacccccagcctggtgaccagcagcgctgccaccaccctgactgtgtcccctgtgctgcccctgaccagcgctgctgtgaccaacctgtctgtgacaggcaccagtgacaccaccagcaacaacacagccaccgtcatcagcacagcccccccagccagcagcgctgtgaccagccccagcctgagccccagccccagcgccagcgccagcaccagcgaggccagcagcgccagcgagaccagcaccacccagaccaccagcacccccctgagcagccccctgggcaccagccaggtgatggtgacagccagcggcctgcagacagctgctgctgctgccctgcagggcgccgcccagctgcctgccaatgccagcctggccgccatggctgctgctgctggcctgaaccccagcctgatggcccccagccagtttgctgctgggggcgccctgctgagcctgaaccctggcaccctgagcggggccctgagccctgccctgatgagcaacagcaccctggccaccatccagggcctgctgcacggcctggagaacttcctgaccaagaactag

SEQ ID NO: 298334 - DNA, 279 bp, Artificial Sequence
  derived and/or modified sequence
atgaacaaccccagcgagaccagcaagcccagcatggagagcggagatggcaacacaggcacccagaccaacggcctggacttccagaagcagcctgtgcctgtgggcggggccatcagcacagcccaggcccaggccttcctgggccacctgcaccaggtgcagctggccggcaccagcctgcaggccgccgcccagagcctgaatgtgcagagcaagagcaatgaggagagcggggacagccagcagcccagccagcccagccagcagcccagctag

SEQ ID NO: 298335 - DNA, 765 bp, Artificial Sequence
  derived and/or modified sequence
atgaacaaccccagcgagaccagcaagcccagcatggagagcggagatggcaacacaggcacccagaccaacggcctggacttccagaagcagcctgtgcctgtgggcggggccatcagcacagcccaggcccaggccttcctgggccacctgcaccaggtgcagctggccggcaccagcctgcaggccgccgcccagagcctgaatgtgcagagcaagagcaatgaggagagcggggacagccagcagcccagccagcccagccagcagcccagcgtgcaggccgccatcccccagacccagctgatgctggccggcggccagatcaccggcctgaccctgaccccagcccagcagcagctgctgctgcagcaggcccaggcccaggcccagctgctggccgctgctgtgcagcagcacagcgccagccagcagcacagcgctgctggggccaccatcagcgccagcgctgccacccccatgacccagatccccctgagccagcccatccagatcgcccaggacctgcagcagctgcagcagctgcagcagcagaacctgaacctgcagcagtttgtgctggtgcaccccaccaccaacctgcagcctgcccagttcatcatcagccagaccccccagggccagcagggcctgctgcaggcccagaacctgctgacccagctgccccagcagagccaggccaacctgctgcagagccagcccagcatcaccctgaccagccagatctggcccagccctgcctag

SEQ ID NO: 298336 - DNA, 342 bp, Artificial Sequence
  derived and/or modified sequence
atgaacaaccccagcgagaccagcaagcccagcatggagagcggagatggcaacacaggaactggaacagctgctggctgctgcagcgctgctgccctgcggcagcctgctgcccagtgctgctggagccaccacctgcggctgtgctgccacgcccatgatgctgacccccctgtgtctgcccacacagacagaacaggcagcagcaccacagccacagccagcacagctgagagccagcctgccaccgtgtgtgtgggcgccagcaaccaccagtttgctgccagcgctgtgtaccacctgacagatgcccctggccctgctggcagccctgccagctag

SEQ ID NO: 298337 - DNA, 411 bp, Artificial Sequence
  derived and/or modified sequence
atgaacaaccccagcgagaccagcaagcccagcatggagagcggagatggcaacacaggcacccagaccaacggcctggacttccagaagcagcctgtgcctgtgggcggggccatcagcacagcccaggcccaggccttcctgggccacctgcaccaggtgcagctggccggcaccagcctgcaggccgccgcccagagcctgaatgtgcagagcaagagcaatgaggagagcggggacagccagcagcccagccagcccagccagcagcccagcgtgcaggccgccatcccccagacccagctgatgctggccggcggccagatcaccggcctgaccctgaccccagcccagcagcagctgctgctgcagcaggcccaggcccaggcccagctgctggccgccgcctag

SEQ ID NO: 298338 - DNA, 1587 bp, Artificial Sequence
  derived and/or modified sequence
atggctgatggaggagctgccagccaggatgagagcagcgctgctgctgctgctgctgctgacagcaggatgaacaaccccagcgagaccagcaagcccagcatggagagcggagatggcaacacaggcacccagaccaacggcctggacttccagaagcagcctgtgcctgtgggcggggccatcagcacagcccaggcccaggccttcctgggccacctgcaccaggtgcagctggccggcaccagcctgcaggccgccgcccagagcctgaatgtgcagagcaagagcaatgaggagagcggggacagccagcagcccagccagcccagccagcagcccagcgtgcaggccgccatcccccagacccagctgatgctggccggcggccagatcaccggcctgaccctgaccccagcccagcagcagctgctgctgcagcaggcccaggcccaggcccagctgctggccgctgctgtgcagcagcacagcgccagccagcagcacagcgctgctggggccaccatcagcgccagcgctgccacccccatgacccagatccccctgagccagcccatccagatcgcccaggacctgcagcagctgcagcagctgcagcagcagaacctgaacctgcagcagtttgtgctggtgcaccccaccaccaacctgcagcctgcccagttcatcatcagccagaccccccagggccagcagggcctgctgcaggcccagaacctgctgacccagctgccccagcagagccaggccaacctgctgcagagccagcccagcatcaccctgaccagccagcctgccacccccaccaggaccatcgccgccacccccatccagaccctgccccagagccagagcacccccaagagaattgacacccccagcctggaggagcccagcgacctggaggagctggagcagtttgccaagaccttcaagcagaggcgcatcaagctgggcttcacccagggagatgtgggcctggccatgggcaagctgtatggaaatgacttcagccagaccaccatcagcagatttgaggccctgaacctgtccttcaagaacatgtgcaagctgaagcccctgctggagaagtggctgaatgatgctgagaacctgagcagtgacagcagcctgagcagccccagcgccctgaacagccctggcatcgagggcctgagcagaagaaggaagaagaggaccagcattgagaccaacatccgggtggccctggagaagagcttcctggagaaccagaagcccaccagcgaggagatcaccatgattgctgaccagctgaacatggagaaggaggtgatccgggtgtggttctgcaacagacggcagaaggagaagaggatcaacccccccagcagcggcggcaccagcagcagccccatcaaggccatcttccccagccccaccagcctggtggccaccacccccagcctggtgaccagcagcgctgccaccaccctgactgtgtcccctgtgctgcccctgaccagcgctgctgtgaccaacctgagcgccctgcagaccccaccacccaccacccagcagccctag

SEQ ID NO: 298339 - DNA, 165 bp, Artificial Sequence
  derived and/or modified sequence
atgaacaaccccagcgagaccagcaagcccagcatggagagcggagatggcaacacaggcacccagaccaacggcctggacttccagaagcagcctgtgcctgtgggcggggccatcagcacagcccaggcccaggccttcctgggccacctgcaccaggtgtag

SEQ ID NO: 298340 - DNA, 14332 bp, Artificial Sequence
  derived and/or modified sequence
aaaatggcggacggaggagcagcgagtcaagatgagagttcagccgcggcggcagcagcagcagctactactgggctgtaaacagtgatgccagcaaaatgttacttcagctgatgaagtgatgctgtttcgagaatttgaaagcaatttttcagtggataaagaagttgacagcacgatttgttggatgtgatgaaggattaatgagcatacaccttcacttgtattagcttaagatggaatggttctgggcaatataaaataacagactcaagaatgaacaatccgtcagaaaccagtaaaccatctatggagagtggagatggcaacacagcatggacccttttatgatatgggcactgaaactaaagcacatggtggaagaaggattggtagcatatagaaacatttttagacaaatgaaaaagcaaaaaagtcagaaattacagtgtatttccataaagttacaccaagtgtgcctgcctctcctgcctccccttccagctttttgtcttctgccatttctgagtcagcaagacccctcctgttcctccttctcagcctactcagcatgaagacaaggatgaagatctttgtgatgatccacttccacttaatgaatagcacacaaaccaatggtctggactttcagaagcagcctgtgcctgtaggaggagcaatctcaacagcccaggcgcaggctttccttggacatctccatcaggtccaactcgctggaacaagtttacaggctgctgctcagtctttaaatgtacagtctaaatctaatgaagaatcgggggattcgcagcagccaagccagccttcccagcagccttcagtgcaggcagccattccccagacccagcttatgctagctggaggacagataactgggcttactttgacgcctgcccagcaacagttactactccagcaggcacaggcacaggcacagctgctggctgctgcagtgcagcagcactccgccagccagcagcacagtgctgctggagccaccatctccgcctctgctgccacgcccatgacgcagatccccctgtctcagcccatacagatcgcacaggatcttcaacaactgcaacagcttcaacagcagaatctcaacctgcaacagtttgtgttggtgcatccaaccaccaatttgcagccagcgcagtttatcatctcacagacgccccagggccagcagggtctcctgcaagcgcaaaatcttctaacgcaactacctcagcaaagccaagccaacctcctacagtcgcagccaagcatcaccctcacctcccagccagcaaccccaacacgcacaatagcagcaaccccaattcagacacttccacagagccagtcaacaccaaagcgaattgatactcccagcttggaggagcccagtgaccttgaggagcttgagcagtttgccaagaccttcaaacaaagacgaatcaaacttggattcactcagggtgatgttgggctcgctatggggaaactatatggaaatgacttcagccaaactaccatctctcgatttgaagccttgaacctcagctttaagaacatgtgcaagttgaagccacttttagagaagtggctaaatgatgcagagaacctctcatctgattcgtccctctccagcccaagtgccctgaattctccaggaattgagggcttgagccgtaggaggaagaaacgcaccagcatagagaccaacatccgtgtggccttagagaagagtttcttggagaatcaaaagcctacctcggaagagatcactatgattgctgatcagctcaatatggaaaaagaggtgattcgtgtttggttctgtaaccgccgccagaaagaaaaaagaatcaacccaccaagcagtggtgggaccagcagctcacctattaaagcaattttccccagcccaacttcactggtggcgaccacaccaagccttgtgactagcagtgcagcaactaccctcacagtcagccctgtcctccctctgaccagtgctgctgtgacgaatctttcagttacaggcacttcagacaccacctccaacaacacagcaaccgtgatttccacagcgcctccagcttcctcagcagtcacgtccccctctctgagtccctccccttctgcctcagcctccacctccgaggcatccagtgccagtgagaccagcacaacacagaccacctccactcctttgtcctcccctcttgggaccagccaggtgatggtgacagcatcaggtttgcaaacagcagcagctgctgcccttcaaggagctgcacagttgccagcaaatgccagtcttgctgccatggcagctgctgcaggactaaacccaagcctgatggcaccctcacagtttgcggctggaggtgccttactcagtctgaatccagggaccctgagcggtgctctcagcccagctctaatgagcaacagtacactggcaactattcaagctcttgcttctggtggctctcttccaataacatcacttgatgcaactgggaacctggtatttgccaatgcgggaggagcccccaacatcgtgactgcccctctgttcctgaaccctcagaacctctctctgctcaccagcaaccctgttagcttggtctctgccgccgcagcatctgcagggaactctgcacctgtagccagccttcacgccacctccacctctgctgagtccatccagaactctctcttcacagtggcctctgccagcggggctgcgtccaccaccaccaccgcctccaaggcacagtgagctgggcagagctgggctgccagaagcctttttcactctgcagtgtgattggactgccagccaggttaataaactgaaaaatgtgattggcttcctctcgccgtgttgtgagggcaaaggagagaagggagaaaaaaaaaaaaaaaccacacacacccatacacacataccagaaaaagaaagaaaggatggagacggaacatttgcctaattttgtaataaaacactgtcttttcaggattgcttcatggattggagaactttctaaccaaaaattaaaaaaaaaaaaaaaaaaagaaacaaaaaaatcaaaaacaaacaaaaataagtgaaaggactacttatcatttccagcagtcatgatgacaagttaaggtgggttaccaattccaatataggaaggggatttcttgtttgtctaaatttctttttttcttaaaaaaaaaaaatcatttttatgggtctgttgtacaggccattaagtcataacaaggtgtttataatcgtatcaattgtgttgggggttcctttcttaactggtacaatttaggcaggcctgtattactgtattattattgttgttgttgttattgttttatatatatagtttggacatgtttattatctcttgctcctggatcctatttcagtgagctcccacactgtggggagggagggttttggggtaaggggagacttctgttcttaactgtggggaatgttcttgctggtttccttatccttgatgactcttacagaggtgctagaaaattattttcttttgccacttatgcaagaggcttggtgcagaagctgaaggcagtgtgtgcaaacactcccattccacacacgccccttcccctccccacatcaggtggtgcctttggagcacttttgtgtaggaaggaattcctgctgaactgtagctctcactcacccccaaatcattgaatgaccctgaggcccagttcctgtggtgcaacagtgctgctttctgctactttcaatgggaacagctgtacatgttgcagggcaggatttggttcccaagagcaaagactactgcagacacctgacttggtggttctcctgatttcttatctcctgaaaaatgctcctgctgttggtgtgtttgtttgtttgttccattttgtggaagtttttcatccaaactttaactaacttggcaaagaaaaaaaactgacttactgaaattgggaaacttttcccttcttttattttctaaaggaattctactagactattttccattgataatatatacaaaagaggtgtgatgagaagggtataaggttaccaccttttcctctagagagccacagacttcctttccactggatggtttataaattcctctaaccctgagattcttcttggttctctgactaaaggaggcacttattagccgggctgggatctgtagaacctttgaagaaggactttgagcaggaactttgcacacaccttaagtgtctccttggtttgttcatgatgctcctgctaggtaggtctaaatggcaatacacatctctttattcaatgtagaaagtaattagctctgtaattattttcagggtgtttgtagactatataaatgagcccattgaaaaggaagagtttgtgaaagtggatgaagaggaataagggtaacttggagattaaattcctttttttgtcagtgtactgttgttatgccatctgtaccaaaaaattttccaaaagactggatcactgcagtgcagctcatctaagttccccttcttattggagttaaaggttcccatttggtggctgtgggtgcttgcttaaatctctggtggtcccaagactgcactttttctccctttcgagctggggatgtagagagaacttacaggtgatttttattctgattgcttttgtttgtgtccacaagggagcttggattctgtgtacttgtctctttcccattgtccagtaaggcagtaaatacagacacaatgtgtacttttgtgtgtgattcaagtgggagacagtctgttaaaaggtcagaaacattttagtcccctttaaaatatttcttttagtttatttctatcgtgttttatttcacagatatttaattaccacccctaaatttcctcctcttacccttcaccttccctaaaatccttccaaaatcagtgaactgcaagcagggaaactaacaaatgtccattcaccctttttgtgtggtgtgtttttttatgttttgttttgttttttaactaagcttgaaccaaagtcaatttttagcaagctgctgtactaatggactagttgataacgtgcagttcagacacatcgaggagatagatgctactgacaatttctttttcatttgtctttattaattttatatgaaagttgctgcttgtttttaatcttttatgttggtaaattgtgatatcctctgggcagacattaacttgatgtttaactagtttattaggttggtgtgtaaatagaatgacaatgtcaattactaatttctctcctctccattcactttttctctgttgtagttaaatttaatcttctatcctgacttgacatctctacctttagtctgtggaaatgattttagggctatcagtaatgctgtagctgcccataataatgagtccctcccttgggagtggtgaaacttagaaggaaggattcagggagggaaatgctggtacccagtatactggattagaagttatagcattaatttctcaaaattgctaccaaaggaagtgtggagtcccaagggactcaagctcagtgaggtaagacaaagggcaaggaaaggctgtttgggtggtttttttttccccacatatggtttagaaaatgatccctttcccaaacaaaactcaccaacagactttaatattagaaaagatactaagctttaaatgtcaatacagtggtcttttattccctgccctgtctatattttctactcaatttgggataaggggattttatgtgaagcacttgatgagggtagaccagcataaaaaatctgtttaaaagaagaaataatctttaggaaaagataaatctttagataaaaataaatttttttctctttttttacttatttaaaaataagttgtgaaatgaaaggtacatttacacatgtacacacgaaacactaatatagctttttggtggttgtttagtttaaaatcaactccctatccatcatccctagatattctacttatcgtattgcttcatgaacaccttagtcattttttactttacgtatatatttttttatcatctcaagaaatgcattttgaattgaatgaactatcttctaagctaagatactcaaatttaacttttagccaccttatatgggagagcctggaaactaaaggggaccagggaccatttgaccaaaagaggtgtttggtggagtttctgcatttcaaagaagaaaggccagataggtcatcacaattcattgtattattctttttttttccccttaatgtttatgcaaattttattttatatttctgaatttggttagcacatactaagccaaagactattctaaatgcatttatagtgaatactatgtatgcccatggtaatgggtcctccctaaggagtggtgaatgtaattgtgtgaatcctgcttatcacaagtggtgcaatttggtcataaactttatttataccctgtatacatctgaataacagagcagaaagacctaaaaaagggcttctcacaggaacaatattactatgttgttctaagaaaaaataagttgagtgctgtattagtttaagtgtttctaaagttctataggcagcattttagaattaagaattgtgtatatccattaactgatataattcacatgtccttttatttgttatcagaaagatcaatactatcccaatttattcaacttgttacccaagaaatggaaccaaaggaatccaactttcattttgtgtagaatcatacctacttatacttaatgctagcactgtaagaaataagtcttttttgtttaaaaaagggaagataagattaaagattcttagtgagatcatcttgccaatttgttgtacatctctcattcattgttgggggaaaaaaaagcacaactatacctctttaatgttattttcttccattatccctcatttatttggaaagataagggaaaccttgtctgtattatccagaagcacagatatttgcttgacacaatatttaaattcagcccaatctttaacattaaaaaattttctttttaacttgctggaaaagttggatacattggcaaatatagggaattcatgtcttttttttttttttttttctggtcttgctctgttgcctaggctagagtgcaacggcatgatctcggctcactgcaacctctgcctcccgggttcaagcaattctcctgcttcagcctcccaagtagctgggattacaggcgcccaccaccgcacccggctaatttttgtatttttagtagggacgggatttctccgtgttggccaggctttttgaactcctgaccttaggtgatctgcctgccttggcctcccaaagtgctgggattacaggtatgagccactgtgcccatcctcatgtcaatttttaaagtgataaatcctgatattatacattgcaattagtgtagaataaacgcttggcttatagaactctctgttcttagtctaaagctgttcccaaaccaggtcatcctcacgaaacattcttgaccaagaaaaaagataaggtcattgagataggaagacagaggaaaagcctcttgctgttgtttcttcccaagaaaggagaagccctgccagggagaagtcagtagtattgctgactcactgtatcactgagtgtagggtgtggtagcaaggaggaggcaggggattcacgctgacaggtggctctggcctggctcttggggggccttctgaagaccagtctgcagtttgaggaagggccccaacaattcatttggagagcttggccaaatactttctcattaaatcagcacctaaacttgatgaacttaaagtttgtttattagagttgaaaacattaaaagatgactgatactaatgggagaaaaatactaaagacccaaaatttaaaattttccaaaatggacaagaattgatgggttaatttgctcataactgatatgagtttgcttttatgtgtgtgtggaaagcatttaatgtgtgatgctgttcatagtcctggctatttgatgtcattttcagttttacaacattttgaggatgacactttataaaatggtaaatctttctcagcgtttacaaacttggcttttgagaagggaaaaatcctctttgctatttctgtaagaagaataactgagatcagctattatataggtttgcatggatggtgtccacaatacaaatgtaaacttggacaggaataggataaataaattgctttcatcataaaggccaatcatccatttcttagtccaaggagattaaatataaataggacacccctgagatttccagtaaggtatttgaaaggattccactgggagggcagggaatatattttttctcagagcatccagtttgtacccagttttctatatggtttgtgaactgtagcttttaaaaaaaaattttgtagttttcttctaaccttattcattaagtagttccttgttttggcccttctactcttggccttagctaaaagcagtaaatgtgagtgaattttatgttgattatgtcacctggatctcctttccttcccttctttttctcattgaatggtggtaccttaatttgggtaacagctagcttctggcaccttcataaaatacctcagaatagcttagcattgttgcaaaactggttttaaactaaaaaccaaataaataagtgaaaaaattttataaatagtggaaataattctagctgtagcatttagttgaactaatgtttattatgatcgataaacaagattgatgctgtatgtatttgggatcctgtttataggttacaatttatagggttagggagggttgggtgggggaagaggagatgttgattatgttagaaggaaaacattgctcgtgtgtgtgtttgttttttcttatatctgtcttgccaaaggaaacttgattttccctgtgattggctttggcctctgtggtctggtctgcagcagtgtgtggtggcatgcaggtaacatatggggtgtccagtaggttcagggaccctgagggtgcatttacatcccttcctatggttgcccatgccccccagaccctgccaacctctcctaatgattcattacctctgtacatagcaaaagcataggcaaaggatgaatgcgtgaatgcctggatgtgcagttgagaaacagaggcagacatagacatgcaccaattaatttggagccaagaggtgagtgattgatgtatcttaaatctaggaaagttaaagtgaaacaggttctttgtgttgccctctgtcaagttactgaatgttgtgctaataacacaacactttaaaaccttacttacttttctcataccaaggctagttctttctagaccaaaaacacaaacaggataaaaagcaaaccaagaagttgaaagctaacctgcccacctcacccctgtgatacaaagtgtgaaccttaaggattagttggtgggattgaggagagaattattcttggtgggaacatgaatgagaaatgatgctggcttaggaaaaatcacaagccctttctgcccatactctgggacaaactttcttggctccctgagttcggatatagactgtatctctagaaaggctatttttttaaataaatgatcccacagaacttaagtgggatttggtttagataccaaagacactgctaatgtcattgcttatccttaagttttcaaaacaggcagagggaataggagcaaaaagccaaaatttggaaaagctttactttatctctttccttcccttttccccttttcccagtcccctgctttttgaaggaagtcttcttggttatcctggctttggaaaagagatttattttgttttgctctgctggctctttaaagatggatagttgctcaatctagcagtgatgttcttggaattgctgagaaatttggggagggcaaaagataggggtagaattttttcattatttccctttatctaatacttttaaatagaaccaacacagcctatatgagttcagacaatatttagatgtggtatctccatctgtctcctgtaaaagataagaattttcaagaacaggattacgtggaaaaccaaaagatcttcccttactctcctataaatgttttgttccaaatgtttttatatatgggctctagggagtcaggtagttcattgtttcggtgtactattgataggacacagaaagggagagagggtaaagaaatgtatcactctctgaatattgcatcaaaaatgattaggttgcagaacttcatgaaagctttactaataatcttattgttctgacattatgtaaaggtggtattaatattgtatgacttgtcaaagtgctagataggtttataagtaggtaatagggatgttgaagattagagcacttgaaacagaagttctgggaaaacaaggtgtgtgtaatggaacaccactttgagcacagaaacaaaggtcccttggacctggtagggaagatgtgatttatgattgtttctgtgtccctgtatctgcccaccctgcacagggctccaccacccagggccaccttctggtttaaacccaggacactgtcaaaaagttaagaccccaaaactaatttactgtaaaaaacattgaggactgctgcaaagttttcccttgttttctttgtgtacttgttcatcattgtataagttagccacagcttcacaagagcagcttaaggcttctttcataaattggcagtggcattgagttctcaaacattatatcccaaagtctgcaggcagacagctggatacagcgctgtgtataaatgagacgtccaaacacttgagtttcttaagattgggatctctttcaaatgaaaaaggacagagccaagtagagaaaagactttgtgctcccacccagccttaatgagtctcatggtctaaaagtataggaagaaatgaaatgcactttcagaagctaaaatgacagtgtctgctacaaaaggctgtagttgtaggcagtcggggatgccatgtccttggttccattcctgcgtgagtctgcagaaggcacacactttgtaagagtagagtggactagtgccagcctgaataggtttaaaactgcaaacagttggagaacatggaacaggttggtgcaggaagcctaagattttgcaatcatattataacattggcttttgacaacataaatgttgtatcttccctaaggtcaggtcggggaaagaaagacttccagcttcttacctctgcgtgcatgggcacgtgtgcattgctcagtccgcaggaggtctcactccgcaggaaacgctctcctcccgcataagtctgtacttccatcccctcatctgtggtagtagtgaaggctaggtgagtaagcgtgggctgttctacccaccagaagtccaggagctgttgtatacctcatttctaactcgtgaccgagtgacttgctttaactttctcgaaatcctacagagttgccaagtctgccctccctcctcagtcatgttaaactctggcctatagcatcatgggacctgtagcctagggtgggaccccctaaagcctctgaatgtcgctgcttaaaagctactgcaaactgagggcaaattgcaatcttctattcctttttgttgcaaggggtcttcacaggtctcttaacatctgctttccctgccaccctgcctttaggggctggccagctatccacacccctaacccaccctgtgtttctgacagctggccacacgtcaacttctgtacttgccttttccttggtggggtagaggccaaccccttctcctctgaggcctcagggttctgtttcttttcaggactttgggtagaagggaagacaccaaaggctcctttaagctgactgctgcatacacatttcactttttttcctttgacatgaccaaaaatatccaaatatttaagtttattattattattattattatttgacaatcttatatccaatgggctctctagaagctgcatccccagccctttcaccttttctttgaatgtagttcccaaccttcaattcccacccctaatgctgacaaaaagcttagccaggtcatgatactgctgctataagccaggggagggtggtttctttgttttgttttgttttgttttgtttttcaaatttccagccaaaaccaaagatttcttaatgattgtataaactcaaaacaaacaaaagaaccaaagaaaagggaagtcttcagcatcagtccagtctgtggtgtcctggcacttagaagagtgaggccagggaaggtggggcggggggaccctctgactggatcagaaagggcaggcaagctgcttaccaccttccagggtccagcacaggtgcatgcccctagctttggccctcacaaacttgtgagcatgccctgaaacaaattggcatttcagattttccaaaacaaaagtcaaaaaaccccatcaccaccatcatccaccctacaccaaccagggtcactatggggacttagcacagggcctagggagggtgggagctgctgctggactggcccgaggactccacagagtgggggacgttgaagacactggcgcacgattggctgctctgctgggtgctttaacctctggggctgggcgaatgcacgccacggtgcccttctgagcctttttttcttttcctgtactggaactgcttggaagtggctgtcctgtttgtgagaaaacatgcagaaagattatcaagcttttcatttctctttattgtagttttctttcctttttgcagcaccactgtgcaactatgcattgtacttcacaaccttttgtgctaggtagatgcctgtgactttttaacttggggggtggggggattgcaaatgaaggaactttttacatggatctttttaatctcagttggttgggggaggggggtacttggttcttgggtcacacaagctctatcccaaagcaaaatccaaatgttaataatattagcctgatgcagataccaaagataatttctttcctgcagaaccttagactcgtgtattaagtacgattacccagcacttgcattagtctaacctcagtaattccaaagcttagatgtatattttggtatatttctgggatattaaaaaaaaaatgtcgtttaacttcttgtttgtttcagtgtaatgctcttaaagtcatagcatgaaaataattgaactgtcctattcttagtagtttgaaataatagtatttttgtatgttttgggtgtgtctatgtatgtattaacataacagttttcactgcctaggtgttcataataaaaaagaaaatgaaaaaagttctgagtgtacataatattcaataataatctcccaccaggtgtcaatttagattgcatattcctcattactgttcccaactgggattttgttttcttttaaagagacagtgatcgtgtttttctaaagatgttttctttctctctttcaatatcttaactcactttttttttcttccttttttgtcttaattattaattcaggggtgtttgtccactgttgtcaaaggaggggcacaaggggaattggcccccggcctcctagaactttttgttttatgtactttaaaatgtgagtttgagttcttctttgtggaaacttaagatgtggtgtaaatgattctttccaaaattgtccagcagcttgaatgaggcagtgacaattctgaggtggtttattgggagtccttctacatttctcttagataactctgcactctgggtggctattgtgtagccttactgccccagagtgcctgttagccaaatatttcccctctgataggaatattttctaagaatcagctgataacttgcgtgctggaccttgttatctgtgcccctgggagacacacgttttcttggttttgaaaacctgaaacacaggcaactttacattttggggaattagctgatgcctcctgaagcctgaggaggtggcggggaatatgagcggtgctgtctctctcaaaagtgccctttagatgattccccctcctagggctgcctgcaggggctgtaggcttgggaaagattgtgtaggtgacagtgaatcagaatgaagtggtagattttgtgtagatgcatttgtctgctgtaattttttatatatatattaaacttactgtaactgtacagttcatttctgttgtaaaacatcattaaaccatcttccaagtgttttcacattg

SEQ ID NO: 298341 - DNA, 13905 bp, Artificial Sequence
  derived and/or modified sequence
gggaggggggaggggagccagagcgagggagggtttatcgaccgggcgattttggttaaaatattcaaaatggcggacggaggagcagcgagtcaagatgagagttcagccgcggcggcagcagcagcagactcaagaatgaacaatccgtcagaaaccagtaaaccatctatggagagtggagatggcaacacaggcacacaaaccaatggtctggactttcagaagcagcctgtgcctgtaggaggagcaatctcaacagcccaggcgcaggctttccttggacatctccatcaggtccaactcgctggaacaagtttacaggctgctgctcagtctttaaatgtacagtctaaatctaatgaagaatcgggggattcgcagcagccaagccagccttcccagcagccttcagtgcaggcagccattccccagacccagcttatgctagctggaggacagataactgggcttactttgacgcctgcccagcaacagttactactccagcaggcacaggcacaggcacagctgctggctgctgcagtgcagcagcactccgccagccagcagcacagtgctgctggagccaccatctccgcctctgctgccacgcccatgacgcagatccccctgtctcagcccatacagatcgcacaggatcttcaacaactgcaacagcttcaacagcagaatctcaacctgcaacagtttgtgttggtgcatccaaccaccaatttgcagccagcgcagtttatcatctcacagacgccccagggccagcagggtctcctgcaagcgcaaaatcttctaacgcaactacctcagcaaagccaagccaacctcctacagtcgcagccaagcatcaccctcacctcccagccagcaaccccaacacgcacaatagcagcaaccccaattcagacacttccacagagccagtcaacaccaaagcgaattgatactcccagcttggaggagcccagtgaccttgaggagcttgagcagtttgccaagaccttcaaacaaagacgaatcaaacttggattcactcagggtgatgttgggctcgctatggggaaactatatggaaatgacttcagccaaactaccatctctcgatttgaagccttgaacctcagctttaagaacatgtgcaagttgaagccacttttagagaagtggctaaatgatgcagagaacctctcatctgattcgtccctctccagcccaagtgccctgaattctccaggaattgagggcttgagccgtaggaggaagaaacgcaccagcatagagaccaacatccgtgtggccttagagaagagtttcttggagaatcaaaagcctacctcggaagagatcactatgattgctgatcagctcaatatggaaaaagaggtgattcgtgtttggttctgtaaccgccgccagaaagaaaaaagaatcaacccaccaagcagtggtgggaccagcagctcacctattaaagcaattttccccagcccaacttcactggtggcgaccacaccaagccttgtgactagcagtgcagcaactaccctcacagtcagccctgtcctccctctgaccagtgctgctgtgacgaatctttcagttacaggcacttcagacaccacctccaacaacacagcaaccgtgatttccacagcgcctccagcttcctcagcagtcacgtccccctctctgagtccctccccttctgcctcagcctccacctccgaggcatccagtgccagtgagaccagcacaacacagaccacctccactcctttgtcctcccctcttgggaccagccaggtgatggtgacagcatcaggtttgcaaacagcagcagctgctgcccttcaaggagctgcacagttgccagcaaatgccagtcttgctgccatggcagctgctgcaggactaaacccaagcctgatggcaccctcacagtttgcggctggaggtgccttactcagtctgaatccagggaccctgagcggtgctctcagcccagctctaatgagcaacagtacactggcaactattcaagctcttgcttctggtggctctcttccaataacatcacttgatgcaactgggaacctggtatttgccaatgcgggaggagcccccaacatcgtgactgcccctctgttcctgaaccctcagaacctctctctgctcaccagcaaccctgttagcttggtctctgccgccgcagcatctgcagggaactctgcacctgtagccagccttcacgccacctccacctctgctgagtccatccagaactctctcttcacagtggcctctgccagcggggctgcgtccaccaccaccaccgcctccaaggcacagtgagctgggcagagctgggctgccagaagcctttttcactctgcagtgtgattggactgccagccaggttaataaactgaaaaatgtgattggcttcctctcgccgtgttgtgagggcaaaggagagaagggagaaaaaaaaaaaaaaaccacacacacccatacacacataccagaaaaagaaagaaaggatggagacggaacatttgcctaattttgtaataaaacactgtcttttcaggattgcttcatggattggagaactttctaaccaaaaattaaaaaaaaaaaaaaaaaaagaaacaaaaaaatcaaaaacaaacaaaaataagtgaaaggactacttatcatttccagcagtcatgatgacaagttaaggtgggttaccaattccaatataggaaggggatttcttgtttgtctaaatttctttttttcttaaaaaaaaaaaatcatttttatgggtctgttgtacaggccattaagtcataacaaggtgtttataatcgtatcaattgtgttgggggttcctttcttaactggtacaatttaggcaggcctgtattactgtattattattgttgttgttgttattgttttatatatatagtttggacatgtttattatctcttgctcctggatcctatttcagtgagctcccacactgtggggagggagggttttggggtaaggggagacttctgttcttaactgtggggaatgttcttgctggtttccttatccttgatgactcttacagaggtgctagaaaattattttcttttgccacttatgcaagaggcttggtgcagaagctgaaggcagtgtgtgcaaacactcccattccacacacgccccttcccctccccacatcaggtggtgcctttggagcacttttgtgtaggaaggaattcctgctgaactgtagctctcactcacccccaaatcattgaatgaccctgaggcccagttcctgtggtgcaacagtgctgctttctgctactttcaatgggaacagctgtacatgttgcagggcaggatttggttcccaagagcaaagactactgcagacacctgacttggtggttctcctgatttcttatctcctgaaaaatgctcctgctgttggtgtgtttgtttgtttgttccattttgtggaagtttttcatccaaactttaactaacttggcaaagaaaaaaaactgacttactgaaattgggaaacttttcccttcttttattttctaaaggaattctactagactattttccattgataatatatacaaaagaggtgtgatgagaagggtataaggttaccaccttttcctctagagagccacagacttcctttccactggatggtttataaattcctctaaccctgagattcttcttggttctctgactaaaggaggcacttattagccgggctgggatctgtagaacctttgaagaaggactttgagcaggaactttgcacacaccttaagtgtctccttggtttgttcatgatgctcctgctaggtaggtctaaatggcaatacacatctctttattcaatgtagaaagtaattagctctgtaattattttcagggtgtttgtagactatataaatgagcccattgaaaaggaagagtttgtgaaagtggatgaagaggaataagggtaacttggagattaaattcctttttttgtcagtgtactgttgttatgccatctgtaccaaaaaattttccaaaagactggatcactgcagtgcagctcatctaagttccccttcttattggagttaaaggttcccatttggtggctgtgggtgcttgcttaaatctctggtggtcccaagactgcactttttctccctttcgagctggggatgtagagagaacttacaggtgatttttattctgattgcttttgtttgtgtccacaagggagcttggattctgtgtacttgtctctttcccattgtccagtaaggcagtaaatacagacacaatgtgtacttttgtgtgtgattcaagtgggagacagtctgttaaaaggtcagaaacattttagtcccctttaaaatatttcttttagtttatttctatcgtgttttatttcacagatatttaattaccacccctaaatttcctcctcttacccttcaccttccctaaaatccttccaaaatcagtgaactgcaagcagggaaactaacaaatgtccattcaccctttttgtgtggtgtgtttttttatgttttgttttgttttttaactaagcttgaaccaaagtcaatttttagcaagctgctgtactaatggactagttgataacgtgcagttcagacacatcgaggagatagatgctactgacaatttctttttcatttgtctttattaattttatatgaaagttgctgcttgtttttaatcttttatgttggtaaattgtgatatcctctgggcagacattaacttgatgtttaactagtttattaggttggtgtgtaaatagaatgacaatgtcaattactaatttctctcctctccattcactttttctctgttgtagttaaatttaatcttctatcctgacttgacatctctacctttagtctgtggaaatgattttagggctatcagtaatgctgtagctgcccataataatgagtccctcccttgggagtggtgaaacttagaaggaaggattcagggagggaaatgctggtacccagtatactggattagaagttatagcattaatttctcaaaattgctaccaaaggaagtgtggagtcccaagggactcaagctcagtgaggtaagacaaagggcaaggaaaggctgtttgggtggtttttttttccccacatatggtttagaaaatgatccctttcccaaacaaaactcaccaacagactttaatattagaaaagatactaagctttaaatgtcaatacagtggtcttttattccctgccctgtctatattttctactcaatttgggataaggggattttatgtgaagcacttgatgagggtagaccagcataaaaaatctgtttaaaagaagaaataatctttaggaaaagataaatctttagataaaaataaatttttttctctttttttacttatttaaaaataagttgtgaaatgaaaggtacatttacacatgtacacacgaaacactaatatagctttttggtggttgtttagtttaaaatcaactccctatccatcatccctagatattctacttatcgtattgcttcatgaacaccttagtcattttttactttacgtatatatttttttatcatctcaagaaatgcattttgaattgaatgaactatcttctaagctaagatactcaaatttaacttttagccaccttatatgggagagcctggaaactaaaggggaccagggaccatttgaccaaaagaggtgtttggtggagtttctgcatttcaaagaagaaaggccagataggtcatcacaattcattgtattattctttttttttccccttaatgtttatgcaaattttattttatatttctgaatttggttagcacatactaagccaaagactattctaaatgcatttatagtgaatactatgtatgcccatggtaatgggtcctccctaaggagtggtgaatgtaattgtgtgaatcctgcttatcacaagtggtgcaatttggtcataaactttatttataccctgtatacatctgaataacagagcagaaagacctaaaaaagggcttctcacaggaacaatattactatgttgttctaagaaaaaataagttgagtgctgtattagtttaagtgtttctaaagttctataggcagcattttagaattaagaattgtgtatatccattaactgatataattcacatgtccttttatttgttatcagaaagatcaatactatcccaatttattcaacttgttacccaagaaatggaaccaaaggaatccaactttcattttgtgtagaatcatacctacttatacttaatgctagcactgtaagaaataagtcttttttgtttaaaaaagggaagataagattaaagattcttagtgagatcatcttgccaatttgttgtacatctctcattcattgttgggggaaaaaaaagcacaactatacctctttaatgttattttcttccattatccctcatttatttggaaagataagggaaaccttgtctgtattatccagaagcacagatatttgcttgacacaatatttaaattcagcccaatctttaacattaaaaaattttctttttaacttgctggaaaagttggatacattggcaaatatagggaattcatgtcttttttttttttttttttctggtcttgctctgttgcctaggctagagtgcaacggcatgatctcggctcactgcaacctctgcctcccgggttcaagcaattctcctgcttcagcctcccaagtagctgggattacaggcgcccaccaccgcacccggctaatttttgtatttttagtagggacgggatttctccgtgttggccaggctttttgaactcctgaccttaggtgatctgcctgccttggcctcccaaagtgctgggattacaggtatgagccactgtgcccatcctcatgtcaatttttaaagtgataaatcctgatattatacattgcaattagtgtagaataaacgcttggcttatagaactctctgttcttagtctaaagctgttcccaaaccaggtcatcctcacgaaacattcttgaccaagaaaaaagataaggtcattgagataggaagacagaggaaaagcctcttgctgttgtttcttcccaagaaaggagaagccctgccagggagaagtcagtagtattgctgactcactgtatcactgagtgtagggtgtggtagcaaggaggaggcaggggattcacgctgacaggtggctctggcctggctcttggggggccttctgaagaccagtctgcagtttgaggaagggccccaacaattcatttggagagcttggccaaatactttctcattaaatcagcacctaaacttgatgaacttaaagtttgtttattagagttgaaaacattaaaagatgactgatactaatgggagaaaaatactaaagacccaaaatttaaaattttccaaaatggacaagaattgatgggttaatttgctcataactgatatgagtttgcttttatgtgtgtgtggaaagcatttaatgtgtgatgctgttcatagtcctggctatttgatgtcattttcagttttacaacattttgaggatgacactttataaaatggtaaatctttctcagcgtttacaaacttggcttttgagaagggaaaaatcctctttgctatttctgtaagaagaataactgagatcagctattatataggtttgcatggatggtgtccacaatacaaatgtaaacttggacaggaataggataaataaattgctttcatcataaaggccaatcatccatttcttagtccaaggagattaaatataaataggacacccctgagatttccagtaaggtatttgaaaggattccactgggagggcagggaatatattttttctcagagcatccagtttgtacccagttttctatatggtttgtgaactgtagcttttaaaaaaaaattttgtagttttcttctaaccttattcattaagtagttccttgttttggcccttctactcttggccttagctaaaagcagtaaatgtgagtgaattttatgttgattatgtcacctggatctcctttccttcccttctttttctcattgaatggtggtaccttaatttgggtaacagctagcttctggcaccttcataaaatacctcagaatagcttagcattgttgcaaaactggttttaaactaaaaaccaaataaataagtgaaaaaattttataaatagtggaaataattctagctgtagcatttagttgaactaatgtttattatgatcgataaacaagattgatgctgtatgtatttgggatcctgtttataggttacaatttatagggttagggagggttgggtgggggaagaggagatgttgattatgttagaaggaaaacattgctcgtgtgtgtgtttgttttttcttatatctgtcttgccaaaggaaacttgattttccctgtgattggctttggcctctgtggtctggtctgcagcagtgtgtggtggcatgcaggtaacatatggggtgtccagtaggttcagggaccctgagggtgcatttacatcccttcctatggttgcccatgccccccagaccctgccaacctctcctaatgattcattacctctgtacatagcaaaagcataggcaaaggatgaatgcgtgaatgcctggatgtgcagttgagaaacagaggcagacatagacatgcaccaattaatttggagccaagaggtgagtgattgatgtatcttaaatctaggaaagttaaagtgaaacaggttctttgtgttgccctctgtcaagttactgaatgttgtgctaataacacaacactttaaaaccttacttacttttctcataccaaggctagttctttctagaccaaaaacacaaacaggataaaaagcaaaccaagaagttgaaagctaacctgcccacctcacccctgtgatacaaagtgtgaaccttaaggattagttggtgggattgaggagagaattattcttggtgggaacatgaatgagaaatgatgctggcttaggaaaaatcacaagccctttctgcccatactctgggacaaactttcttggctccctgagttcggatatagactgtatctctagaaaggctatttttttaaataaatgatcccacagaacttaagtgggatttggtttagataccaaagacactgctaatgtcattgcttatccttaagttttcaaaacaggcagagggaataggagcaaaaagccaaaatttggaaaagctttactttatctctttccttcccttttccccttttcccagtcccctgctttttgaaggaagtcttcttggttatcctggctttggaaaagagatttattttgttttgctctgctggctctttaaagatggatagttgctcaatctagcagtgatgttcttggaattgctgagaaatttggggagggcaaaagataggggtagaattttttcattatttccctttatctaatacttttaaatagaaccaacacagcctatatgagttcagacaatatttagatgtggtatctccatctgtctcctgtaaaagataagaattttcaagaacaggattacgtggaaaaccaaaagatcttcccttactctcctataaatgttttgttccaaatgtttttatatatgggctctagggagtcaggtagttcattgtttcggtgtactattgataggacacagaaagggagagagggtaaagaaatgtatcactctctgaatattgcatcaaaaatgattaggttgcagaacttcatgaaagctttactaataatcttattgttctgacattatgtaaaggtggtattaatattgtatgacttgtcaaagtgctagataggtttataagtaggtaatagggatgttgaagattagagcacttgaaacagaagttctgggaaaacaaggtgtgtgtaatggaacaccactttgagcacagaaacaaaggtcccttggacctggtagggaagatgtgatttatgattgtttctgtgtccctgtatctgcccaccctgcacagggctccaccacccagggccaccttctggtttaaacccaggacactgtcaaaaagttaagaccccaaaactaatttactgtaaaaaacattgaggactgctgcaaagttttcccttgttttctttgtgtacttgttcatcattgtataagttagccacagcttcacaagagcagcttaaggcttctttcataaattggcagtggcattgagttctcaaacattatatcccaaagtctgcaggcagacagctggatacagcgctgtgtataaatgagacgtccaaacacttgagtttcttaagattgggatctctttcaaatgaaaaaggacagagccaagtagagaaaagactttgtgctcccacccagccttaatgagtctcatggtctaaaagtataggaagaaatgaaatgcactttcagaagctaaaatgacagtgtctgctacaaaaggctgtagttgtaggcagtcggggatgccatgtccttggttccattcctgcgtgagtctgcagaaggcacacactttgtaagagtagagtggactagtgccagcctgaataggtttaaaactgcaaacagttggagaacatggaacaggttggtgcaggaagcctaagattttgcaatcatattataacattggcttttgacaacataaatgttgtatcttccctaaggtcaggtcggggaaagaaagacttccagcttcttacctctgcgtgcatgggcacgtgtgcattgctcagtccgcaggaggtctcactccgcaggaaacgctctcctcccgcataagtctgtacttccatcccctcatctgtggtagtagtgaaggctaggtgagtaagcgtgggctgttctacccaccagaagtccaggagctgttgtatacctcatttctaactcgtgaccgagtgacttgctttaactttctcgaaatcctacagagttgccaagtctgccctccctcctcagtcatgttaaactctggcctatagcatcatgggacctgtagcctagggtgggaccccctaaagcctctgaatgtcgctgcttaaaagctactgcaaactgagggcaaattgcaatcttctattcctttttgttgcaaggggtcttcacaggtctcttaacatctgctttccctgccaccctgcctttaggggctggccagctatccacacccctaacccaccctgtgtttctgacagctggccacacgtcaacttctgtacttgccttttccttggtggggtagaggccaaccccttctcctctgaggcctcagggttctgtttcttttcaggactttgggtagaagggaagacaccaaaggctcctttaagctgactgctgcatacacatttcactttttttcctttgacatgaccaaaaatatccaaatatttaagtttattattattattattattatttgacaatcttatatccaatgggctctctagaagctgcatccccagccctttcaccttttctttgaatgtagttcccaaccttcaattcccacccctaatgctgacaaaaagcttagccaggtcatgatactgctgctataagccaggggagggtggtttctttgttttgttttgttttgttttgtttttcaaatttccagccaaaaccaaagatttcttaatgattgtataaactcaaaacaaacaaaagaaccaaagaaaagggaagtcttcagcatcagtccagtctgtggtgtcctggcacttagaagagtgaggccagggaaggtggggcggggggaccctctgactggatcagaaagggcaggcaagctgcttaccaccttccagggtccagcacaggtgcatgcccctagctttggccctcacaaacttgtgagcatgccctgaaacaaattggcatttcagattttccaaaacaaaagtcaaaaaaccccatcaccaccatcatccaccctacaccaaccagggtcactatggggacttagcacagggcctagggagggtgggagctgctgctggactggcccgaggactccacagagtgggggacgttgaagacactggcgcacgattggctgctctgctgggtgctttaacctctggggctgggcgaatgcacgccacggtgcccttctgagcctttttttcttttcctgtactggaactgcttggaagtggctgtcctgtttgtgagaaaacatgcagaaagattatcaagcttttcatttctctttattgtagttttctttcctttttgcagcaccactgtgcaactatgcattgtacttcacaaccttttgtgctaggtagatgcctgtgactttttaacttggggggtggggggattgcaaatgaaggaactttttacatggatctttttaatctcagttggttgggggaggggggtacttggttcttgggtcacacaagctctatcccaaagcaaaatccaaatgttaataatattagcctgatgcagataccaaagataatttctttcctgcagaaccttagactcgtgtattaagtacgattacccagcacttgcattagtctaacctcagtaattccaaagcttagatgtatattttggtatatttctgggatattaaaaaaaaaatgtcgtttaacttcttgtttgtttcagtgtaatgctcttaaagtcatagcatgaaaataattgaactgtcctattcttagtagtttgaaataatagtatttttgtatgttttgggtgtgtctatgtatgtattaacataacagttttcactgcctaggtgttcataataaaaaagaaaatgaaaaaagttctgagtgtacataatattcaataataatctcccaccaggtgtcaatttagattgcatattcctcattactgttcccaactgggattttgttttcttttaaagagacagtgatcgtgtttttctaaagatgttttctttctctctttcaatatcttaactcactttttttttcttccttttttgtcttaattattaattcaggggtgtttgtccactgttgtcaaaggaggggcacaaggggaattggcccccggcctcctagaactttttgttttatgtactttaaaatgtgagtttgagttcttctttgtggaaacttaagatgtggtgtaaatgattctttccaaaattgtccagcagcttgaatgaggcagtgacaattctgaggtggtttattgggagtccttctacatttctcttagataactctgcactctgggtggctattgtgtagccttactgccccagagtgcctgttagccaaatatttcccctctgataggaatattttctaagaatcagctgataacttgcgtgctggaccttgttatctgtgcccctgggagacacacgttttcttggttttgaaaacctgaaacacaggcaactttacattttggggaattagctgatgcctcctgaagcctgaggaggtggcggggaatatgagcggtgctgtctctctcaaaagtgccctttagatgattccccctcctagggctgcctgcaggggctgtaggcttgggaaagattgtgtaggtgacagtgaatcagaatgaagtggtagattttgtgtagatgcatttgtctgctgtaattttttatatatatattaaacttactgtaactgtacagttcatttctgttgtaaaacatcattaaaccatcttccaagtgttttcacattg

SEQ ID NO: 298342 - DNA, 615 bp, Artificial Sequence
  derived and/or modified sequence
aaaatggcggacggaggagcagcgagtcaagatgagagttcagccgcggcggcagcagcagcagctactactgggctgtaaacagtgatgccagcaaaatgttacttcagctgatgaagtgatgctgtttcgagaatttgaaagcaatttttcagtggataaagaagttgacagcacgatttgttggatgtgatgaaggattaatgagcatacaccttcacttgtattagcttaagatggaatggttctgggcaatataaaataacagactcaagaatgaacaatccgtcagaaaccagtaaaccatctatggagagtggagatggcaacacaggcacaggcacagctgctggctgctgcagtgcagcagcactccgccagccagcagcacagtgctgctggagccaccatctccgcctctgctgccacgcccatgacgcagatccccctgtctcagcccatacagatcgcacaggatcttcaacaactgcaacagcttcaacagcagaatctcaacctgcaacagtttgtgttggtgcatccaaccaccaatttgcagccagcgcagtttatcatctcacagacgccccagggccagcagggtctcctgcaagc

SEQ ID NO: 298343 - DNA, 2398 bp, Artificial Sequence
  derived and/or modified sequence
gtgctggtttatagttgagactcaagaatgaacaatccgtcagaaaccagtaaaccatctatggagagtggagatggcaacacaggcacacaaaccaatggtctggactttcagaagcagcctgtgcctgtaggaggagcaatctcaacagcccaggcgcaggctttccttggacatctccatcaggtccaactcgctggaacaagtttacaggctgctgctcagtctttaaatgtacagtctaaatctaatgaagaatcgggggattcgcagcagccaagccagccttcccagcagccttcagtgcaggcagccattccccagacccagcttatgctagctggaggacagataactgggcttactttgacgcctgcccagcaacagttactactccagcaggcacaggcacaggcacagctgctggctgctgcagtgcagcagcactccgccagccagcagcacagtgctgctggagccaccatctccgcctctgctgccacgcccatgacgcagatccccctgtctcagcccatacagatcgcacaggatcttcaacaactgcaacagcttcaacagcagaatctcaacctgcaacagtttgtgttggtgcatccaaccaccaatttgcagccagcgcagtttatcatctcacagacgccccagggccagcagggtctcctgcaagcgcaaaatcttctaacgcaactacctcagcaaagccaagccaacctcctacagtcgcagccaagcatcaccctcacctcccagccagcaaccccaacacgcacaatagcagcaaccccaattcagacacttccacagagccagtcaacaccaaagcgaattgatactcccagcttggaggagcccagtgaccttgaggagcttgagcagtttgccaagaccttcaaacaaagacgaatcaaacttggattcactcagggtgatgttgggctcgctatggggaaactatatggaaatgacttcagccaaactaccatctctcgatttgaagccttgaacctcagctttaagaacatgtgcaagttgaagccacttttagagaagtggctaaatgatgcagagaacctctcatctgattcgtccctctccagcccaagtgccctgaattctccaggaattgagggcttgagccgtaggaggaagaaacgcaccagcatagagaccaacatccgtgtggccttagagaagagtttcttggagaatcaaaagcctacctcggaagagatcactatgattgctgatcagctcaatatggaaaaagaggtgattcgtgtttggttctgtaaccgccgccagaaagaaaaaagaatcaacccaccaagcagtggtgggaccagcagctcacctattaaagcaattttccccagcccaacttcactggtggcgaccacaccaagccttgtgactagcagtgcagcaactaccctcacagtcagccctgtcctccctctgaccagtgctgctgtgacgaatctttcagttacaggcacttcagacaccacctccaacaacacagcaaccgtgatttccacagcgcctccagcttcctcagcagtcacgtccccctctctgagtccctccccttctgcctcagcctccacctccgaggcatccagtgccagtgagaccagcacaacacagaccacctccactcctttgtcctcccctcttgggaccagccaggtgatggtgacagcatcaggtttgcaaacagcagcagctgctgcccttcaaggagctgcacagttgccagcaaatgccagtcttgctgccatggcagctgctgcaggactaaacccaagcctgatggcaccctcacagtttgcggctggaggtgccttactcagtctgaatccagggaccctgagcggtgctctcagcccagctctaatgagcaacagtacactggcaactattcaagctcttgcttctggtggctctcttccaataacatcacttgatgcaactgggaacctggtatttgccaatgcgggaggagcccccaacatcgtgactgcccctctgttcctgaaccctcagaacctctctctgctcaccagcaaccctgttagcttggtctctgccgccgcagcatctgcagggaactctgcacctgtagccagccttcacgccacctccacctctgctgagtccatccagaactctctcttcacagtggcctctgccagcggggctgcgtccaccaccaccaccgcctccaaggcacagtgagctgggcagagctgggctgccagaagcctttttcactctgcagtgtgattggactgccagccaggttaataaactgaaaaatgtgattggcttcctctcgccgtgttgtgagggcaaaggagagaagggagaaaaaaaa

SEQ ID NO: 298344 - DNA, 588 bp, Artificial Sequence
  derived and/or modified sequence
aaaatattcaaaatggcggacggaggagcagcgagtcaagatgagagttcagccgcggcggcagcagcagcaggctggagtgcagtggtgtaattatggctcagttcaccctcaacctcctgaggtcaagtgattcttcctcctcagcctcctgagtagctgggactacagactcaagaatgaacaatccgtcagaaaccagtaaaccatctatggagagtggagatggcaacacaggcacacaaaccaatggtctggactttcagaagcagcctgtgcctgtaggaggagcaatctcaacagcccaggcgcaggctttccttggacatctccatcaggtccaactcgctggaacaagtttacaggctgctgctcagtctttaaatgtacagtctaaatctaatgaagaatcgggggattcgcagcagccaagccagccttcccagcagccttcagtgcaggcagccattccccagacccagcttatgctagctggaggacagataactgggcttactttgacgcctgcccagcaacagttactactccagcaggcacaggcacaggcacagctgctggctgctgcag

SEQ ID NO: 298345 - DNA, 2435 bp, Artificial Sequence
  derived and/or modified sequence
aaaatattcaaaatggcggacggaggagcagcgagtcaagatgagagttcagccgcggcggcagcagcagcagactcaagaatgaacaatccgtcagaaaccagtaaaccatctatggagagtggagatggcaacacaggcacacaaaccaatggtctggactttcagaagcagcctgtgcctgtaggaggagcaatctcaacagcccaggcgcaggctttccttggacatctccatcaggtccaactcgctggaacaagtttacaggctgctgctcagtctttaaatgtacagtctaaatctaatgaagaatcgggggattcgcagcagccaagccagccttcccagcagccttcagtgcaggcagccattccccagacccagcttatgctagctggaggacagataactgggcttactttgacgcctgcccagcaacagttactactccagcaggcacaggcacaggcacagctgctggctgctgcagtgcagcagcactccgccagccagcagcacagtgctgctggagccaccatctccgcctctgctgccacgcccatgacgcagatccccctgtctcagcccatacagatcgcacaggatcttcaacaactgcaacagcttcaacagcagaatctcaacctgcaacagtttgtgttggtgcatccaaccaccaatttgcagccagcgcagtttatcatctcacagacgccccagggccagcagggtctcctgcaagcgcaaaatcttctaacgcaactacctcagcaaagccaagccaacctcctacagtcgcagccaagcatcaccctcacctcccagccagcaaccccaacacgcacaatagcagcaaccccaattcagacacttccacagagccagtcaacaccaaagcgaattgatactcccagcttggaggagcccagtgaccttgaggagcttgagcagtttgccaagaccttcaaacaaagacgaatcaaacttggattcactcagggtgatgttgggctcgctatggggaaactatatggaaatgacttcagccaaactaccatctctcgatttgaagccttgaacctcagctttaagaacatgtgcaagttgaagccacttttagagaagtggctaaatgatgcagagaacctctcatctgattcgtccctctccagcccaagtgccctgaattctccaggaattgagggcttgagccgtaggaggaagaaacgcaccagcatagagaccaacatccgtgtggccttagagaagagtttcttggagaatcaaaagcctacctcggaagagatcactatgattgctgatcagctcaatatggaaaaagaggtgattcgtgtttggttctgtaaccgccgccagaaagaaaaaagaatcaacccaccaagcagtggtgggaccagcagctcacctattaaagcaattttccccagcccaacttcactggtggcgaccacaccaagccttgtgactagcagtgcagcaactaccctcacagtcagccctgtcctccctctgaccagtgctgctgtgacgaatctttcagcacttcagacaccacctccaacaacacagcaaccgtgatttccacagcgcctccagcttcctcagcagtcacgtccccctctctgagtccctccccttctgcctcagcctccacctccgaggcatccagtgccagtgagaccagcacaacacagaccacctccactcctttgtcctcccctcttgggaccagccaggtgatggtgacagcatcaggtttgcaaacagcagcagctgctgcccttcaaggagctgcacagttgccagcaaatgccagtcttgctgccatggcagctgctgcaggactaaacccaagcctgatggcaccctcacagtttgcggctggaggtgccttactcagtctgaatccagggaccctgagcggtgctctcagcccagctctaatgagcaacagtacactggcaactattcaagctcttgcttctggtggctctcttccaataacatcacttgatgcaactgggaacctggtatttgccaatgcgggaggagcccccaacatcgtgactgcccctctgttcctgaaccctcagaacctctctctgctcaccagcaaccctgttagcttggtctctgccgccgcagcatctgcagggaactctgcacctgtagccagccttcacgccacctccacctctgctgagtccatccagaactctctcttcacagtggcctctgccagcggggctgcgtccaccaccaccaccgcctccaaggcacagtgagctgggcagagctgggctgccagaagcctttttcactctgcagtgtgattggactgccagccaggttaataaactgaaaaatgtgattggcttcctctcgccgtgttgtgagggcaaaggagagaaggg

SEQ ID NO: 298346 - DNA, 2232 bp, Artificial Sequence
  derived and/or modified sequence
atgaacaaccccagcgagaccagcaagcccagcatggagagcggcgatggcaatacagggacacagactaatgggctggatttccagaagcagccggtccccgtgggcggtgcaatctcaacagcacaggcccaggcatttctgggccatctgcaccaggtccagctggccgggaccagcctgcaggctgccgcgcagtcacttaatgtgcagtctaagagcaacgaagaatctggtgactcacagcaaccctcccaaccttcccagcagccgtctgtgcaggccgctatacctcagacacaactgatgctagcgggcggtcagattactggcttgacactgactccagcccagcagcagctgctgttgcagcaagcccaagcccaggcacagctgttggcagctgccgtccaacaacactctgcatcccaacagcacagcgccgccggcgccaccatctcagccagtgctgcaacaccaatgacacagattcccttgagtcagccaatacagatcgcccaagatctacagcagttgcaacaacttcagcaacagaacctcaacctgcagcagtttgtcctagtgcaccccaccacaaatctgcagccagcccagttcatcatcagtcagactcctcaaggccagcaaggcctgctccaggcacagaacttgctgactcaattgccacagcagagccaggccaacttgctgcagagccagccaagtatcacccttacttctcagcccgcaaccccaacgcggacaatagccgcgacacccattcagactttgccacagtcccagtcaacacctaaacgcatagataccccctcacttgaggaaccctccgacctggaagagctcgaacagtttgcaaagacatttaagcagagacggatcaagttgggcttcactcaaggggacgtgggactcgctatgggcaagctttatgggaacgactttagtcagacaaccatcagccgatttgaggctctgaacttaagttttaaaaacatgtgcaagcttaagcccttgctcgagaaatggcttaacgatgctgagaatctgtcctccgactcttctcttagtagtccatctgcccttaactcccccggaatcgagggcctttcccgacgtaggaagaaacgaacctctatcgagacgaacattcgcgttgctctcgagaaaagttttttagaaaaccagaaacctactagcgaggagattacaatgatcgcagaccaactcaacatggagaaggaggtgatccgcgtctggttctgcaacaggcgacaaaaggagaaacggataaatcctccttcatccggtggcaccagttctagtcctattaaggccatattcccgagtcccacgagcctggttgctaccaccccatccctagttacttcttccgctgccactacactgactgtcagccctgtgctaccactcacaagcgccgccgtaaccaacctgagcgtcaccggcacctctgacacgacatcgaataataccgccaccgtcatcagtaccgcgccccctgcatcatccgccgtgacctctccgtccttgagtccttccccctctgcgtctgcgagcactagcgaagcatcatctgcgtctgagaccagcactactcagaccactagcacccccctgtcttcacccttaggcacctcccaggtgatggtgacagccagcggactccaaacagcagccgctgcagctctccaaggtgccgcccagttgccagctaacgcttcgttggccgccatggccgccgcagcggggctgaatccctctctgatggcaccaagtcagtttgctgccggaggtgcattgctgagcctgaatcccggtactctctccggagccctgtctccggctctgatgtccaattcaacactcgcaacgatacaagcgttggcctcaggggggagcctcccgataacgtccctcgatgccactggcaatctagtgtttgctaatgcaggtggtgcacccaacatcgtcaccgcccccctctttctgaacccccaaaatctctctttgctgacctctaacccagtgagtctggtatctgccgcagccgcttccgctggaaactctgccccagtggcctcgctgcatgccacctcaaccagtgcggagtccattcagaattccctgttcaccgtagcatccgcatctggcgccgcatccactacaactactgcctcgaaagcacagtag

SEQ ID NO: 298347 - DNA, 2226 bp, Artificial Sequence
  derived and/or modified sequence
atgaagacccggatgaagatcttcgtgatgatccacttccacctgatgaacagtactcagactaatgggctggacttccagaagcagccagtccccgtcggaggagcaatcagcactgcccaggcccaggcttttctggggcacctacatcaggttcagttagctgggacatcgctgcaggctgccgctcagagcctgaacgtgcagagcaagagcaatgaagagtctggagattctcagcagccttctcagccatcgcagcaaccgtcagtacaggccgcaatccctcagacccagctcatgctggcgggaggtcagataacgggcctgactcttacaccagctcagcagcagctactgctgcagcaggcacaagcccaggcccagcttctggcggctgcagtgcagcagcactcagcctcacagcaacattctgcagctggagccactatatcagccagcgcagcaacgcccatgactcaaattcctctctcccagccaatccagatagcacaggaccttcaacagcttcagcagctgcagcaacagaatctcaacctgcagcagtttgtgctggtgcaccctacaaccaatctgcagcccgcccaattcattattagccaaaccccccagggacagcagggactgctccaggcccagaatctactcactcagctacctcagcagtcccaggctaacctgttacaatcccaaccaagcatcacgttgaccagccagcctgctacacctaccaggacaatcgctgccactcctatccagactcttccgcagtcacagtctacacctaaaagaatcgacactcccagtcttgaggagccatccgacctggaggagttagagcagttcgctaaaacatttaagcaaaggcgaatcaagttaggtttcacacagggggatgtggggttggccatgggtaaactttacgggaacgatttttcacagactactatctctagattcgaagccttaaacctgtccttcaagaatatgtgtaaacttaagcctctgctggaaaagtggctcaatgatgctgagaatttgtcgtccgatagttctctttcaagcccctctgctctgaattcaccaggaattgaagggctaagtcgccggcgcaaaaagcggacttccatagagacaaatatcagggtcgccctggaaaaatcctttctggaaaatcagaaacctaccagtgaggagataacaatgatagctgaccaactcaacatggagaaggaagtgattagggtttggttctgcaatagaagacaaaaagagaaacgcattaacccaccgtcaagcggcggcacttccagtagcccgattaaggccatcttcccaagtcccacctctctagtggccactactccttcactcgtgacaagttctgcggcaacgacactgaccgtgtcaccggtgctgcctctaactagcgcagctgtcaccaacctgagtgttacaggaacttccgacacgactagtaacaataccgcaacggttatctcaacagctccccctgccagtagcgcagtgacctctccaagcctgtcccctagccccagtgcctctgcatcaaccagtgaagcttcctcagcttccgagacatccaccacccagacaacaagtacccctctgagctcccctctggggacctcgcaggtcatggtgacggccagtggactgcagacagctgccgcagccgctctgcagggagctgcccagctaccggccaacgcgtccctcgcagccatggccgccgctgctgggctcaatccttccttaatggctcccagtcagtttgctgcaggcggggcactgctgagcttaaatcccgggaccctcagtggtgcactgagccctgcacttatgtcgaattccactctggcgactattcaggctttagcgagcggagggtcgctgcctataacgtctctggatgccacaggaaaccttgtattcgcgaacgccgggggcgcccccaacatcgtgactgcacctctgttcctgaatccccagaatctctctcttctaacatcaaatcccgtgagtctcgtgtcagcagcagcggccagtgccggaaactctgcccctgtggcatctctacacgcaaccagtacaagcgctgagagcatacagaactcactgtttaccgtggcctcagcctctggcgccgcttccaccacaactaccgcgagtaaagcccagtag

SEQ ID NO: 298348 - DNA, 2301 bp, Artificial Sequence
  derived and/or modified sequence
atggccgacggcggcgccgccagccaggacgagagcagcgccgccgcagcagcagcagccgacagtaggatgaataacccctcagaaacttcaaagccctcaatggagtcaggcgatggcaatactggtacccagacaaacggtctggacttccaaaagcaacctgtgccagttggcggagcgatttctacagctcaggcacaggcgttccttggccacttgcatcaagtgcagttggccggaacctctctccaggccgcagcccaatccctgaacgtgcagagtaaatctaatgaagaatccggagacagccaacaaccatcacagccctctcagcagccctccgtacaagctgcgatccctcagacccaactgatgcttgcagggggtcagattacgggactaacgctgacgccagcccagcagcagcttctcctccagcaagcccaggcccaggcacaactcctggccgccgctgtgcagcagcattccgcatcacaacagcattcggccgcaggagctactatcagcgcatcagccgctacacctatgacacagatccctctctcccagcccattcagatagctcaagacctacagcagcttcagcagcttcagcagcagaatttgaacctccagcaattcgtcctggtgcacccaacgaccaacctccagccagcccagttcatcattagccagacaccccaaggccagcaggggttgttacaggcgcagaaccttctgacccagctgcctcagcagtcccaagccaacctgctgcaatcacaaccatctattaccctgacgtcgcagcccgccacccctacacggacaattgctgccacgccaattcagactctacctcaatcccaaagcacacctaagcgcatcgacacccccagcctcgaggagcccagcgatctagaagagctggagcaattcgctaaaacttttaagcagcgccgcattaagctgggctttacacagggtgacgttggcttggccatgggcaaactatacggaaacgacttctcacagactacgatcagccgatttgaggcactcaacctttcatttaaaaacatgtgtaagctgaagcctctgcttgagaaatggctaaacgacgctgagaatctcagcagtgatagttcactgtctagcccttctgccctgaatagtcctggaatcgagggcctcagtcggcgacgcaaaaaacgtactagcatcgagaccaacatccgcgtggccctggaaaaaagttttctcgagaaccagaaacccacaagcgaagagataactatgatcgccgatcagctaaacatggaaaaggaggtaatccgcgtgtggttctgtaacagacgccagaaagagaaacgcattaatccgccctcatcaggagggacctccagcagccctattaaggccattttcccatctcccaccagtctggtcgcgacaaccccgagtctggtgacctcttcggccgccaccactttgacggtgtcaccggtattgccgttgaccagcgccgcggttaccaaccttagcgtaacaggcaccagcgacaccacctccaacaatacagctaccgtgattagtaccgccccacctgcctctagcgccgttacttctccaagtttatcacctagcccttctgcatccgccagcaccagcgaggcaagctcagcttccgagaccagcacgacacaaacgacaagcaccccactaagtagccctcttggcacatcccaggtgatggtgacagcaagtggtttacagactgcagccgctgccgccctccaaggcgcagctcagctgccagctaatgctagcctggctgcaatggcagctgcagctggcttaaacccgtctttaatggccccatcacagtttgccgccggcggcgcgctcctctccctgaacccaggcactctgtctggcgcgttgtcacctgccctgatgtcaaattccacactcgccacaattcaggcgctggcttctggtggatcgctccctatcactagcctagatgccactggcaacttggtcttcgcaaatgctggcggggcgcctaacatagtgacggcccccctgtttctgaatcctcagaatctctccctgctaaccagtaatccagtgtctctcgtgagtgccgccgcagcctccgcaggtaattccgcgcctgtcgcgtctctacatgcaacatcaacaagcgcggagtcaatccagaattccctattcaccgtggcctcagcgagtggggctgccagcaccactaccacggccagcaaggcacagtag

SEQ ID NO: 298349 - DNA, 1962 bp, Artificial Sequence
  derived and/or modified sequence
atgaacaaccccagcgagaccagcaagcccagcatggagagcggcgatgggaacacaggcacccagactaacggcctggattttcagaagcagccggtgcccgtgggcggagccatatccaccgcccaggctcaagccttcttggggcacctacatcaggttcaactagctggcacttcattacaggccgctgcgcagtcgcttaacgtgcaatcaaagagcaacgaggagtccggtgattcccaacagccatcacagccaagccaacagccgtccgtgcaagcagctataccgcagacgcaactcatgttggcaggcggccagattaccggcctcaccctgacaccagcccagcagcagctcttgctccaacaggcacaagcgcaagcacagctgttggctgccgccgtccaacagcactctgcctcacagcagcactctgctgcaggcgctactatcagcgcatcggctgctacacccatgacacaaatccccctctcccagcctatccaaattgcccaggatttgcaacagctacaacaattacaacaacagaaccttaatctacagcaattcgtgctggtccacccgaccaccaacttgcagcccgcccagttcattattagtcagactcctcagggtcagcaaggcctgctccaggcccagaaccttctaacacagctccctcaacagtctcaggcaaacctcctccaatcccagccctcaatcacccttacttctcagcccgctacgcctactagaacaatagccgccaccccaatccagaccctgccccagtcgcagtctactcccaaacgcatagatactccatctttggaagagccctctgacctggaggaactcgagcagtttgccaagacctttaagcagcggcgcatcaaactgggcttcacacagggagacgtggggctggcaatgggaaaactgtatggaaacgacttctcccaaaccaccatatcccgcttcgaagctctgaatctctcctttaaaaatatgtgcaaacttaagccgcttttggaaaagtggctgaatgatgcagagaatctcagcagcgattcctccctttcttcacctagtgccctcaatagtcccgggatcgagggcttgagcaggagaaggaagaagcgtacttcgatcgagactaatatcagggttgctcttgaaaaatcattcttggagaatcagaaacctacgtctgaagagataaccatgattgccgaccagttgaacatggaaaaggaggtgattcgggtttggttctgtaataggcgccagaaagaaaagcgaataaaccccccaagtagtggcggaacttcctctagccccatcaaggcaattttcccatctcccacatcactggttgcaacgaccccttctttggtgacctcttcagcggcaactacactgacggtgagtccggtactaccactgactagcgcagccgtgacaaatctgtctgtgacaggtacaagcgatactacatccaataatacagcaactgtcatatcaactgccccaccggccagctctgcagtcacttcacctagtttatccccaagcccttccgcgagcgcctccactagcgaggcatcttcggcttctgagactagcacaacccaaaccacgagcacccctctgtcttcccccctagggaccagccaggtaatggtcaccgcgagcgggctgcagactgctgcagccgccgctctgcaaggtgccgcccagttgccagccaacgcatctctcgcggccatggcagccgccgccggtctcaacccctcgctaatggccccgtcccagtttgccgctggcggggctctcctgtccctgaatccaggtaccctgagcggggccctgtccccagctctgatgtcaaattctacccttgccaccattcaaggacttctccacggcctagaaaattttctgacaaagaattag

SEQ ID NO: 298350 - DNA, 279 bp, Artificial Sequence
  derived and/or modified sequence
atgaacaaccccagcgagaccagcaagcccagcatggagagcggcgatgggaatactgggacgcagacaaatggtttggactttcagaagcagcctgtgccagtgggaggagctatcagcaccgctcaggcacaggcctttctcggccatctccaccaggtgcagttagccggtacctctctgcaggctgcagctcaatccctgaatgtccaatccaaaagtaatgaagagagtggggactcacaacagcccagtcagcccagccagcagccctcatag

SEQ ID NO: 298351 - DNA, 765 bp, Artificial Sequence
  derived and/or modified sequence
atgaacaaccccagcgagaccagcaagcccagcatggagagcggcgatggaaatactggcacgcagacaaatggcctggacttccagaagcaacctgttcctgtcggcggagcaatctcaacggctcaagcgcaggctttccttggccacctccatcaggttcagctcgcaggcacctccctgcaagccgcagctcagagcttgaacgttcagagcaaatccaacgaggagtctggcgattctcagcagccctcccaacctagccaacagccaagcgtacaggctgccatcccacagactcagctgatgctggccggaggacagattaccggactcaccctgacccctgcgcaacaacagttgcttttacagcaggcgcaagcgcaggcacagctgttggccgccgcggtgcagcagcatagtgctagccagcagcatagcgccgccggcgccaccatctcagcaagcgctgctaccccaatgacacagatccccctgagtcaaccgatacaaatagcacaggaccttcagcagttgcagcaactgcaacagcaaaatttaaacttgcagcagtttgtgcttgtgcatccaacaacaaacctgcagcctgcccagttcatcatttctcagaccccccagggtcagcaaggcttgcttcaagcccagaatctgctaactcagctgccacaacagtcccaggccaatctgctccagtcccagccttcaatcacactgaccagccagatatggccctcaccagcatag

SEQ ID NO: 298352 - DNA, 342 bp, Artificial Sequence
  derived and/or modified sequence
atgaacaaccccagcgagaccagcaagcccagcatggagagcggcgacggcaatacgggtacggggaccgccgcaggctgttgctccgccgcagccctacgccaaccggccgcgcagtgctgttggagccatcatttgagactgtgttgccatgcccacgatgcggatcctcccgttagcgctcacaccgaccgaacgggctcttctaccacagccactgcatccacagccgaaagccagccggctactgtttgtgtgggtgcgagcaatcaccagttcgccgcctcagcagtgtaccacctgaccgacgctccggggcccgccggtagtcctgccagctag

SEQ ID NO: 298353 - DNA, 2232 bp, Artificial Sequence
  derived and/or modified sequence
atgaacaaccccagcgagaccagcaagcccagcatggagagcggcgatgggaatacgggcacccaaacgaatggcctggacttccaaaagcaacccgtccctgtggggggcgctatatcaaccgcacaggcccaggcctttctaggccatctccatcaagttcagctggcagggaccagcttgcaggctgccgctcagagcctcaacgtgcagagcaagagcaatgaggaaagtggtgattcacagcagccatcacagccctctcagcaaccttccgtccaggctgcgattccgcagacccagttgatgctggctggcgggcaaattacagggctgacactcactcccgcacagcagcaactgctattacagcaagcacaagctcaggcccagctgttggctgccgcagtgcagcagcacagtgctagtcagcagcattcagcagccggggccaccatcagtgccagcgccgccacccctatgactcagatcccattgtcccagcctattcaaatcgctcaggatctacagcagctgcagcagctgcagcagcagaatcttaatttgcaacagttcgtgctagttcaccccacaaccaacctgcagccggcgcagttcatcatatctcagacgccccaaggccagcaaggactcctgcaggctcagaacttactcacgcagctgccacagcagagccaggccaatctgctgcagtctcaacccagcattacattgaccagccagcccgcaacccccacaagaaccatcgccgctacccctatccagacattgcctcaatcccaatccacacctaagcgaatcgacacccctagcctggaggagccgtccgatctggaagagttagagcagtttgctaaaacattcaagcagcgccgcatcaaactcgggttcactcagggtgacgtggggctggcaatgggaaagctctacggcaacgatttttcacagaccaccataagccggtttgaggcactgaacctgtcttttaagaacatgtgtaaactaaaaccattgcttgaaaagtggctcaatgatgcggaaaatctgtccagcgattcctccctcagctccccttccgcgctgaatagcccaggtatcgaggggctgtctcgccgtcggaaaaagaggacctcaatcgaaacaaacatccgtgtcgctttggaaaagagcttcttggagaaccaaaaacctacatcggaagaaatcactatgatagcagaccagctaaacatggaaaaagaggtgatccgagtttggttctgcaataggcggcagaaagagaaacggattaatcccccttcatcagggggcacctccagctcaccaataaaagccatttttccctcacctacatcattagttgcaacaacacccagcttggtaacgtcgagtgccgcgacaacgctgacagtgtctcccgtcctgccattaaccagcgctgcagtaactaatctgtccgtcaccggaactagcgacacaacttcaaataacactgctaccgtgatctcaaccgcacccccagcctcttcagcggtgacaagtccgtcactgtccccatcaccctcggccagcgccagcacctccgaggctagtagtgcttcagagaccagtaccacacagaccacctctaccccattatcttctcctctggggaccagtcaggtaatggtcactgctagcggactgcagaccgccgctgcagctgccctgcagggcgcagcccagctcccagcaaatgcctccctggccgctatggccgcagcagcaggtctaaatcctagcttgatggctcccagccagtttgctgccggtggggcactgctgagcctaaacccgggcactctgtctggggcactttctcctgcccttatgtctaacagcactttggctacaattcaagcgctagcttctggtggctcgctccctatcacctctctcgacgccacggggaatttagtgttcgccaacgccggaggagcccctaatatagtgactgctcctcttttcctgaacccacaaaaccttagtcttctcacctccaaccccgtgtccctggtgagcgcggccgcggcctcggccggtaattccgctcccgtggcaagcctgcacgctacttcgacgtcagccgagagtatccagaatagcctgtttacagtggcgtcagcttccggagccgcttcaacaaccaccacggcctcgaaggctcagtag

SEQ ID NO: 298354 - DNA, 411 bp, Artificial Sequence
  derived and/or modified sequence
atgaacaaccccagcgagaccagcaagcccagcatggagagcggcgacgggaatacaggcactcagaccaatggattggacttccagaagcaacccgttcccgtgggaggggccattagcactgcacaagcacaagcttttctaggccacctgcaccaggtccagctggccggaacctcattgcaggccgcagctcaatccctgaacgtgcagtcaaagtcgaacgaggaaagcggcgattcccagcagcccagtcaaccttctcagcagccaagtgttcaggcggccattcctcaaacacagttgatgcttgccggagggcagatcacaggactgacactgacaccggcccaacaacagcttctcttacaacaggcccaggcccaagcccaactgctggcggccgcttag

SEQ ID NO: 298355 - DNA, 1587 bp, Artificial Sequence
  derived and/or modified sequence
atggccgacggcggcgccgccagccaggacgagagcagcgccgccgcagctgcagctgccgactccaggatgaacaacccatcagagacgtctaagcctagtatggaatctggcgacgggaataccggtacccaaactaatggcctagatttccagaagcaaccggtccctgtcggaggggctatttctacggctcaggctcaggccttcttggggcacttgcaccaagtgcagttggccgggactagcctgcaggcggcggcacagtcactgaacgtgcagtccaagtctaatgaagaaagcggagattctcagcagccctcacagccgagccagcaaccaagcgtgcaggccgctataccccagacgcagctgatgttggcggggggccagataaccggactcacactcacccccgctcagcagcagttactccttcagcaagcccaggctcaggctcagttacttgctgcggcagttcagcagcacagcgcatcccagcagcattccgcagccggcgccacaatcagtgcgagcgctgcaaccccgatgactcaaattccactttctcagccaatacagatcgcgcaggatctgcagcagctgcaacaactgcagcagcaaaatctgaacctgcaacagtttgttctggtgcacccgacaactaacctgcaacccgcacagttcatcatctctcagacgcctcagggccagcaggggctgctacaggctcagaacctactcacgcagctgcctcagcagtcacaggctaatttgctccagagccagcccagcattacgctcactagccagccagctactcctactcgcactattgccgccactcctatccagaccctcccacagagtcagtccacccctaagcgaatagacacaccatcccttgaagagccctccgatcttgaggaacttgagcagtttgcaaaaacattcaagcagagacgaataaagctggggtttacccaaggcgacgtcgggttagccatggggaagctatatggcaatgattttagccagactaccatctcgaggttcgaagccctaaacctctcctttaagaacatgtgtaagttaaagccactacttgaaaagtggctgaatgacgccgagaatttaagcagtgatagctctttgagcagcccatcagccttgaatagcccaggtatcgaaggcttatctagaagacggaagaaacgtacgagcattgagacaaacatccgtgtcgccttggagaagtccttcctggaaaaccagaagcccacatctgaagagattaccatgatcgccgaccaactgaacatggaaaaggaggtcattcgcgtgtggttctgcaatcgtaggcagaaagaaaagcggataaaccccccaagcagcgggggaacaagctccagccctatcaaggccattttcccctctccaacatcccttgtggccactactcccagcttggtgacctcctccgccgccactactctgactgtgagcccagtcctgcctctgacatctgctgctgttaccaatcttagtgcccttcagacaccgccgcctacaacccaacagccgtag

SEQ ID NO: 298356 - DNA, 165 bp, Artificial Sequence
  derived and/or modified sequence
atgaacaaccccagcgagaccagcaagcccagcatggagagcggcgatgggaacacaggcacacagactaatgggcttgatttccagaagcagcctgtaccagtgggtggggctatttctacggctcaggcacaggccttcttgggacacttgcatcaggtgtag

SEQ ID NO: 298357 - DNA, 2232 bp, Artificial Sequence
  derived and/or modified sequence
atgaataacccatctgagacctcaaaaccaagtatggaatctggtgatgggaatacaggtactcagaccaacggcctcgatttccagaagcagcccgtgccagtggggggagccatctctactgctcaggctcaggcttttctcggtcatctacaccaggtgcaattggccggtactagtctccaagcggcagcccagtcattgaacgtgcaatccaagtcaaacgaggaatccggagacagtcagcaaccaagtcagccgtcccaacagccctcagtgcaagccgctattccgcagacccagcttatgctcgcgggtggtcagatcacaggtttgactctcacgcccgctcaacaacagctgcttctgcagcaagcccaggcacaagcccaacttctggccgcagccgtgcagcagcatagtgcatcccagcagcatagtgcggctggggcaactatttcggcatccgcggctactcccatgactcagattcccctcagtcagccaatccagattgctcaggacctgcaacagctccagcagttacagcagcaaaacctgaacctgcaacagtttgtcttagtacaccccacaacgaacttacagccggcacagttcataatctcgcaaaccccacagggccaacagggcctgttgcaggcacagaatttgttaacccaactgccacagcagtcccaggcgaatctgctgcaatcccagccatcaatcaccctaacttcgcagccagcgacccccactcgaactatcgccgctacacccatccagaccctgccacagtcccaaagtactcctaagcgcattgacactccaagcctggaggagcccagcgacctcgaggaactggagcagtttgccaaaaccttcaaacagcggcgtatcaaactgggatttacccaaggcgacgtgggtttggcgatgggtaagctgtatggcaacgatttcagccaaaccacaatttcccgcttcgaggcgttgaacttgagctttaagaatatgtgcaagcttaagcctctgctggagaagtggcttaacgacgccgagaatctgtcctccgattcttccctatcatctccaagtgccctcaattcccccggtatcgagggtctcagtcgccgtaggaagaagcgcacaagcatagaaaccaacatccgggtcgctttggagaagagctttctggaaaaccagaaaccaacgagcgaggaaataactatgatcgccgatcagctaaacatggaaaaggaagttattcgcgtgtggttttgcaaccgcagacagaaagaaaagcgcatcaaccccccaagtagcggcggtacttccagcagtccaattaaggcaatttttccgtccccaacatctttggttgccacaacaccaagtttggtgacctccagcgcagccactacattgacagtttctccagtactgccactcacgtccgccgcagttacaaatcttagcgtgacaggtacatctgacactacttcgaataacaccgccaccgtgatatctactgcgcctcccgcatcctcagctgttacctccccttccctaagcccgtctcctagcgcgagtgcatccacgagcgaagcttcgagtgctagcgagactagcactacccagacaaccagcacgcccctgagcagccccctgggaacctcacaggtgatggttacagcctctgggctgcaaactgccgctgccgcagctctacagggtgcagcccagcttccagccaacgctagcttggctgctatggctgctgctgccggattgaatccctcactaatggctccttctcagtttgcagcaggtggcgcactgctcagtctaaatcctggcaccctgtccggcgctctgtctccagcccttatgagcaactccacgctggcaacaatccaagcactggcctctggtggctcactgccaatcacatcgctggacgctaccggaaatttggtctttgcgaacgctggaggtgcgccaaacatcgtgaccgcaccactattcctgaacccgcagaacttgagcctgttaactagtaaccccgtgagcctggtatctgccgctgcagcctcggcaggcaacagtgcccctgtggcatctctgcacgctactagcactagtgccgaaagtattcagaactcacttttcactgtagcaagtgcgtctggagcagccagcactaccacaactgcttccaaagcccagtag

SEQ ID NO: 298358 - DNA, 2226 bp, Artificial Sequence
  derived and/or modified sequence
atgaaaacaaggatgaagatctttgtgatgatacattttcatctcatgaacagtacccagaccaacggcctagatttccagaagcagccggtgcccgttggcggagccataagcacggcccaggctcaagcctttctgggacacttacaccaggtgcagctggccggaacttcattacaggctgccgctcagagcctcaacgttcagtctaaaagtaacgaggagtctggcgattcccaacagcctagccagccgtcccagcagccttcagtccaggctgcgattccccagactcagctaatgctggctggcggacagattacaggcctgacccttaccccagcccagcaacaattgcttcttcaacaagcacaggctcaagctcaactgctggcggcagccgtgcaacagcattctgcctctcaacagcattcagcagccggagctaccatctccgcctccgctgccaccccgatgacgcagatccccctatcccagccaatccagatcgcccaggacttgcagcaactgcagcagcttcagcaacaaaacctgaatttacagcagtttgttttagtgcacccgaccacaaatctgcagccggctcagttcatcatctcacagacaccccaaggtcagcaggggttattgcaggcgcagaacctcttaacccagttgccacaacagtcacaggccaacttactgcagagtcagccctctataacgctgacgtcacaacctgcgactcccacgcgcactatagcagctacgccaatccagacgctccctcagtctcagtccacacccaagcggatcgacacacccagtctggaagagccgtccgatctggaggagctcgagcaatttgctaagacctttaagcagaggagaattaaactgggcttcacccaaggcgacgttggcctcgcaatgggcaaactttacggcaacgatttttcccagacaacgattagtcgattcgaggctctcaatttatccttcaagaacatgtgtaagctcaagccactactggagaagtggttgaacgacgccgagaacctgagttccgattcttccttgagttctccatcggccttgaacagcccgggaattgaaggactttctcgcagaaggaagaagagaacttccatcgagaccaacatacgagtagccttggagaaatcgttcttagaaaaccagaaacccacctccgaggaaatcacaatgattgccgaccaactgaatatggagaaagaggtgataagagtctggttttgcaaccgtcggcagaaggagaagaggattaatccccctagctcaggtgggacatcttctagcccaataaaagcaattttcccatctcccacctccctagtggcaaccaccccatccctagtgacgtctagtgcagcgaccacactgactgtttctccagttctccccctgaccagcgccgctgttactaatctgtcagtgactgggacctctgacacaacgtccaataatacagccactgtcatctcaaccgccccacccgcatctagcgccgtcaccagcccaagcctgagtccttcaccctctgctagcgctagcacatctgaggcttcttcggcctcagaaacttctactactcagacaacaagtacacctctgagctcaccccttgggacaagccaagtgatggttacggcctctgggctgcaaactgccgctgcagctgcacttcagggggctgcccagctgccagccaacgcgtctctggcggcaatggccgcagccgcaggcctcaacccctccctgatggccccatctcagtttgcagcaggaggggctctcctcagcttaaatcctgggaccttatctggcgctctatctccagcactgatgtccaactcaacattagcaactattcaggccctggcctctggaggttcgctaccgattacctcactcgatgctactggaaatctggtctttgcaaacgcgggtggggcacccaacattgtgacggcacccctctttttgaacccacagaatctctccctgctaacttcaaatcctgtctccctggtcagcgccgcagccgcaagtgccggaaactctgccccagtcgcctcactgcacgccacaagtaccagcgccgaatcgattcagaacagtctttttaccgttgcctctgcctccggagctgcaagcactacaaccactgccagcaaagcacagtag

SEQ ID NO: 298359 - DNA, 2301 bp, Artificial Sequence
  derived and/or modified sequence
atggcagacggcggagctgcaagccaagatgagagcagtgctgcggcagccgctgcagccgattctcgcatgaacaatcccagcgagaccagcaaaccttctatggagtccggagacggaaatactggaactcagactaatgggctcgattttcaaaaacagccagtccctgtggggggagccatttccacagcgcaagcccaggcgttcttggggcatctccatcaggtacagctcgccggaaccagccttcaggccgcagcgcaatctttgaatgtgcaaagtaagagcaatgaggagagcggagattcccagcaacctagccaaccttcccagcaaccctccgtgcaggccgctatccctcaaactcaactgatgctcgctggaggacagatcacaggtctcacacttaccccggcacagcagcaattgctcctgcagcaggcccaggcacaggcccagctgttagcagcagccgtccagcagcactctgcctcccagcaacactcagcagccggagccactatttcagcatccgctgctacacccatgactcagatccctttgtcccaacctatacagatcgcgcaggacctgcagcaactgcagcagctgcagcagcaaaaccttaaccttcaacagtttgtcctggtccaccccacaaccaatttgcagcccgcacagttcatcatatcccagaccccccaagggcaacaggggttgcttcaggctcaaaacctgctgacccaattgccacaacagagtcaagctaatctcctccagagtcagcccagtatcactctcacctctcagcctgctacaccaacccgaactatcgcagcaactccaattcagactctgccgcagtcccaatctactcctaaaagaatagataccccctcattagaggaaccttcagatctggaggaactggagcagttcgcaaagacatttaagcagagaagaatcaagttggggtttacacagggcgacgtgggtctcgcgatgggaaagctatacggcaacgacttctctcaaactacaattagtaggttcgaggctctcaacttatcatttaaaaacatgtgtaaattaaaacctctcctcgaaaaatggctaaacgatgcagaaaacctgagcagtgactcatcactcagctctccctccgccctcaatagccctggaatcgaggggttaagtcgcaggcgcaagaagcgcacatcgatcgagactaatattcgtgtcgctttggagaagagttttttagaaaaccaaaagcccactagtgaggagatcacaatgatcgctgatcagctcaacatggaaaaggaggtcatccgagtctggttttgcaatcggcgacaaaaagaaaagcggattaaccctcccagcagcggcggaacctcttcgtcgcctatcaaggctatcttcccaagccccacttcactggtggcgaccactccctcattagtcacgtccagcgcagccaccacactcacggtctcccccgtgctgccccttaccagcgccgctgttacaaatcttagcgtgacaggaacttctgacacaacttctaataataccgctaccgtcatcagcacagcacctccagcgtcctcagccgtcacaagcccgagtcttagtccgtccccatccgccagtgcatccaccagcgaggcttcctctgcgagcgaaaccagtaccacacaaaccacatctacaccattgtcatccccacttggcacctcacaagtgatggtgactgcaagtggcctccagactgccgcagccgcagcattgcagggagccgctcaactgccagcaaatgcaagcctcgccgctatggcagcagctgccggattaaacccttccctgatggcaccttcacaatttgcggctggaggcgctctactcagtctcaacccaggcacacttagcggtgctctgtctccagcgctgatgagcaatagcaccctggctactatacaggctctggccagcggtggttcactgcccatcacaagtctcgacgctaccggaaatctagtattcgcaaacgccggaggagccccaaacatcgtgaccgcccctctgttcctgaacccccagaacctctccttgctgacaagcaaccccgttagcctcgtttccgccgctgcggcaagcgctgggaactccgcaccggtagcatcactccatgccacttcaacatccgcagaatccatccagaatagcctgttcacggtagcaagcgcctctggtgctgctagtactactaccacggcttccaaggcccagtag

SEQ ID NO: 298360 - DNA, 1962 bp, Artificial Sequence
  derived and/or modified sequence
atgaacaatccatctgagacctccaaaccatcgatggaatccggcgacgggaatacaggaacgcaaacgaatggcctggatttccagaagcaacccgttccagtcggaggagccatcagtaccgcccaggcccaggcgttcctgggccacctccaccaggttcagttggcaggtacaagcctgcaggctgctgcccagtcattgaacgtgcagtccaagtcgaatgaagaatctggagattcacaacagccatcccagccatcacaacagccaagtgtgcaagccgcaattcctcaaactcagctcatgttagctggagggcagatcacaggactgacactgaccccagcccaacagcagctcctgcttcagcaagctcaggcccaggcgcagctgctcgcggctgccgtgcagcagcactcagccagtcagcagcattcagctgctggtgctactatctcagcctcagccgctacacccatgactcagattcccctcagccagccgattcagatcgcacaggacctccagcagctgcagcagttacagcagcagaacctgaatctccagcaattcgtgttggtgcacccaacaacaaatctacagcctgcccagtttatcatctctcagacgccccagggccagcaagggttgctgcaggcccaaaatttacttacccagctaccgcagcaaagtcaggcgaacctgctacagagccagcctagcattacattaacttctcagcccgcaacaccaaccagaactattgccgcaacccctatccagaccctcccccagagccagagcacccccaagcggatagataccccgagtctcgaggaaccctcagatcttgaggaacttgagcaatttgcaaagactttcaaacagcgcagaatcaaactcgggttcacacaaggcgacgtaggtcttgccatgggcaaactgtatggcaacgacttctcccagacaaccatatctagattcgaggccctgaacttgagtttcaaaaacatgtgtaaactgaaacctttgttggagaagtggcttaatgatgctgagaacttgtcctccgatagcagcctttcttcaccctcagccttaaatagcccaggtatcgaaggactctcaaggaggcgcaaaaaacgcactagtattgagacaaatatccgtgtggcgttggagaaatcattcctcgaaaaccaaaaacctacatccgaggaaattaccatgatcgccgaccagctgaacatggagaaggaggtgatcagagtttggttctgtaatcggaggcagaaggaaaagcgtataaaccccccttcctcgggcggtacgtcttcttcaccaatcaaggctatatttccgtcacctacctctctggtggcaacaaccccttccttggtaacaagcagcgccgctacgaccctgactgtgagccccgtgctacccttgacaagtgcagctgtcactaatttgagtgtcacaggcacatcagataccaccagcaataacaccgcaacagtgatctccacggccccacccgcttcttccgccgtgactagtcctagtctgtccccatcaccctccgccagcgcttctacctcagaggcttcctcagcaagcgagacaagcacgacgcagactacatctacccctctatccagcccgctcggaacttcacaggtcatggtgacggctagtggactgcaaacagccgcagccgcagccttgcagggcgctgcacagcttcctgccaacgcttcacttgctgccatggcggcagctgccggtctgaaccctagtctgatggctccaagtcagtttgctgcaggtggggcactcttatccctcaacccaggcacattgtcgggcgctctctctccagccctaatgagtaactctacactggccaccatccagggactactgcacgggctagaaaactttctaacaaaaaactag

SEQ ID NO: 298361 - DNA, 279 bp, Artificial Sequence
  derived and/or modified sequence
atgaacaacccctctgagacctccaagccttccatggagtcaggggatggtaatacaggtactcagacgaacggcctggacttccagaagcagccagtccctgtgggaggggctatcagcaccgcccaggcacaggccttcctcggccacttacatcaggtccaactggcaggaaccagcctgcaggccgcagcccaaagcctcaacgtgcagagcaagagcaatgaggaatctggagactcccagcaaccaagtcagccctcccagcagccttcatag

SEQ ID NO: 298362 - DNA, 765 bp, Artificial Sequence
  derived and/or modified sequence
atgaataacccgtctgaaacatcaaaaccctccatggaatccggcgatggcaacacgggtacacagactaacggcctcgatttccagaaacagcctgtacccgttgggggagctatttctaccgcgcaagcccaagcctttttgggccatctccatcaagtacagctggcaggcacttccttacaagccgcagcccagagcctgaacgtgcagtccaagtccaacgaggaatcgggtgactcacaacaaccatctcagcctagtcagcagcctagtgtacaggccgctatcccgcagactcagctgatgctggctgggggtcagatcacaggcctgactttgacccctgcacagcagcagctactcctccaacaagcacaagcccaagcccagctgctcgcagctgcggtccagcagcactccgcaagtcaacagcacagtgctgccggagccacaatctccgccagcgctgccactccaatgacccaaatccctctttcacagcccattcaaatagcccaggatcttcaacagctccagcagctccaacagcagaacctgaacctccagcagtttgttctggttcaccctaccaccaatctgcagccagcccagtttatcatatcacaaactccccagggccagcagggcctcttacaggcccagaatctgctgactcaactaccccagcaaagtcaggctaacttactgcagtcacagccatcaatcaccttgacctcgcagatctggccaagccctgcatag

SEQ ID NO: 298363 - DNA, 342 bp, Artificial Sequence
  derived and/or modified sequence
atgaacaacccaagcgagacgtctaaaccttcaatggagagcggggacggtaatactggaacaggtaccgcagctggttgttgttctgcggcagcattacgtcagccggctgcccagtgctgctggtctcaccatttgcgtctttgctgccacgctcacgacgctgacccacccgtgagtgcgcatactgatcggacagggagtagcactacagctacggcatcaacagccgagagtcagcccgcaaccgtttgtgtcggcgcatctaaccaccagttcgccgcaagcgctgtatatcatttgactgacgcaccaggaccggcaggtagccctgccagttag

SEQ ID NO: 298364 - DNA, 2232 bp, Artificial Sequence
  derived and/or modified sequence
atgaacaatccttccgagacatctaaaccaagtatggagagtggcgatggcaatacaggcacccagacaaacggccttgatttccaaaagcaacccgtgcccgtgggcggagccatcagcaccgcccaggcccaggcatttctaggacacctgcaccaagtgcaacttgccggtactagtctgcaggcggctgcccaatcgctgaatgtgcaatcaaagtccaacgaagaatctggggacagccagcagccgagccagccgagtcaacagccctcagtccaggctgcaatcccccagacccagctaatgctcgccggaggacaaattactggtttgacacttacgcctgcccagcagcaactgcttctgcagcaggcccaggctcaagcacagctcttagcggctgctgtgcagcagcattctgcttctcagcaacactctgccgctggggctaccatttctgcgtccgccgcaacacccatgactcagatccctctgagccagcctatccagatagctcaggacctgcaacagctgcaacagttacagcagcagaatctgaacctgcagcaattcgtcctagttcatcctactacgaatcttcagccagcacagtttattataagccagacaccccagggacagcagggactgctccaggcgcagaacctgctgactcagctccctcagcaatcacaggcgaatctgctgcagagccagccatccatcaccctgacctcccagcccgcaacacctacacgcacaatcgccgctacacccatccagacactgccacagtcacagtctacgcctaagcgcatagacacgccttccctggaggagccaagcgatctggaggaactcgagcagtttgccaagacgttcaagcagaggaggatcaaactgggctttacacaaggcgatgtgggtcttgctatggggaaactctacggtaacgacttctcacagacaacaatcagtaggtttgaagccctaaatttgagctttaagaacatgtgcaaattaaagcccctactagagaaatggctgaatgacgcagaaaatttaagcagcgacagctctctgagctctcctagcgctctgaattctcctggaattgaaggtctgtctcggagacggaaaaagcgaacttcgatagaaactaatatccgagtcgccctggagaagtctttccttgagaaccaaaagccaacaagcgaggagatcaccatgatagccgatcagctgaacatggaaaaagaagtgattagagtctggttttgcaatcggcgtcagaaggaaaaacgaattaatcctccgagttctggcggaacatcttcgtctcctataaaggcgatcttccctagtcccaccagtcttgttgctactacccccagcttggtcacctcatcggctgctactacactcactgtatcccctgttctgccattaacatctgcggctgtcacgaacctttcagtgaccggtacaagcgacacaacctccaataacactgcgaccgtgatctctaccgcgcctcctgcctcctccgccgtcaccagtccaagtctgtcaccctcaccctcggcctccgcgagcacatctgaggcctcctccgctagtgagacttcgaccacccagacaacaagcacaccgttgagcagtccactggggacatctcaagtgatggtaactgcaagcgggctgcaaacggcagcagcggctgccctccaaggcgcagcccaactacccgctaatgcaagtctggctgccatggccgcagccgctgggttgaaccctagcctaatggcgccttctcaattcgctgcgggaggcgctctgctgtctttgaaccctggtaccctgtccggcgcacttagccctgctctcatgtctaacagcactctggctacaattcaggcccttgctagcggcggatccctcccgatcaccagcttggatgccactggtaatctggtgtttgcgaatgcagggggagctcctaacatcgtgacagcgcctctgttcttaaatccacagaacctgagcctgcttacctctaaccccgtgagtctcgtttccgccgctgctgcctccgcaggtaatagcgcacccgtcgcgtctctacatgcgaccagcacatccgctgaatccatacaaaactccttgttcaccgttgcctccgcgagcggcgcagcctcaaccacgaccacagcttctaaagcccaatag

SEQ ID NO: 298365 - DNA, 411 bp, Artificial Sequence
  derived and/or modified sequence
atgaataacccttctgagacttctaagccaagtatggagtcaggggacgggaacaccggaacccagaccaatggtctcgattttcagaagcagcccgtacctgttggtggagccatatccaccgcccaggcccaagcattcttgggacacctacaccaggttcagctggccggtacctccctgcaagccgctgctcaaagtctaaacgtccaatcaaagagtaatgaggaaagcggcgactcccaacaaccttcccaacctagccagcagccatcagttcaggctgctatccctcagacgcagttgatgttagcgggaggacagatcaccggcctcaccctgacacccgctcagcagcagctgctgctccaacaggcacaggctcaggcccagctgttagctgccgcttag

SEQ ID NO: 298366 - DNA, 1587 bp, Artificial Sequence
  derived and/or modified sequence
atggccgacgggggtgccgcatcccaggacgaatcgagcgctgctgcggctgccgctgccgactcccggatgaacaatcctagtgagacctcaaagccgtcaatggaatcaggcgacggaaatacagggacacagacaaacggattagactttcaaaaacaacctgtcccagtgggaggcgcaattagtacagcacaggcgcaggctttcctcggacatctgcatcaggtgcagttggccggaacctcattgcaggccgctgcccagtccctgaacgtgcagagcaaatccaacgaggagagtggtgatagccaacagccctcccagccctcccagcaacctagcgtgcaagctgccattccgcagacccaattgatgctggccggaggacaaattacaggtttgacattaacgccggcacagcagcaattactgttgcagcaggctcaggctcaggcccagctgttggcagcggctgtgcagcagcatagcgcttcccagcaacatagcgcagcgggagctacaatctcggcctcggccgctacaccaatgactcaaataccgcttagccagccaatccagatagcacaggacttacagcagctacagcagctccagcagcagaatctcaaccttcagcagttcgtgcttgttcatccgacaactaacctccagcccgctcagttcatcatcagccagactccccagggtcagcagggactgctccaggctcagaatctgctgacacaactgccccagcagtcacaagccaatttgctacagtcacagccctccatcacactcacaagccagcctgctactcccactaggaccatagcagccacccccatccagaccctgccacagagccagagcacaccaaagagaatcgatacacccagccttgaagaacccagtgacctggaagagctcgaacagtttgccaagaccttcaaacagcgacgaatcaaactgggattcacacaaggggacgtgggcctcgccatgggcaagctctacggaaatgatttctcccagacaacgattagtaggttcgaggctctgaacctcagcttcaaaaacatgtgtaagctgaaacccctgctggagaagtggctaaacgatgcagagaatctttccagtgattcatccttgtctagccccagtgctctgaattccccagggatcgaaggcctgagcagacgcaggaagaaacggacatctattgaaacgaacatccgagtcgcattggagaaatcttttctggagaaccagaagccgactagtgaagaaatcactatgatagcggaccaattgaatatggaaaaggaagtgataagagtctggttttgcaatcgaaggcaaaaggagaagagaattaatccaccctctagcgggggaacttccagctcacctattaaggctatttttccctctccaacaagcttggtagccacgaccccgtcccttgtgacatctagcgccgctaccaccctgacggtgtccccagtcctcccattgaccagcgccgcagtcaccaacctgagcgcccttcagacccctccccctacaacacagcagccttag

SEQ ID NO: 298367 - DNA, 165 bp, Artificial Sequence
  derived and/or modified sequence
atgaacaaccccagcgaaacgtctaagcctagtatggagtctggcgacgggaataccggaacccaaactaacggtctggactttcagaagcagccggtgccagtgggtggcgcaatatccaccgcccaggcgcaagccttcctggggcatctccaccaggtatag

SEQ ID NO: 298368 - DNA, 2232 bp, Artificial Sequence
  derived and/or modified sequence
atgaacaaccccagcgagaccagcaagcccagcatggagagcggcgacggcaacaccggcacccagaccaacggcctggacttccagaagcagcccgtgcccgtgggcggcgccatcagcaccgcccaggcccaggccttcctgggccacctgcaccaggtgcagctggccggcaccagcctgcaggccgccgcccagagcctgaacgtgcagagcaagagcaacgaggagagcggcgacagccagcagcccagccagcccagccagcagcccagcgtgcaggccgccatcccccagacccagctgatgctggccggcggccagatcaccggcctgaccctgacccccgcccagcagcagctgctgctgcagcaggcccaggcccaggcccagctgctggccgccgccgtgcagcagcacagcgccagccagcagcacagcgccgccggcgccaccatcagcgccagcgccgccacccccatgacccagatccccctgagccagcccatccagatcgcccaggacctgcagcagctgcagcagctgcagcagcagaacctgaacctgcagcagttcgtgctggtgcaccccaccaccaacctgcagcccgcccagttcatcatcagccagaccccccagggccagcagggcctgctgcaggcccagaacctgctgacccagctgccccagcagagccaggccaacctgctgcagagccagcccagcatcaccctgaccagccagcccgccacccccaccagaaccatcgccgccacccccatccagaccctgccccagagccagagcacccccaagagaatcgacacccccagcctggaggagcccagcgacctggaggagctggagcagttcgccaagaccttcaagcagagaagaatcaagctgggcttcacccagggcgacgtgggcctggccatgggcaagctgtacggcaacgacttcagccagaccaccatcagcagattcgaggccctgaacctgagcttcaagaacatgtgcaagctgaagcccctgctggagaagtggctgaacgacgccgagaacctgagcagcgacagcagcctgagcagccccagcgccctgaacagccccggcatcgagggcctgagcagaagaagaaagaagagaaccagcatcgagaccaacatcagagtggccctggagaagagcttcctggagaaccagaagcccaccagcgaggagatcaccatgatcgccgaccagctgaacatggagaaggaggtgatcagagtgtggttctgcaacagaagacagaaggagaagagaatcaacccccccagcagcggcggcaccagcagcagccccatcaaggccatcttccccagccccaccagcctggtggccaccacccccagcctggtgaccagcagcgccgccaccaccctgaccgtgagccccgtgctgcccctgaccagcgccgccgtgaccaacctgagcgtgaccggcaccagcgacaccaccagcaacaacaccgccaccgtgatcagcaccgccccccccgccagcagcgccgtgaccagccccagcctgagccccagccccagcgccagcgccagcaccagcgaggccagcagcgccagcgagaccagcaccacccagaccaccagcacccccctgagcagccccctgggcaccagccaggtgatggtgaccgccagcggcctgcagaccgccgccgccgccgccctgcagggcgccgcccagctgcccgccaacgccagcctggccgccatggccgccgccgccggcctgaaccccagcctgatggcccccagccagttcgccgccggcggcgccctgctgagcctgaaccccggcaccctgagcggcgccctgagccccgccctgatgagcaacagcaccctggccaccatccaggccctggccagcggcggcagcctgcccatcaccagcctggacgccaccggcaacctggtgttcgccaacgccggcggcgcccccaacatcgtgaccgcccccctgttcctgaacccccagaacctgagcctgctgaccagcaaccccgtgagcctggtgagcgccgccgccgccagcgccggcaacagcgcccccgtggccagcctgcacgccaccagcaccagcgccgagagcatccagaacagcctgttcaccgtggccagcgccagcggcgccgccagcaccaccaccaccgccagcaaggcccagtag

SEQ ID NO: 298369 - DNA, 2226 bp, Artificial Sequence
  derived and/or modified sequence
atgaagaccagaatgaagatcttcgtgatgatccacttccacctgatgaacagcacccagaccaacggcctggacttccagaagcagcccgtgcccgtgggcggcgccatcagcaccgcccaggcccaggccttcctgggccacctgcaccaggtgcagctggccggcaccagcctgcaggccgccgcccagagcctgaacgtgcagagcaagagcaacgaggagagcggcgacagccagcagcccagccagcccagccagcagcccagcgtgcaggccgccatcccccagacccagctgatgctggccggcggccagatcaccggcctgaccctgacccccgcccagcagcagctgctgctgcagcaggcccaggcccaggcccagctgctggccgccgccgtgcagcagcacagcgccagccagcagcacagcgccgccggcgccaccatcagcgccagcgccgccacccccatgacccagatccccctgagccagcccatccagatcgcccaggacctgcagcagctgcagcagctgcagcagcagaacctgaacctgcagcagttcgtgctggtgcaccccaccaccaacctgcagcccgcccagttcatcatcagccagaccccccagggccagcagggcctgctgcaggcccagaacctgctgacccagctgccccagcagagccaggccaacctgctgcagagccagcccagcatcaccctgaccagccagcccgccacccccaccagaaccatcgccgccacccccatccagaccctgccccagagccagagcacccccaagagaatcgacacccccagcctggaggagcccagcgacctggaggagctggagcagttcgccaagaccttcaagcagagaagaatcaagctgggcttcacccagggcgacgtgggcctggccatgggcaagctgtacggcaacgacttcagccagaccaccatcagcagattcgaggccctgaacctgagcttcaagaacatgtgcaagctgaagcccctgctggagaagtggctgaacgacgccgagaacctgagcagcgacagcagcctgagcagccccagcgccctgaacagccccggcatcgagggcctgagcagaagaagaaagaagagaaccagcatcgagaccaacatcagagtggccctggagaagagcttcctggagaaccagaagcccaccagcgaggagatcaccatgatcgccgaccagctgaacatggagaaggaggtgatcagagtgtggttctgcaacagaagacagaaggagaagagaatcaacccccccagcagcggcggcaccagcagcagccccatcaaggccatcttccccagccccaccagcctggtggccaccacccccagcctggtgaccagcagcgccgccaccaccctgaccgtgagccccgtgctgcccctgaccagcgccgccgtgaccaacctgagcgtgaccggcaccagcgacaccaccagcaacaacaccgccaccgtgatcagcaccgccccccccgccagcagcgccgtgaccagccccagcctgagccccagccccagcgccagcgccagcaccagcgaggccagcagcgccagcgagaccagcaccacccagaccaccagcacccccctgagcagccccctgggcaccagccaggtgatggtgaccgccagcggcctgcagaccgccgccgccgccgccctgcagggcgccgcccagctgcccgccaacgccagcctggccgccatggccgccgccgccggcctgaaccccagcctgatggcccccagccagttcgccgccggcggcgccctgctgagcctgaaccccggcaccctgagcggcgccctgagccccgccctgatgagcaacagcaccctggccaccatccaggccctggccagcggcggcagcctgcccatcaccagcctggacgccaccggcaacctggtgttcgccaacgccggcggcgcccccaacatcgtgaccgcccccctgttcctgaacccccagaacctgagcctgctgaccagcaaccccgtgagcctggtgagcgccgccgccgccagcgccggcaacagcgcccccgtggccagcctgcacgccaccagcaccagcgccgagagcatccagaacagcctgttcaccgtggccagcgccagcggcgccgccagcaccaccaccaccgccagcaaggcccagtag

SEQ ID NO: 298370 - DNA, 2301 bp, Artificial Sequence
  derived and/or modified sequence
atggccgacggcggcgccgccagccaggacgagagcagcgccgccgccgccgccgccgccgacagcagaatgaacaaccccagcgagaccagcaagcccagcatggagagcggcgacggcaacaccggcacccagaccaacggcctggacttccagaagcagcccgtgcccgtgggcggcgccatcagcaccgcccaggcccaggccttcctgggccacctgcaccaggtgcagctggccggcaccagcctgcaggccgccgcccagagcctgaacgtgcagagcaagagcaacgaggagagcggcgacagccagcagcccagccagcccagccagcagcccagcgtgcaggccgccatcccccagacccagctgatgctggccggcggccagatcaccggcctgaccctgacccccgcccagcagcagctgctgctgcagcaggcccaggcccaggcccagctgctggccgccgccgtgcagcagcacagcgccagccagcagcacagcgccgccggcgccaccatcagcgccagcgccgccacccccatgacccagatccccctgagccagcccatccagatcgcccaggacctgcagcagctgcagcagctgcagcagcagaacctgaacctgcagcagttcgtgctggtgcaccccaccaccaacctgcagcccgcccagttcatcatcagccagaccccccagggccagcagggcctgctgcaggcccagaacctgctgacccagctgccccagcagagccaggccaacctgctgcagagccagcccagcatcaccctgaccagccagcccgccacccccaccagaaccatcgccgccacccccatccagaccctgccccagagccagagcacccccaagagaatcgacacccccagcctggaggagcccagcgacctggaggagctggagcagttcgccaagaccttcaagcagagaagaatcaagctgggcttcacccagggcgacgtgggcctggccatgggcaagctgtacggcaacgacttcagccagaccaccatcagcagattcgaggccctgaacctgagcttcaagaacatgtgcaagctgaagcccctgctggagaagtggctgaacgacgccgagaacctgagcagcgacagcagcctgagcagccccagcgccctgaacagccccggcatcgagggcctgagcagaagaagaaagaagagaaccagcatcgagaccaacatcagagtggccctggagaagagcttcctggagaaccagaagcccaccagcgaggagatcaccatgatcgccgaccagctgaacatggagaaggaggtgatcagagtgtggttctgcaacagaagacagaaggagaagagaatcaacccccccagcagcggcggcaccagcagcagccccatcaaggccatcttccccagccccaccagcctggtggccaccacccccagcctggtgaccagcagcgccgccaccaccctgaccgtgagccccgtgctgcccctgaccagcgccgccgtgaccaacctgagcgtgaccggcaccagcgacaccaccagcaacaacaccgccaccgtgatcagcaccgccccccccgccagcagcgccgtgaccagccccagcctgagccccagccccagcgccagcgccagcaccagcgaggccagcagcgccagcgagaccagcaccacccagaccaccagcacccccctgagcagccccctgggcaccagccaggtgatggtgaccgccagcggcctgcagaccgccgccgccgccgccctgcagggcgccgcccagctgcccgccaacgccagcctggccgccatggccgccgccgccggcctgaaccccagcctgatggcccccagccagttcgccgccggcggcgccctgctgagcctgaaccccggcaccctgagcggcgccctgagccccgccctgatgagcaacagcaccctggccaccatccaggccctggccagcggcggcagcctgcccatcaccagcctggacgccaccggcaacctggtgttcgccaacgccggcggcgcccccaacatcgtgaccgcccccctgttcctgaacccccagaacctgagcctgctgaccagcaaccccgtgagcctggtgagcgccgccgccgccagcgccggcaacagcgcccccgtggccagcctgcacgccaccagcaccagcgccgagagcatccagaacagcctgttcaccgtggccagcgccagcggcgccgccagcaccaccaccaccgccagcaaggcccagtag

SEQ ID NO: 298371 - DNA, 1962 bp, Artificial Sequence
  derived and/or modified sequence
atgaacaaccccagcgagaccagcaagcccagcatggagagcggcgacggcaacaccggcacccagaccaacggcctggacttccagaagcagcccgtgcccgtgggcggcgccatcagcaccgcccaggcccaggccttcctgggccacctgcaccaggtgcagctggccggcaccagcctgcaggccgccgcccagagcctgaacgtgcagagcaagagcaacgaggagagcggcgacagccagcagcccagccagcccagccagcagcccagcgtgcaggccgccatcccccagacccagctgatgctggccggcggccagatcaccggcctgaccctgacccccgcccagcagcagctgctgctgcagcaggcccaggcccaggcccagctgctggccgccgccgtgcagcagcacagcgccagccagcagcacagcgccgccggcgccaccatcagcgccagcgccgccacccccatgacccagatccccctgagccagcccatccagatcgcccaggacctgcagcagctgcagcagctgcagcagcagaacctgaacctgcagcagttcgtgctggtgcaccccaccaccaacctgcagcccgcccagttcatcatcagccagaccccccagggccagcagggcctgctgcaggcccagaacctgctgacccagctgccccagcagagccaggccaacctgctgcagagccagcccagcatcaccctgaccagccagcccgccacccccaccagaaccatcgccgccacccccatccagaccctgccccagagccagagcacccccaagagaatcgacacccccagcctggaggagcccagcgacctggaggagctggagcagttcgccaagaccttcaagcagagaagaatcaagctgggcttcacccagggcgacgtgggcctggccatgggcaagctgtacggcaacgacttcagccagaccaccatcagcagattcgaggccctgaacctgagcttcaagaacatgtgcaagctgaagcccctgctggagaagtggctgaacgacgccgagaacctgagcagcgacagcagcctgagcagccccagcgccctgaacagccccggcatcgagggcctgagcagaagaagaaagaagagaaccagcatcgagaccaacatcagagtggccctggagaagagcttcctggagaaccagaagcccaccagcgaggagatcaccatgatcgccgaccagctgaacatggagaaggaggtgatcagagtgtggttctgcaacagaagacagaaggagaagagaatcaacccccccagcagcggcggcaccagcagcagccccatcaaggccatcttccccagccccaccagcctggtggccaccacccccagcctggtgaccagcagcgccgccaccaccctgaccgtgagccccgtgctgcccctgaccagcgccgccgtgaccaacctgagcgtgaccggcaccagcgacaccaccagcaacaacaccgccaccgtgatcagcaccgccccccccgccagcagcgccgtgaccagccccagcctgagccccagccccagcgccagcgccagcaccagcgaggccagcagcgccagcgagaccagcaccacccagaccaccagcacccccctgagcagccccctgggcaccagccaggtgatggtgaccgccagcggcctgcagaccgccgccgccgccgccctgcagggcgccgcccagctgcccgccaacgccagcctggccgccatggccgccgccgccggcctgaaccccagcctgatggcccccagccagttcgccgccggcggcgccctgctgagcctgaaccccggcaccctgagcggcgccctgagccccgccctgatgagcaacagcaccctggccaccatccagggcctgctgcacggcctggagaacttcctgaccaagaactag

SEQ ID NO: 298372 - DNA, 279 bp, Artificial Sequence
  derived and/or modified sequence
atgaacaaccccagcgagaccagcaagcccagcatggagagcggcgacggcaacaccggcacccagaccaacggcctggacttccagaagcagcccgtgcccgtgggcggcgccatcagcaccgcccaggcccaggccttcctgggccacctgcaccaggtgcagctggccggcaccagcctgcaggccgccgcccagagcctgaacgtgcagagcaagagcaacgaggagagcggcgacagccagcagcccagccagcccagccagcagcccagctag

SEQ ID NO: 298373 - DNA, 765 bp, Artificial Sequence
  derived and/or modified sequence
atgaacaaccccagcgagaccagcaagcccagcatggagagcggcgacggcaacaccggcacccagaccaacggcctggacttccagaagcagcccgtgcccgtgggcggcgccatcagcaccgcccaggcccaggccttcctgggccacctgcaccaggtgcagctggccggcaccagcctgcaggccgccgcccagagcctgaacgtgcagagcaagagcaacgaggagagcggcgacagccagcagcccagccagcccagccagcagcccagcgtgcaggccgccatcccccagacccagctgatgctggccggcggccagatcaccggcctgaccctgacccccgcccagcagcagctgctgctgcagcaggcccaggcccaggcccagctgctggccgccgccgtgcagcagcacagcgccagccagcagcacagcgccgccggcgccaccatcagcgccagcgccgccacccccatgacccagatccccctgagccagcccatccagatcgcccaggacctgcagcagctgcagcagctgcagcagcagaacctgaacctgcagcagttcgtgctggtgcaccccaccaccaacctgcagcccgcccagttcatcatcagccagaccccccagggccagcagggcctgctgcaggcccagaacctgctgacccagctgccccagcagagccaggccaacctgctgcagagccagcccagcatcaccctgaccagccagatctggcccagccccgcctag

SEQ ID NO: 298374 - DNA, 342 bp, Artificial Sequence
  derived and/or modified sequence
atgaacaaccccagcgagaccagcaagcccagcatggagagcggcgacggcaacaccggcaccggcaccgccgccggctgctgcagcgccgccgccctgagacagcccgccgcccagtgctgctggagccaccacctgagactgtgctgccacgcccacgacgccgacccccccgtgagcgcccacaccgacagaaccggcagcagcaccaccgccaccgccagcaccgccgagagccagcccgccaccgtgtgcgtgggcgccagcaaccaccagttcgccgccagcgccgtgtaccacctgaccgacgcccccggccccgccggcagccccgccagctag

SEQ ID NO: 298375 - DNA, 411 bp, Artificial Sequence
  derived and/or modified sequence
atgaacaaccccagcgagaccagcaagcccagcatggagagcggcgacggcaacaccggcacccagaccaacggcctggacttccagaagcagcccgtgcccgtgggcggcgccatcagcaccgcccaggcccaggccttcctgggccacctgcaccaggtgcagctggccggcaccagcctgcaggccgccgcccagagcctgaacgtgcagagcaagagcaacgaggagagcggcgacagccagcagcccagccagcccagccagcagcccagcgtgcaggccgccatcccccagacccagctgatgctggccggcggccagatcaccggcctgaccctgacccccgcccagcagcagctgctgctgcagcaggcccaggcccaggcccagctgctggccgccgcctag

SEQ ID NO: 298376 - DNA, 1587 bp, Artificial Sequence
  derived and/or modified sequence
atggccgacggcggcgccgccagccaggacgagagcagcgccgccgccgccgccgccgccgacagcagaatgaacaaccccagcgagaccagcaagcccagcatggagagcggcgacggcaacaccggcacccagaccaacggcctggacttccagaagcagcccgtgcccgtgggcggcgccatcagcaccgcccaggcccaggccttcctgggccacctgcaccaggtgcagctggccggcaccagcctgcaggccgccgcccagagcctgaacgtgcagagcaagagcaacgaggagagcggcgacagccagcagcccagccagcccagccagcagcccagcgtgcaggccgccatcccccagacccagctgatgctggccggcggccagatcaccggcctgaccctgacccccgcccagcagcagctgctgctgcagcaggcccaggcccaggcccagctgctggccgccgccgtgcagcagcacagcgccagccagcagcacagcgccgccggcgccaccatcagcgccagcgccgccacccccatgacccagatccccctgagccagcccatccagatcgcccaggacctgcagcagctgcagcagctgcagcagcagaacctgaacctgcagcagttcgtgctggtgcaccccaccaccaacctgcagcccgcccagttcatcatcagccagaccccccagggccagcagggcctgctgcaggcccagaacctgctgacccagctgccccagcagagccaggccaacctgctgcagagccagcccagcatcaccctgaccagccagcccgccacccccaccagaaccatcgccgccacccccatccagaccctgccccagagccagagcacccccaagagaatcgacacccccagcctggaggagcccagcgacctggaggagctggagcagttcgccaagaccttcaagcagagaagaatcaagctgggcttcacccagggcgacgtgggcctggccatgggcaagctgtacggcaacgacttcagccagaccaccatcagcagattcgaggccctgaacctgagcttcaagaacatgtgcaagctgaagcccctgctggagaagtggctgaacgacgccgagaacctgagcagcgacagcagcctgagcagccccagcgccctgaacagccccggcatcgagggcctgagcagaagaagaaagaagagaaccagcatcgagaccaacatcagagtggccctggagaagagcttcctggagaaccagaagcccaccagcgaggagatcaccatgatcgccgaccagctgaacatggagaaggaggtgatcagagtgtggttctgcaacagaagacagaaggagaagagaatcaacccccccagcagcggcggcaccagcagcagccccatcaaggccatcttccccagccccaccagcctggtggccaccacccccagcctggtgaccagcagcgccgccaccaccctgaccgtgagccccgtgctgcccctgaccagcgccgccgtgaccaacctgagcgccctgcagacccccccccccaccacccagcagccctag

SEQ ID NO: 298377 - DNA, 165 bp, Artificial Sequence
  derived and/or modified sequence
atgaacaaccccagcgagaccagcaagcccagcatggagagcggcgacggcaacaccggcacccagaccaacggcctggacttccagaagcagcccgtgcccgtgggcggcgccatcagcaccgcccaggcccaggccttcctgggccacctgcaccaggtgtag

SEQ ID NO: 298378 - protein, 241 aa, Artificial Sequence
  derived and/or modified sequence
MYDPNTADDEDWKMWLGGLMNDDVGNEDEADDDDDPEYNFLEDLDEPDTEDFRTDRAVRITKKEVNELMEELFETFQDEMGFSNMEDDGPEEEECVAEPRPNFNTPQALRFEEPLANLLNEQHRTVKELFEQLKMKKSSAKQLQEVEKVKPQSEKVHQTLILDPAQRKRLQQQMQQKELGTFAQSSIALHHQYNPKFQTLFQPCNLMGAMQLIEDFSTHVSIDCSPHKTVKKTGRRQMCQL

SEQ ID NO: 298379 - DNA, 726 bp, Artificial Sequence
  derived and/or modified sequence
atgtacgacccgaacacggcggacgacgaggactggaaaatgtggctggggggcctgatgaatgacgacgttgggaacgaagatgaggctgatgacgatgacgacccagagtataacttcctggaggacttagatgaacctgacaccgaagattttaggaccgacagagcggtccgtattaccaagaaagaggtcaatgagcttatggaggaactcttcgagacctttcaggacgagatggggttctctaacatggaagatgatggccctgaggaggaagagtgcgtggcagaacctcgccctaatttcaatacacctcaagctctgcggtttgaagaacccctggcgaacttgctcaatgagcagcatagaactgtgaaagaactgtttgaacaactgaagatgaagaaatcctctgctaagcagctgcaagaggtcgaaaaggtcaagcctcagtccgaaaaagtgcatcagacactgatcctggaccccgcccagcgcaagagactgcagcagcagatgcagcagaaggagctgggcacctttgcgcagtctagtattgccctgcatcaccaatacaatccaaagtttcagaccctgttccagccctgcaatctgatgggggccatgcagctaatcgaagatttttctacccacgtctctattgactgctcccctcacaaaaccgttaaaaagaccggacgccggcaaatgtgccagctctag

SEQ ID NO: 298380 - DNA, 726 bp, Artificial Sequence
  derived and/or modified sequence
atgtatgaccccaacacagcagatgatgaggactggaagatgtggctgggcggcctgatgaatgatgatgtgggcaatgaagatgaagcagatgatgatgatgatcctgagtacaacttcctggaggacctggatgagccagacacagaggacttcagaacagacagagctgtgcgcatcaccaagaaggaggtgaatgagctgatggaggagctgtttgagaccttccaggatgagatgggcttcagcaacatggaggatgatggccctgaggaggaggagtgtgtggccgagccccggcccaacttcaacaccccccaggccctgcgctttgaggagcccctggccaacctgctgaatgagcagcacaggacagtgaaggagctgtttgagcagctgaagatgaagaagagcagcgccaagcagctgcaggaggtggagaaggtgaagccccagagcgagaaggtgcaccagaccctcatcctggaccctgcccagaggaagaggctgcagcagcagatgcagcagaaggagctgggcacctttgcccagagcagcatcgccctgcaccaccagtacaaccccaagttccagaccctcttccagccctgcaacctgatgggcgccatgcagctgattgaggacttcagcacccacgtgtccattgactgcagcccccacaagacagtgaagaagacaggaagacggcagatgtgccagctgtag

SEQ ID NO: 298381 - DNA, 726 bp, Artificial Sequence
  derived and/or modified sequence
atgtacgaccccaacaccgccgacgacgaggactggaagatgtggctgggcggcctgatgaacgatgacgttggtaacgaagatgaagccgatgacgacgacgacccggaatataatttcttagaagatctcgatgagccagacacggaggacttccggacagacagggcagttcggatcactaaaaaggaagtaaacgagttgatggaggagttatttgagacctttcaagacgagatgggatttagcaatatggaggacgacggccctgaggaggaggagtgtgtggcagaaccgcgaccaaacttcaatacaccacaggctctgaggtttgaggaacctctggccaatctgttgaatgaacagcatcgcaccgtcaaagaattgttcgaacagttgaagatgaagaagagctcagccaagcagctgcaggaggtggagaaagtgaaaccacagagcgagaaagtccaccagaccctgattctggaccccgcacagcgcaagaggctacagcagcagatgcagcagaaagagcttgggacattcgcccagtctagcatcgctctacatcaccagtataatccgaaatttcagaccctgttccaaccttgcaatctgatgggagccatgcagttaatcgaggactttagcactcatgttagtattgactgctcccctcacaaaacagtaaagaagaccggaagacgccagatgtgccagctctag

SEQ ID NO: 298382 - DNA, 726 bp, Artificial Sequence
  derived and/or modified sequence
atgtatgaccctaatacagcagacgatgaagattggaagatgtggctcgggggactcatgaatgacgacgtcggcaacgaggatgaagcagatgatgatgacgaccctgagtacaactttctcgaggatcttgatgagcccgacacagaggacttccggacggaccgtgcagtgagaattacaaagaaggaagtaaatgagctgatggaggagctttttgaaacattccaagacgaaatgggctttagcaatatggaggacgacggtcctgaggaggaggaatgtgttgcagagcccagaccaaacttcaacactccacaggcattaagattcgaggaaccgctggccaacctgctaaatgaacagcataggactgtgaaagagctctttgagcagctgaaaatgaaaaaaagcagtgccaaacagttacaggaagtcgaaaaggtaaagccgcagtccgagaaggtccaccagactctgattctagatccagcccagagaaagcggctgcagcagcagatgcagcagaaagagctcggcacctttgcacagagttccatcgctttgcaccaccaatacaatcctaaatttcagaccctgttccagccatgtaatctgatgggcgcaatgcaactgatcgaggatttcagcactcatgtgagcatcgactgttcgcctcataagaccgtcaagaagaccggtagacgtcagatgtgccagctgtag

SEQ ID NO: 298383 - DNA, 2452 bp, Artificial Sequence
  derived and/or modified sequence
tggcgcatagtgttaggcgcatgctccttgatgcactgcggcgcggcgctccgaggctcggggacgcgcacgcaattcgctgttgttggctgacttccggtggtgccaaagccgtttccgtggaatcaggccggctgaatggaacaaaagtgggacttttaaaatgttgccctgtaagaagagaagaactacagtgacagagtccctacagcataaaggcaatcaagaggaaaacaacgtagacctagaatcagccgttaaaccagaatctgaccaggttaaggacttgagttcggtgtcactatcctgggatccaagtcatggcagagtagctggcttcgaagtacagtctttgcaggatgcaggaaatcagcttggtatggaggatacatctctgagctctggaatgctcacccagaacacaaatgtaccaattctagaaggtgttgatgtggccatctctcagggaatcaccctaccttccttggagtcttttcacccccttaatatacacattggtaaaggaaaactccacgctactggctcaaagagagggaaaaaaatgacactcaggcctgggccagttacccaagaagacagatgtgatcatcttaccctaaaggagcctttttcaggagagcctagtgaagaagtcaaggaagaaggagggaaacctcaaatgaattctgaaggggagataccttccctgccatcaggcagccaatctgcaaaaccagtaagccagcccaggaaatcaacccagccagatgtttgtgcctctcctcaagaaaagccactcaggactctgtttcaccaacctgaggaagagatagaagatggtggactcttcattccaatggaagaacaagacaatgaagaaagtgagaaaaggagaaaaaagaaaaagggtaccaagaggaaacgagatggaaggggtcaagaagggaccttggcatatgacctgaaactggatgacatgcttgaccgtaccttggaggatggtgccaagcagcacaatctaacagcagtcaatgtccgaaacatccttcatgaagtaatcacaaatgaacacgtggtagctatgatgaaagcagccatcagtgagacggaagatatgccaatgtttgagcctaaaatgacacgctctaaactgaaggaagtagtggaaaaaggagtggtaattccaacatggaatatttcaccaattaagaaggccaatgaaattaagcctcctcagtttgtggatatccaccttgaagaagatgattcctcagatgaagaataccagccggatgatgaagaagaagatgaaactgctgaagagagcttattggaaagtgatgttgaaagcactgcttcatctccacgtggggcaaagaaatccagattgaggcagtcttctgagatgactgaaacagatgaggagagtggcatattatcagaggctgagaaagtcaccacaccagccatcaggcacatcagtgctgaggtagtgcccatggggcccccgccccctccaaagccgaaacagaccagagatagtactttcatggagaagttacatgcggtagatgaggagctggcttccagtccagtctgcatggattctttccagcccatggatgacagtctcattgcatttcgaacgcgttctaagatgcccctgaaagatgttcccctgggccaattagaggcagagctccaagctccagacatcactccagatatgtatgaccccaatacggcagatgatgaggactggaagatgtggctggggggacttatgaatgatgatgtggggaatgaagatgaagcagatgatgatgatgatccagaatataatttcctggaagacctcgatgaaccagacacagaggatttccggactgaccgggcagtgagaatcaccaaaaaggaagtaaatgagctgatggaagagctgtttgaaactttccaagatgagatgggattctccaacatggaagatgatggcccagaagaggaggagtgtgtagctgagcctcgtcctaactttaacacccctcaagctctacggtttgaggaaccactggccaacctgttaaatgaacaacatcggacagtgaaggagctatttgaacagctgaagatgaagaaatcttcagccaaacagctgcaggaagtagagaaggttaaaccccagagtgagaaagttcatcagactctgattctggacccagcacagaggaagagactccagcagcagatgcagcagaaagagctgggaacctttgctcaaagctccatcgcccttcaccatcagtacaaccccaagtttcagaccctgttccaaccctgtaacttgatgggagctatgcagctgattgaagacttcagcacacatgtcagcattgactgcagccctcataaaactgtcaagaagactggtaggagacagatgtgtcagctttaa

SEQ ID NO: 298384 - DNA, 726 bp, Artificial Sequence
  derived and/or modified sequence
atgtacgaccccaacaccgccgacgacgaggactggaagatgtggctgggcggcctgatgaacgacgacgtgggcaacgaggacgaggccgacgacgacgacgaccccgagtacaacttcctggaggacctggacgagcccgacaccgaggacttcagaaccgacagagccgtgagaatcaccaagaaggaggtgaacgagctgatggaggagctgttcgagaccttccaggacgagatgggcttcagcaacatggaggacgacggccccgaggaggaggagtgcgtggccgagcccagacccaacttcaacaccccccaggccctgagattcgaggagcccctggccaacctgctgaacgagcagcacagaaccgtgaaggagctgttcgagcagctgaagatgaagaagagcagcgccaagcagctgcaggaggtggagaaggtgaagccccagagcgagaaggtgcaccagaccctgatcctggaccccgcccagagaaagagactgcagcagcagatgcagcagaaggagctgggcaccttcgcccagagcagcatcgccctgcaccaccagtacaaccccaagttccagaccctgttccagccctgcaacctgatgggcgccatgcagctgatcgaggacttcagcacccacgtgagcatcgactgcagcccccacaagaccgtgaagaagaccggcagaagacagatgtgccagctgtag

SEQ ID NO: 298385 - protein, 454 aa, Artificial Sequence
  derived and/or modified sequence
MGRTYIVEETVGQYLSNINLQGKAFVSGLLIGQCSSQKDYVILATRTPPKEEQSENLKHPKAKLDNLDEEWATEHACQVSRMLPGGLLVLGVFIITTLELANDFQNALRRLMFAVEKSINRKRLWNFTEEEVSERVTLHICASTKKIFCRTYDIHDPKSSARPADWKYQSGLSSSWLSLECTVHINIHIPLSATSVSYTLEKNTKNGLTRWAKEIENGVYLINGQVKDEDCDLLEGQKKSSRGNTQATSHSFDVRVLTQLLLNSDHRSTATVQICSGSVNLKGAVKCRAYIHSSKPKVKDAVQAVKRDILNTVADRCEMLFEDLLLNEIPEKKDSEKEFHVLPYRVFVPLPGSTVMLCDYKFDDESAEEIRDHFMEMLDHTIQIEDLEIAEETNTACMSSSMNSQASLDNTDDEQPKQPIKTTMLLKIQQNIGVIAAFTVAVLAAGISFHYFSD

SEQ ID NO: 298386 - protein, 335 aa, Artificial Sequence
  derived and/or modified sequence
MGRTYIVEETVGQYLSNINLQGKAFVSGLLIGQCSSQKDYVILATRTPPKEEQSENLKHPKAKLDNLDEEWATEHACQVSRMLPGGLLVLGVFIITTLELANDFQNALRRLMFAVEKSINRKRLWNFTEEEVSERVTLHICASTKKIFCRTYDIHDPKSSARPADWKYQSGLSSSWLSLECTVHINIHIPLSATSVSYTLEKNTKNGLTRWAKEIENGVYLINGQVKDEDCDLLEGQKKSSRGNTQATSHSFDVRVLTQLLLNSDHRSTATVQICSGSVNLKGAVKCRAYIHSSKPKVKDAVQAVKRDILNTVADRCEMLFEDLLLNEIPEKKDF

SEQ ID NO: 298387 - DNA, 3820 bp, Artificial Sequence
  derived and/or modified sequence
gatgaattcagtggcagtgaattgagaccggagggaatctggcccctagaggctggtacttgggcccgaaacccccatctccggcggagagaccgtccgaggtaattgtctgccacgagtgcacattctgaaaacaggagattttagttcctaaaaatgggaagaacctacattgtagaagagactgttggccagtatctttcaaacataaatctccaaggaaaggcttttgtctctggccttttaataggacagtgttcgtcacaaaaggattatgtgattcttgccactagaacgccacccaaagaggagcaaagtgagaacctcaaacatcccaaagctaagttggataacttggatgaagaatgggccacagaacatgcctgccaggtatccagaatgctaccagggggacttttagttcttggagtatttattattactactttagaactggcaaatgattttcaaaatgccctgcgtagactaatgtttgctgtggaaaagtctataaatagaaagagattgtggaatttcacagaggaggaagtctcagaacgagtgacacttcacatttgtgcttctacaaaaaaaatattttgtcgaacttatgatatccatgatccaaagagttcagcaagaccagcagattggaagtatcaaagtggattatcatcctcatggctttctttagagtgtacagttcacattaatattcacatcccactttctgctacttctgtcagctatactctggagaaaaatacaaagaatggacttacacgctgggccaaggaaatagaaaatggtgtttatttgattaatggacaagttaaagatgaagattgtgacctattagaaggacagaaaaaatcttctagaggaaatactcaagcaactagtcattcttttgatgtcagagtgctaacgcagttgctcctgaattcagaccacagatccacagccacagtccagatatgtagcggttctgtaaaccttaagggtgctgtgaaatgcagagcttatatccacagcagtaaacccaaagttaaagatgctgtgcaggcagtaaagagggatatattgaacacagttgctgatcgttgtgaaatgctatttgaggatctgcttttgaatgaaattccagaaaaaaaagattctgaaaaagagttccacgtcctcccttatcgagtctttgttccccttcctggatccactgtaatgttgtgtgattataaatttgacgatgagtcagctgaagaaatcagggaccattttatggagatgttggatcacacaattcaaatagaagatttggaaattgcagaggaaacaaacacagcttgtatgagttcttctatgaatagtcaagcttcattggacaacacagatgatgaacaaccaaaacaaccaattaaaactacaatgttattgaaaattcagcaaaacataggtgtgattgcagcatttacagttgcagtccttgctgcgggtatctcctttcattacttcagtgattagggtgaggcacaaagagtttcttgatcatccagagaacattgacagacaattatgaataataaagatgttaacaatccatctgtatttaaaacactagcagccagatctgctgccatgatgcctatttggtgtgtttctgattaaaatgaaatcacaagctgccttgtttagcctgctttacattgtaggtggcccgcatttccagaaataacgttatgcatctagatggaagctgcatgtaacaaatcattattatctatttttaaaagcttcaaaatgatgggatatgatcatagattttagtcttactaatctgaatcacatattaatcaggacattaaaaactttaacagaggcatgatggctcacacgtataatcctaatgctttgagaggctgaggtaggagcatcacctggggctgggagggagttggagaccagcctggatgacataatgagattctgtctctactggaaaaaaaaaaaattagctggacatggtggcaatcagctctagtcccaactacttggaggctgaagcaggaagatcacgtgagcccaggagtttgaggctgcagcgagctatgatcacatcactgtactccagcctgggtgacaaaatgagacattgtctctaaaatacataagtaaatttaaaaaaaaaagaataataatttgaacagtgaatgttgatgtaacatcttaataatagagcaccagaaaaatttctaccaaatgagacaacaactttaggataagttcatcctctaggagctttctaatgtgcactcagttcctgtatactgtgtgttttgttctgatcaaggggtagggaacctttccagagaagtcccattagtaagaaatgacataaaatacgtgctttctcaggttactgtataactgttataatatatttaatatataaaattaagacttttgcttccagcaagtatgttagactagatattataaaacaactagatcctgaataaaatctgcttttaataggttcactggaagtaggagaattttcaagaaccatacttcgacatttcctctgccacaaaaaatgaacgcattttaagttaggagtcatgaatactgtattgaccatacaagtggattatggttgtctggatggcagataccaatagcaacattgtcatatgcagtttgcctcaaatcagaaacaagaagacatcggaatctgagatgctgccctagagaggacagttaaagaaggttcagtggtcctcagtttgcagtgctctagctcctggcagaagcaagagggaaacattcctaatttagttccaagattcctacagattattatcaagtagtagtattttatgactagagatcacaggcacaagttgaaacaaactaacatgacaagaaagctatagaaaaaataaacattgaactcagttcttcaaggtttcatcaccaacataaggaatgaagttggaaccacaggcagatctgaaaaagaaccaaatagagctcctaaaaatgagaaatatttattgaaataagaaaaaagccctcagacatgttgaatattttattagactcagctgaagagacaagtgaactaaactataagctggatctaaagaaattacccagtgagcagtgaggagaaacaaggagctagaaaacattggaaagttaagagagttcgagggaagaattataaagactaggagtcctagaaagagaaaatttagagaataaaggagaggcagtacttgaaagataacacaattttacaaatttgttggaaaaacatgaattcataaattcaggaagcacaatatataccaaacatatatttaaataaaatccaggcctagactcaaggtattgtaaatgacaagataccaaatacaagattttaaaagcaaccatggggagaaaaagatcagtgaaagcaagacagtcaaatacttagtaggcttcctaacagcaacaatgtacccaaaagagggtagaattctgagaaaaactattagcttagaatttgcaacaagcgaaactgaaacaaacagatgctcagatgaaaaacagatgttatcctcagcacaaattcagtaaagagactacaaaaggatgatcttcaagaagggaaatgattctaaaaggattatctgaaattgaaaaactagtaagcaaataaatgataaacataagtaaatttaaactgttgtttgtataaaacaattataatgaagtgtttataagaaattgtaaacaaatgtaaaactaaataaacattgttatgcaacattaa

SEQ ID NO: 298388 - DNA, 1365 bp, Artificial Sequence
  derived and/or modified sequence
atgggcagaacctacatcgtggaggagaccgtgggccagtacctgagcaacatcaacctgcagggcaaggccttcgtgagcggcctgctgatcggccagtgcagcagccagaaggactacgtgatcctggccaccagaaccccccccaaggaggagcagagcgagaacctgaagcaccccaaggccaagctggacaacctggacgaggagtgggccaccgagcacgcctgccaggtgagcagaatgctgcccggcggcctgctggtgctgggcgtgttcatcatcaccaccctggagctggccaacgacttccagaacgccctgagaagactgatgttcgccgtggagaagagcatcaacagaaagagactgtggaacttcaccgaggaggaggtgagcgagagagtgaccctgcacatctgcgccagcaccaagaagatcttctgcagaacctacgacatccacgaccccaagagcagcgccagacccgccgactggaagtaccagagcggcctgagcagcagctggctgagcctggagtgcaccgtgcacatcaacatccacatccccctgagcgccaccagcgtgagctacaccctggagaagaacaccaagaacggcctgaccagatgggccaaggagatcgagaacggcgtgtacctgatcaacggccaggtgaaggacgaggactgcgacctgctggagggccagaagaagagcagcagaggcaacacccaggccaccagccacagcttcgacgtgagagtgctgacccagctgctgctgaacagcgaccacagaagcaccgccaccgtgcagatctgcagcggcagcgtgaacctgaagggcgccgtgaagtgcagagcctacatccacagcagcaagcccaaggtgaaggacgccgtgcaggccgtgaagagagacatcctgaacaccgtggccgacagatgcgagatgctgttcgaggacctgctgctgaacgagatccccgagaagaaggacagcgagaaggagttccacgtgctgccctacagagtgttcgtgcccctgcccggcagcaccgtgatgctgtgcgactacaagttcgacgacgagagcgccgaggagatcagagaccacttcatggagatgctggaccacaccatccagatcgaggacctggagatcgccgaggagaccaacaccgcctgcatgagcagcagcatgaacagccaggccagcctggacaacaccgacgacgagcagcccaagcagcccatcaagaccaccatgctgctgaagatccagcagaacatcggcgtgatcgccgccttcaccgtggccgtgctggccgccggcatcagcttccactacttcagcgactag

SEQ ID NO: 298389 - DNA, 1365 bp, Artificial Sequence
  derived and/or modified sequence
atgggccgcacatatattgtggaggagaccgttggacagtacctgtcaaacatcaatctccaggggaaggcctttgtttccggcctgcttattggccagtgcagcagccagaaagattatgtcattttggcaacacgcactccgccaaaagaagagcagtctgagaacttgaagcatccaaaggcgaaactggataacttggatgaagaatgggccactgagcatgcttgtcaggtcagtcgcatgcttcctgggggcctgctggtcctgggcgtgtttatcattactacactggaacttgcaaatgattttcaaaacgcgctgcgaaggctgatgtttgccgtggagaaaagtatcaaccgtaaaaggttatggaacttcaccgaggaggaggttagcgagagagtgactctgcacatttgcgcctcaactaagaagatattttgcagaacctatgacattcatgatcctaagagctctgcaaggcctgcggactggaagtatcagtcagggctgtcaagcagctggctgtccttagaatgcacagttcacattaatatccatatacccctatcagctacttccgttagttacacactggagaaaaatactaagaacggactgacaagatgggccaaagaaatcgagaatggtgtctatctgatcaacggccaggtaaaagatgaagattgtgatctcctggagggtcagaagaagtcgagcagagggaacacacaggccaccagtcacagctttgatgtgcgagtgttaactcagctgctacttaatagcgatcatcggtccaccgcaacggtccagatttgcagtgggagcgtgaacctgaagggcgccgtaaaatgcagggcctatatacatagttccaaacccaaggtgaaggatgccgttcaggccgtgaaacgtgacattcttaacactgtagcggacagatgcgagatgcttttcgaagatctgctgctcaatgagattccagaaaaaaaggactcagagaaagagtttcacgtgctaccataccgagtcttcgtaccactgcccggctcgactgtcatgttatgtgattataagttcgacgatgaatccgccgaggagatcagagaccactttatggaaatgctggaccatactatacagatcgaagaccttgagatcgccgaggaaaccaacaccgcttgtatgtcttcctctatgaacagccaggcatcccttgacaacactgatgatgagcagcccaagcagcccatcaaaaccacgatgctcctgaagatccaacaaaacattggggtgatcgctgccttcaccgttgctgtgcttgcggcgggtattagctttcattactttagcgactag

SEQ ID NO: 298390 - DNA, 1365 bp, Artificial Sequence
  derived and/or modified sequence
atgggccgcacctacatcgtggaggagaccgtgggccagtacctgagcaacatcaacctgcagggcaaggcctttgtgtctggcctgctgattggccagtgcagcagccagaaggactatgtgatcctggccaccaggaccccacccaaggaggagcagagcgagaacctgaagcaccccaaggccaagctggacaacctggatgaggagtgggccacagaacatgcctgccaggtgtccaggatgctgcccggcggcctgctggtgctgggcgtcttcatcatcaccaccctggagctggccaatgacttccagaatgccctgcggcggctgatgtttgctgtggagaagagcatcaacaggaagaggctgtggaacttcacagaggaggaggtgtctgagcgggtgaccctgcacatctgtgccagcaccaagaagatcttctgcaggacctatgacatccatgaccccaagagcagcgcccggcctgctgactggaagtaccagagcggcctgagcagctcctggctgagcctggagtgcaccgtgcacatcaacatccacatccccctgagcgccacctctgtgtcctacaccctggagaagaacaccaagaatggcctgacccgctgggccaaggagattgaaaatggagtgtacctgatcaatggccaggtgaaggatgaggactgtgacctgctggagggccagaagaagagcagccggggcaacacccaggccaccagccacagctttgatgtgcgggtgctgacccagctgctgctgaacagcgaccacaggagcacagccaccgtgcagatctgcagcggctctgtgaacctgaagggagctgtgaagtgccgggcctacatccacagcagcaagcccaaggtgaaggatgctgtgcaggccgtgaagagggacatcctgaacacagtggccgacagatgtgagatgctgtttgaggacctgctgctgaatgagatccctgagaagaaggacagcgagaaggagttccacgtgctgccctacagagtgtttgtgcccctgcccggcagcacagtgatgctgtgtgactacaagtttgatgatgagagcgctgaggagatccgggaccacttcatggagatgctggaccacaccatccagatcgaggacctggagattgctgaggagaccaacacagcctgcatgagcagctccatgaacagccaggccagcctggacaacacagatgatgagcagcccaagcagcccatcaagaccaccatgctgctgaagatccagcagaacatcggcgtgattgctgccttcaccgtggccgtgctggccgccggcatctccttccactacttcagtgactag

SEQ ID NO: 298391 - DNA, 1365 bp, Artificial Sequence
  derived and/or modified sequence
atgggccggacctacatcgtggaggagaccgtgggccagtacctgtcgaacattaacctccagggtaaagcctttgtgagcgggctgctcattggacagtgctcgtcccagaaggactacgtgatcctagccactaggacaccccctaaggaagagcagtccgaaaatttgaaacacccaaaagccaagctggacaacctagacgaggagtgggcaacagaacacgcgtgtcaggtttcacggatgttgcccggaggactgctcgttctaggcgtgttcatcatcactactttagagctagccaacgacttccaaaacgcactaagacggctcatgttcgccgttgagaaatctatcaaccgcaaacgcctctggaactttaccgaggaggaggtcagcgagagggtaactctccacatctgtgcctctactaagaaaattttttgccgcacttacgacatacacgatcctaagtccagcgcacgccccgcggattggaaatatcaaagtggactcagcagttcctggctgtcacttgagtgcaccgtgcacattaacatccatatcccgctgtccgctacctccgtgtcttacaccctggaaaaaaatacaaagaacgggctcacccgttgggctaaagaaattgagaacggcgtctatcttatcaacgggcaggtcaaggacgaagattgtgacctgcttgagggtcagaagaagagctctcgagggaacacccaagccacctcgcattctttcgatgtgagggtgcttacgcagctgctgctcaattccgaccaccggtcgactgcaactgtgcagatctgtagtggatccgtgaatctgaagggggccgtgaagtgtcgcgcatacattcattcctccaaaccaaaggtcaaggatgctgtccaggcagtgaaacgggatattctgaatacagtcgccgatcgctgcgaaatgcttttcgaggacctgctgcttaatgagatccctgagaagaaggattccgagaaggagtttcacgtccttccatatagggtatttgtgcctctgcccggatcaaccgtgatgctctgtgactacaaattcgatgacgaatccgcagaggagattagagaccattttatggagatgctcgaccacacaatacagatcgaagacctagagattgccgaggaaactaacactgcatgtatgtcctcatcaatgaatagccaggctagtctcgataatacagacgatgagcaaccaaagcagcccatcaagactaccatgctgctgaagattcagcagaatataggagtgatcgctgcatttactgtagcggtgctggccgctggcatatcgttccattatttttccgattag

SEQ ID NO: 298392 - DNA, 1365 bp, Artificial Sequence
  derived and/or modified sequence
atgggcaggacctacattgtagaggaaaccgttggccaatacttaagcaacatcaacctacaaggcaaagctttcgtgagtgggctcctcatcggacaatgcagttcgcaaaaggactatgtgatccttgccacacgcacaccccctaaagaggaacagtccgagaacctcaagcatcccaaagcaaaactcgataacctggatgaagagtgggctacggagcacgcctgtcaggtgtccaggatgcttccaggtggcctgctggtcctgggtgtattcattattacaacccttgagctggccaacgatttccagaatgcactgaggcgtctaatgtttgcagtcgagaaaagtattaatagaaaacggctgtggaactttaccgaagaagaagtatctgagcgagtcaccctccatatttgcgcttccacgaagaaaatcttttgtagaacatacgacattcatgatcctaagtcatctgctcgtccagctgactggaagtatcagtccgggctatcctcttcttggctaagtctggagtgcacagtccacattaatattcacatcccactgtccgcgacaagtgtgagctacaccctagagaagaacacgaagaatggcctaacacgctgggccaaagagatagagaatggcgtttacctcatcaacggccaggttaaggatgaggattgcgacctgctggagggacaaaagaagtcttccagaggtaacacccaggcgacaagccacagctttgacgttagagtgctgacgcagcttctgctaaacagtgaccacagatctaccgctacggtccagatatgttcagggagcgtaaaccttaagggcgctgtaaaatgcagagcctacatacactcaagcaaacctaaggtgaaagacgccgtacaggccgtcaagcgcgatatactgaatacggttgcagaccgttgcgaaatgctgttcgaagatcttctgctgaacgaaattccggaaaagaaagattcagaaaaagaattccacgtgctcccctacagagtgttcgtgcccctccctggcagcaccgtgatgctgtgcgactataaattcgacgatgagtcagccgaagagatccgggatcattttatggaaatgttggaccatactatccagatagaggatctggagatcgcagaagagacgaatacagcttgcatgtcgtcctctatgaattcacaggccagcctggacaacaccgatgatgagcagcccaagcagcccattaagacaaccatgttactgaagatacaacagaatatcggcgtaattgcagcattcactgtcgctgtgctggccgctggtatctcttttcattacttttctgattag

SEQ ID NO: 298393 - DNA, 1241 bp, Artificial Sequence
  derived and/or modified sequence
cgtcatcaatctgcgccacctgactcccaagtccctggctttggagtgggaagtgaggtgtgggaagtaggtcgctttctgatgaattcagtggcagtgaattgagaccggagggaatctggcccctagaggctggtacttgggcccgaaacccccatctccggcggagagaccgtccgaggtaattgtctgccacgagtgcacattctgaaaacaggagattttagttcctaaaaatgggaagaacctacattgtagaagagactgttggccagtatctttcaaacataaatctccaaggaaaggcttttgtctctggccttttaataggacagtgttcgtcacaaaaggattatgtgattcttgccactagaacgccacccaaagaggagcaaagtgagaacctcaaacatcccaaagctaagttggataacttggatgaagaatgggccacagaacatgcctgccaggtatccagaatgctaccagggggacttttagttcttggagtatttattattactactttagaactggcaaatgattttcaaaatgccctgcgtagactaatgtttgctgtggaaaagtctataaatagaaagagattgtggaatttcacagaggaggaagtctcagaacgagtgacacttcacatttgtgcttctacaaaaaaaatattttgtcgaacttatgatatccatgatccaaagagttcagcaagaccagcagattggaagtatcaaagtggattatcatcctcatggctttctttagagtgtacagttcacattaatattcacatcccactttctgctacttctgtcagctatactctggagaaaaatacaaagaatggacttacacgctgggccaaggaaatagaaaatggtgtttatttgattaatggacaagttaaagatgaagattgtgacctattagaaggacagaaaaaatcttctagaggaaatactcaagcaactagtcattcttttgatgtcagagtgctaacgcagttgctcctgaattcagaccacagatccacagccacagtccagatatgtagcggttctgtaaaccttaagggtgctgtgaaatgcagagcttatatccacagcagtaaacccaaagttaaagatgctgtgcaggcagtaaagagggatatattgaacacagttgctgatcgttgtgaaatgctatttgaggatctgcttttgaatgaaattccagaaaaaaaagatttt

SEQ ID NO: 298394 - DNA, 1008 bp, Artificial Sequence
  derived and/or modified sequence
atgggcagaacctacatcgtggaggagaccgtgggccagtacctgagcaacatcaacctgcagggcaaggccttcgtgagcggcctgctgatcggccagtgcagcagccagaaggactacgtgatcctggccaccagaaccccccccaaggaggagcagagcgagaacctgaagcaccccaaggccaagctggacaacctggacgaggagtgggccaccgagcacgcctgccaggtgagcagaatgctgcccggcggcctgctggtgctgggcgtgttcatcatcaccaccctggagctggccaacgacttccagaacgccctgagaagactgatgttcgccgtggagaagagcatcaacagaaagagactgtggaacttcaccgaggaggaggtgagcgagagagtgaccctgcacatctgcgccagcaccaagaagatcttctgcagaacctacgacatccacgaccccaagagcagcgccagacccgccgactggaagtaccagagcggcctgagcagcagctggctgagcctggagtgcaccgtgcacatcaacatccacatccccctgagcgccaccagcgtgagctacaccctggagaagaacaccaagaacggcctgaccagatgggccaaggagatcgagaacggcgtgtacctgatcaacggccaggtgaaggacgaggactgcgacctgctggagggccagaagaagagcagcagaggcaacacccaggccaccagccacagcttcgacgtgagagtgctgacccagctgctgctgaacagcgaccacagaagcaccgccaccgtgcagatctgcagcggcagcgtgaacctgaagggcgccgtgaagtgcagagcctacatccacagcagcaagcccaaggtgaaggacgccgtgcaggccgtgaagagagacatcctgaacaccgtggccgacagatgcgagatgctgttcgaggacctgctgctgaacgagatccccgagaagaaggacttctag

SEQ ID NO: 298395 - DNA, 1008 bp, Artificial Sequence
  derived and/or modified sequence
atgggccgaacctacatagtggaggaaaccgtggggcagtacctgagtaacatcaatctgcagggtaaggcatttgtttctggtttactaattgggcaatgcagcagccaaaaagactacgtcatcctggcaacccgcaccccgcccaaggaagaacagagtgaaaatttgaagcacccaaaagcaaaacttgataacctggacgaggagtgggctacagagcacgcgtgccaggtgagtagaatgctccccggcgggctgctcgtgcttggcgtcttcattattaccaccctggaactggcaaatgattttcaaaatgccctgcgccgcctgatgtttgctgttgaaaagtccatcaacaggaagagactttggaactttacagaagaagaagtctccgaaagagttaccctccatatatgcgctagcactaagaagatcttctgccggacctacgacattcacgaccctaagagctctgcaaggccagctgactggaagtatcaaagtgggctgtccagttcttggctaagtctagaatgcacggtgcatatcaacatacacattcctctgtctgcaacctcagtgtcttataccctggaaaagaacactaagaacgggctgacaaggtgggcaaaggaaatagaaaacggggtttatttaataaatggccaggtgaaggacgaagactgcgacctactagaaggacaaaaaaagtcgagtcgcggaaacacacaggctacttcacattcctttgacgtgagggtgctgacgcagctattgttaaatagcgaccatagaagcacggctactgtacaaatctgttccggctcagtaaatctgaagggagccgttaagtgtagggcctatatccactcgtccaagccaaaggtgaaagacgcagtgcaagcggttaaacgtgatatcttaaacacagtggctgatagatgcgaaatgctgttcgaagatctgttgctcaatgagatacccgagaagaaggacttctag

SEQ ID NO: 298396 - DNA, 1008 bp, Artificial Sequence
  derived and/or modified sequence
atgggccgcacctacatcgtggaggagaccgtgggccagtacctgagcaacatcaacctgcagggcaaggcctttgtgtctggcctgctgattggccagtgcagcagccagaaggactatgtgatcctggccaccaggaccccacccaaggaggagcagagcgagaacctgaagcaccccaaggccaagctggacaacctggatgaggagtgggccacagaacatgcctgccaggtgtccaggatgctgcccggcggcctgctggtgctgggcgtcttcatcatcaccaccctggagctggccaatgacttccagaatgccctgcggcggctgatgtttgctgtggagaagagcatcaacaggaagaggctgtggaacttcacagaggaggaggtgtctgagcgggtgaccctgcacatctgtgccagcaccaagaagatcttctgcaggacctatgacatccatgaccccaagagcagcgcccggcctgctgactggaagtaccagagcggcctgagcagctcctggctgagcctggagtgcaccgtgcacatcaacatccacatccccctgagcgccacctctgtgtcctacaccctggagaagaacaccaagaatggcctgacccgctgggccaaggagattgaaaatggagtgtacctgatcaatggccaggtgaaggatgaggactgtgacctgctggagggccagaagaagagcagccggggcaacacccaggccaccagccacagctttgatgtgcgggtgctgacccagctgctgctgaacagcgaccacaggagcacagccaccgtgcagatctgcagcggctctgtgaacctgaagggagctgtgaagtgccgggcctacatccacagcagcaagcccaaggtgaaggatgctgtgcaggccgtgaagagggacatcctgaacacagtggccgacagatgtgagatgctgtttgaggacctgctgctgaatgagatccctgagaagaaggacttctag

SEQ ID NO: 298397 - DNA, 1008 bp, Artificial Sequence
  derived and/or modified sequence
atgggccggacctacatcgtggaggagaccgtgggccagtacctgagtaatataaatctgcagggcaaagccttcgtctcgggtctcctcattggccagtgcagcagccaaaaagactatgtcatcctcgccaccagaaccccacccaaggaggagcagtccgaaaatctgaaacatcctaaggcaaagctggataatttagacgaggaatgggctacagagcacgcctgtcaggtgagccggatgctgccaggaggactcctagttctcggggtgttcatcataaccacactggagctggccaatgacttccaaaatgcactaaggcgactaatgtttgccgtagaaaaaagtattaaccggaaaagactgtggaatttcaccgaggaagaggtatctgaacgagtgacactgcacatctgcgcatccacaaaaaagatattctgccgcacttatgatattcacgacccaaagtcctcagctagacctgccgactggaagtatcagtccggcctgagctcttcttggctgagcctggaatgcactgtccacatcaatattcatattccgctgtccgccacatctgtgagttatacactcgagaagaacactaagaatggtctgacgaggtgggcaaaggaaatcgagaatggcgtgtatctgattaatggacaggtaaaagacgaggactgtgacctgctggaaggccagaaaaaaagctctcgcggaaatacccaagcgaccagccactcattcgatgtaagagtcttaacacagttgctattaaactctgatcacagaagcaccgccacagtgcagatctgcagcggctctgttaacttgaaaggcgcagtgaagtgccgggcgtatatccactcgtcaaaaccaaaagtaaaggacgctgttcaggctgtcaaacgggatatacttaataccgtcgcggatcgatgtgagatgttgtttgaggatttgctgcttaacgaaatccctgagaagaaagacttttag

SEQ ID NO: 298398 - DNA, 1008 bp, Artificial Sequence
  derived and/or modified sequence
atggggcgtacctacattgtggaggaaaccgtcggccagtacctctctaatatcaacctgcagggcaaggcctttgtctcagggctcttaattgggcaatgtagctcacagaaagactacgtgatcctcgctacgaggacccccccaaaggaggagcagtcagagaatctgaaacatccaaaagccaagctcgataatctggacgaggaatgggccaccgaacacgcctgtcaggtgagtagaatgcttccagggggactgctcgtgctgggagtattcataatcacaaccctcgagcttgcgaacgatttccaaaacgcactccgcaggttgatgtttgctgtggagaagtcaatcaaccgaaagcgcctctggaactttacagaagaagaggttagcgaacgagtaaccctgcatatatgtgcctccaccaaaaagattttttgtagaacatacgacatccacgatccaaaatcctccgccagaccggctgactggaaatatcagagcgggcttagctcctcatggttgtctctggagtgtacggttcatatcaacatccatatccccttaagtgcaactagcgtgagttacacactggaaaagaacaccaaaaatggactcacacggtgggcaaaagaaattgagaatggcgtttatttgatcaacggacaagtgaaggatgaggactgtgatcttctggaaggccagaaaaagagctcccgcggaaatactcaggcaacatcacactcctttgacgtgagagttcttacccagttacttttgaactcagaccatcgcagcacagctacagtgcagatctgcagcgggtcagttaacctgaagggagccgtcaaatgccgtgcctatattcactccagcaagccgaaagtgaaagatgcagtgcaggccgtgaaaagagatattctgaataccgtggccgatcggtgtgagatgctttttgaagaccttctcttaaacgaaatacctgaaaaaaaggatttctag

SEQ ID NO: 298399 - protein, 238 aa, Artificial Sequence
  derived and/or modified sequence
MGRTVVVLGGGISGLAASYHLSRAPCPPKVVLVESSERLGGWIRSVRGPNGAIFELGPRGIRPAGALGARTLLLGFGHLVPSSEDPGVLGIVYDSVAFPEQDGSPPGLRVTVMLGGSWLQTLEASGCVLSQELFQQRAQEAAATQLGLKEMPSHCLVHLHKTKNQLKWRQSHDRTVEWPKEYPGRSRKQAPSILHVPGCQLLRCRDRDHLGAVSEQPRSSAESRVGVASSTFSTFPLF

SEQ ID NO: 298400 - DNA, 717 bp, Artificial Sequence
  derived and/or modified sequence
atggggcgaaccgtcgttgtattaggaggcggaatctcagggctggccgcgtcttatcatcttagcagagccccatgccctccgaaagttgtgctcgtggagtcttccgagaggcttggcggctggatccggagcgtgcgaggccctaatggagccatttttgagctcggcccgaggggcatacggcccgcaggtgccctcggcgcccgtaccctcttgctggggttcggacacctggtccctagttcagaggatcccggagtgctgggcattgtgtatgacagcgtggctttccctgaacaggacggcagcccgccaggtctgcgagttaccgtaatgcttggaggaagctggctgcaaacactggaggcctcgggatgtgtcctgtcccaggaactgtttcagcagagggcgcaggaggccgcagccacacagctcgggctcaaagagatgccctcgcactgtctggtccacctccacaaaaccaagaaccagctcaagtggcggcaatctcacgatcgaacggtggagtggccgaaggagtatccaggccggagcaggaagcaggcgccatccatactgcacgtgccaggatgtcagttactccggtgtcgggatagagaccatttaggagccgtcagtgagcagccccgctcttcagcagaatcccgagtaggagtggcctcgtccacgtttagcactttccccctcttttag

SEQ ID NO: 298401 - DNA, 717 bp, Artificial Sequence
  derived and/or modified sequence
atgggccgcacagtggtggtgctgggcggcggcatcagcggcctggccgccagctaccacctgagccgggccccctgcccccccaaggtggtgctggtggagagcagcgagcggctgggcggctggatccgctctgtgcggggccccaacggggccatctttgagctgggcccccggggcatccggcctgctggggccctgggcgcccggaccctgctgctgggcttcggccacctggtgcccagcagcgaggaccccggggtgctgggcatcgtgtatgattctgtggccttccctgagcaggacggcagccccccaggcctgcgggtgacagtgatgctgggcggctcctggctgcagaccctggaggccagcggctgtgtgctgagccaggagctgttccagcagagggcccaggaggccgccgccacccagctgggcctgaaggagatgcccagccactgcctggtgcacctgcacaagaccaagaaccagctgaagtggaggcagagccatgacagaacagtggagtggcccaaggagtacccaggccgcagcaggaagcaggcccccagcatcctgcacgtgcccggctgccagctgctgcgctgccgggaccgggaccacctgggcgctgtgtctgagcagcccaggagcagcgctgagagccgggtgggcgtggccagcagcaccttcagcaccttccccctcttctag

SEQ ID NO: 298402 - DNA, 717 bp, Artificial Sequence
  derived and/or modified sequence
atgggccggaccgtggtggtgctgggcggcggcatcagcggcctggccgcttcttatcatttgagtagagctccgtgtcctcccaaggtagtcctcgtggagtctagtgagcgtctgggaggctggattaggtctgtgcggggaccgaacggcgcaatatttgagctgggacctagggggatcaggccggcaggggctctcggtgctagaacgctactgcttggatttgggcatctggtcccaagttctgaagatcccggagttttaggaatcgtgtatgatagtgtggcgtttcccgagcaagacgggagccctccagggctacgggtgacagtcatgctgggagggagctggctgcagactctggaggcctctgggtgtgtattatcacaggagttgttccagcagcgggcacaggaagctgccgcgactcaactgggtcttaaagagatgcctagccattgtctcgtgcacctgcataaaacaaaaaatcagcttaaatggaggcagtcccacgataggacagtggaatggccaaaagaataccctgggaggtctcggaaacaggccccatccatcttgcatgtgccagggtgtcagttgcttagatgtagggaccgagatcaccttggggccgtttccgaacaaccaaggtcctccgccgagagccgcgtgggtgtggcgagtagcacttttagcacctttcctctgttttag

SEQ ID NO: 298403 - DNA, 717 bp, Artificial Sequence
  derived and/or modified sequence
atgggcagaaccgtggtagtgctgggcggagggataagtggactggcggcatcataccacttgagtcgggctccttgccctcctaaagttgtattggtggaaagctctgagagattgggaggttggatccggagcgtgcgtggtcccaacggggctatcttcgagctgggcccacgaggaattaggcccgctggtgcacttggcgctagaactctcttactaggtttcgggcatctggtgccttctagcgaggacccaggtgtcttggggatagtgtacgatagcgtggctttcccggagcaggacggatccccacccggattacgagttacggtcatgttgggcggttcttggctccagactttagaggcctcaggctgcgtgctgtcccaagagctattccagcaaagagcccaggaggccgcagctacacaattaggcctgaaggagatgcctagccactgcttggtacacctgcataagactaagaatcagctgaagtggagacaatcacacgaccgaactgtggagtggcctaaggagtaccccggtcgctcacggaagcaggcaccctctattctccacgtacctggttgccagctcctgcgctgtcgtgaccgtgatcatctgggtgcggtctcggaacagccaaggagctcagctgaatcgcgtgtcggagtggccagtagtaccttcagtacattccctctgttctag

SEQ ID NO: 298404 - DNA, 922 bp, Artificial Sequence
  derived and/or modified sequence
agagcacctcagaactcaggcgtactgcccgccgcccgagccctgcgagggccgatagcgagggtgtggcccttatctgcacccagcagagcgccggcggggtacggtcttaggacctcgatctccttctccctcattttctctcatccctacctattgtgggtttccgcatgggccggaccgtggtcgtgctgggcggaggcatcagcggcttggccgccagttaccacctgagccgggccccctgcccccctaaggtggtcctagtggagagcagtgagcgtctgggaggctggattcgctccgttcgaggccctaatggtgctatctttgagcttggacctcggggaattaggccagcgggagccctaggggcccggaccttgctcctgggatttggacatttggtgccatcttcagaagatccaggagtcctgggaatcgtgtatgactcagttgctttccctgagcaggacgggagcccccctggcctcagagtgactgtgatgctgggaggttcctggttacagacactggaggctagtggctgtgtcttatctcaggagctgtttcaacagcgggcccaggaagcagctgctacacaattaggactgaaggagatgccgagccactgcttggtccatctacacaagaccaagaaccagttgaagtggcgacagagtcatgacaggaccgtggagtggcctaaggagtacccagggcgaagtaggaaacaggctccttctattcttcatgtgcctgggtgccaactcctcaggtgcagggaccgtgaccacctgggggctgtaagcgaacagccccggagctcggcggagagtagggtgggggtggcgtcctctaccttttctacctttcccctcttctagcgggggtggggaggagggttactgctgaagagaaa

SEQ ID NO: 298405 - DNA, 717 bp, Artificial Sequence
  derived and/or modified sequence
atgggcagaaccgtggtggtgctgggcggcggcatcagcggcctggccgccagctaccacctgagcagagccccctgcccccccaaggtggtgctggtggagagcagcgagagactgggcggctggatcagaagcgtgagaggccccaacggcgccatcttcgagctgggccccagaggcatcagacccgccggcgccctgggcgccagaaccctgctgctgggcttcggccacctggtgcccagcagcgaggaccccggcgtgctgggcatcgtgtacgacagcgtggccttccccgagcaggacggcagcccccccggcctgagagtgaccgtgatgctgggcggcagctggctgcagaccctggaggccagcggctgcgtgctgagccaggagctgttccagcagagagcccaggaggccgccgccacccagctgggcctgaaggagatgcccagccactgcctggtgcacctgcacaagaccaagaaccagctgaagtggagacagagccacgacagaaccgtggagtggcccaaggagtaccccggcagaagcagaaagcaggcccccagcatcctgcacgtgcccggctgccagctgctgagatgcagagacagagaccacctgggcgccgtgagcgagcagcccagaagcagcgccgagagcagagtgggcgtggccagcagcaccttcagcaccttccccctgttctag

SEQ ID NO: 298406 - DNA, 1434 bp, Artificial Sequence
  derived and/or modified sequence
atggggcgtactgtggtggtgctgggaggagggatttccgggttagcagcctcataccacctgagccgtgccccttgccctcccaaagtcgtcctggtggagagttccgagcgactggggggctggattagaagcgtacgcggaccaaacggagccatattcgaactcggtccacggggaatcagacctgctggagccctgggcgccaggactctgcttctagtctctgagctgggactggattctgaggtcctgcctgtccggggtgaccatccagctgcacagaaccggtttctctacgtgggcggcgctttgcatgccctgccaactggcttacggggcctgctgcgcccgagccctcctttctctaagcccttgttttgggcaggcctgagggaactgactaagcccagaggcaaggagccggacgagaccgttcactctttcgcacagcggaggcttggcccagaagtcgcaagtctggccatggattccctgtgtcgaggcgtgtttgcaggaaactccagggagcttagcatccgttcctgtttccccagtcttttccaggctgaacagacacatagatctattctattaggactcttactgggtgcaggcagaaccccacagccagacagtgctctaattcgacaagccctcgcagagcggtggagccagtggtctctcaggggtggtctggagatgcttccccaagccttggagacccatttgactagcaggggagtctcggtgctcagaggtcaaccggtgtgtggcctgtcactgcaggcagagggtaggtggaaagtgagtctgcgtgactcctcacttgaagccgatcatgtcatcagcgcaattccagcatctgtgctgtccgagctgctgccagctgaagcagctccactggccagggcactgtccgccatcactgccgtgtcggtggcagtagttaacttgcaataccaaggtgcccatttaccagtgcaaggttttggacacctggttccaagttctgaggacccgggggtcctgggtatcgtgtatgactctgtggcattcccagaacaggacggcagtccacccggactaagagtgactgtgatgctgggggggtcttggttgcagacactcgaagctagcgggtgcgtgctgtcacaggaactgttccagcagcgcgcgcaggaggcggctgcgacacagctaggcttaaaggaaatgccctcacactgcctggttcacctacataagaactgcatcccccaatacaccctcgggcactggcagaaattagagagtgctcgtcaattcctcaccgcccaccggctacctcttaccttggccggcgctagctatgagggggtggcagtgaacgattgcatcgaatctgggcgccaggccgccgtctccgtcttagggacagaacctaatagttag

SEQ ID NO: 298407 - DNA, 1434 bp, Artificial Sequence
  derived and/or modified sequence
atgggccgcacggttgttgtcctaggggggggtatttctgggctggcagccagctatcacctgtcacgggccccgtgcccgcctaaagtcgtgctcgtagaatcctccgagagactgggcggatggattagaagtgtgaggggtcccaacggcgcaatctttgaactgggaccaaggggcataaggccagccggggctctgggcgcaaggacattattgctggttagcgagctgggactcgattccgaggtgttacctgtgcggggcgatcatccagcggctcagaatcggtttttatacgttggaggcgcgcttcatgctttgccaaccggcctgcgaggactgctgagaccctccccacccttctctaaacctttattctgggcaggtctcagggagttgaccaagccacgcggcaaagaacccgacgaaactgtgcactcttttgctcagcgacgactgggtccggaagtggcctccttggccatggacagtctttgccgaggcgtgtttgccggtaacagccgggagctgagcatccggtcatgcttcccatcactcttccaagctgaacagacacatcgctctatcctgttgggactgcttttgggcgccgggcgcactccacaaccagactccgctctgattcggcaagccctagctgagcgctggtctcagtggtccctgcggggaggactagagatgctcccacaagccctcgagacccacctcaccagtagaggagtgtcagtgctgcgaggccaacctgtctgtggcctgtcgctacaggccgaaggccgctggaaagtgagtctcagggatagctctcttgaagccgatcatgtcattagtgcgattcccgcaagcgtgctatccgagctgttaccagctgaggctgccccactggccagagcgctgagcgcgattactgccgtttccgtggcggtcgtgaatctgcagtatcaaggcgcccaccttccagtccaaggctttgggcacttggtgcccagcagcgaagatcccggtgtcttaggaattgtgtatgattctgtggccttcccagaacaggacggatctccgcccgggctgagggtcacggtaatgttaggcggtagctggttgcagacccttgaggctagcgggtgtgtcctgtcacaggagttgtttcagcagagggctcaggaagcagctgccacccaacttgggctaaaagaaatgccatcacactgtttggtccacctgcataagaattgtatcccccaatataccctcggacattggcagaagctggaaagcgccagacagtttctgacagcccatagacttcccctgaccctcgccggagcgagctatgaaggagtggcagttaatgactgtatcgagagcgggcggcaagcagcagtcagtgtgctcggaacagaaccaaattcctag

SEQ ID NO: 298408 - DNA, 1434 bp, Artificial Sequence
  derived and/or modified sequence
atgggccgcacagtggtggtgctgggcggcggcatcagcggcctggccgccagctaccacctgagccgggccccctgcccccccaaggtggtgctggtggagagcagcgagcggctgggcggctggatccgctctgtgcggggccccaacggggccatctttgagctgggcccccggggcatccggcctgctggggccctgggcgcccggaccctgctgctggtgtctgagctgggcctggacagcgaggtgctgcctgtgcggggggaccaccctgctgcccagaaccgcttcctgtatgtgggcggggccctgcacgccctgcccaccggcctgcggggcctgctgcggcccagcccccccttcagcaagcccctcttctgggccggcctgcgggagctgaccaagccccggggcaaggagccagatgaaacagtgcacagctttgcccagaggcggctgggccctgaggtggccagcctggccatggacagcctgtgccggggcgtgtttgctggcaacagccgggagctgagcatccgcagctgcttccccagcctcttccaggccgagcagacccacaggagcatcctgctgggcctgctgctgggcgccggccgcaccccccagccagattctgccctgatccggcaggccctggccgagcgctggagccagtggagcctgcggggcggcctggagatgctgccccaggccctggagacccacctgaccagccggggcgtgtctgtgctgcggggccagcctgtgtgtggcctgagcctgcaggccgagggccgctggaaggtgtccctgcgggacagcagcctggaggccgaccacgtgatcagcgccatcccagcctctgtgctgtctgagctgctgcctgctgaggccgcccccctggcccgggccctgagcgccatcacagctgtgtctgtggccgtggtgaacctgcagtaccagggcgcccacctgcctgtgcagggcttcggccacctggtgcccagcagtgaagatcctggggtgctgggcatcgtgtatgacagcgtggccttccctgagcaggacggcagccccccaggcctgcgggtgacagtgatgctgggcggctcctggctgcagaccctggaggccagcggctgtgtgctgagccaggagctgttccagcagagggcccaggaggccgccgccacccagctgggcctgaaggagatgcccagccactgcctggtgcacctgcacaagaactgcatcccccagtacaccctgggccactggcagaagctggagagcgcccggcagttcctgacagcccaccggctgcccctgaccctggccggggccagctatgaaggagtggccgtgaatgactgcatcgagagcggccggcaggccgctgtgtctgtgctgggcacagagcccaacagctag

SEQ ID NO: 298409 - DNA, 1434 bp, Artificial Sequence
  derived and/or modified sequence
atgggccggaccgtggtggtgctgggcggcggcatcagcggcctggctgctagctatcacctgagccgcgctccctgtccccctaaagtcgttctcgtggaatcttccgagcgcctcggcggttggatcagatccgtgcggggacctaacggcgccatatttgagttgggcccccgcggaatccgaccggctggggctctcggagcccgaaccctgctgctagtgtctgaactcgggctggactccgaagtgttaccggtacgaggagaccacccagccgctcaaaatcgattcctgtacgtcggcggggccctgcacgccctgcccacagggcttcggggcctactccgccctagcccgccattctcgaaaccactgttctgggccggtttgcgggaactgaccaaaccacgcgggaaggaacccgatgagacagtgcactcctttgcccagcgccggctcggccccgaggtggcctcactggctatggatagtctctgtcgcggggtgtttgctggaaatagcagagagctgagcatcaggagctgctttccatcactctttcaggctgagcagacacaccgctcaatccttttggggctactgctgggcgccggccggactcctcagcctgacagcgctctcatcaggcaggctctggctgagcgttggtcgcaatggtctttgcgtggcggcctggaaatgctgccacaggctcttgaaacccacctgacttcgaggggcgtctctgttctgaggggccagcctgtctgtggattatctcttcaagcagagggccgttggaaggtttccttgcgagattcatcccttgaagccgaccacgtgatctcggcgataccagcgagcgtgctcagcgaactgctccctgccgaggctgctccgctggctcgagccctgagcgcgattaccgctgtgagtgtggcagtagtgaatctacagtatcagggagctcacctgcctgtccagggttttggacacctcgtgccatcgtccgaggacccaggcgtgctcgggatcgtttatgacagcgtggccttccccgagcaggatggcagcccacccggccttcgagtgaccgtcatgctcgggggcagttggttgcaaaccctggaagcctcaggatgtgttctatcacaggaactgttccaacagagggcccaagaggcagcagcaacccagctgggactcaaggaaatgccctcgcactgcctggtgcacctgcataagaactgcatccctcagtacactttaggccattggcagaagctggagtccgcccgacaattcttgaccgcgcatcgtttgcctttgactttggctggtgcaagctatgaaggggtagcggtgaatgactgcatagagagcgggcgtcaagcagcggtgagcgtgctagggaccgagccgaacagttag

SEQ ID NO: 298410 - DNA, 1434 bp, Artificial Sequence
  derived and/or modified sequence
atgggccggaccgtggtggtgctgggcggcggcatcagcggcctggcagcaagttaccacttaagccgcgcaccttgtcctccgaaggtcgtgctggtcgagtcatctgaaaggctaggaggctggattagaagcgtgcgggggccaaatggcgctattttcgaactgggcccacggggaattaggcctgccggcgcattaggcgcccgaacgcttctgctggtctccgagctgggcctggatagcgaagtcctcccggtgcggggcgatcaccctgccgcccagaatcgattcctgtatgtggggggagctctgcatgccctgccgactggtttgcgtgggctcctgcggcctagtccacctttcagcaagccgctgttctgggctggcctgcgagaactgacaaaaccgcgcggcaaagagcccgatgagacagtgcactctttcgctcagagacgtttgggacccgaagtcgcctctctggcgatggactccctatgccgtggtgttttcgccgggaatagcagagaattatcaatccggagctgcttccctagccttttccaagctgagcagactcatcgtagtattctgcttggcctcctgcttggcgcgggccggacaccccaacccgacagtgcgctgattcgccaggctctagccgagagatggagccagtggtctctgcggggaggattagaaatgcttccacaggcacttgaaacacatctaacaagccggggtgtctcggttttgcgcggccagcctgtgtgcggattgtctctgcaagccgagggacgctggaaggtttcactgcgggatagcagtctggaagctgaccatgttattagtgcaattcccgcatcagttctgtcagaattactccccgccgaggccgcaccgctggccagggccctgtctgccattaccgctgtcagcgtagcagttgttaacttgcagtatcagggtgcccatctgccagtccagggattcggtcacttggttccttcaagcgaagaccctggagtgctaggtatcgtgtatgatagtgtcgcctttcccgagcaagacggctcacctcccggcctcagagtgacggtgatgctaggaggatcatggcttcagactcttgaggcaagtggatgcgtactgagtcaggaattatttcagcaaagagcacaagaggccgccgctacgcagcttggacttaaggagatgccaagccactgtctggtgcacttacacaaaaactgcatcccccaatatactttagggcattggcagaagctcgaatctgcgaggcagttcctcaccgctcatagactgcccctgaccttggctggggcatcatacgagggagtcgcagtgaatgattgtatagaatcgggcagacaggcagcggtaagcgtgctgggaaccgaaccgaattcttag

SEQ ID NO: 298411 - DNA, 1434 bp, Artificial Sequence
  derived and/or modified sequence
atgggcaggaccgtcgtcgttctgggcggaggcatctcggggctggctgccagttatcacctatctcgggcaccctgccctcccaaggtggtactagtggagtcatcagaacggttgggaggatggatccgctctgtcaggggccctaatggggctatcttcgagctgggaccccgtgggatccggcctgctggtgccctgggcgctcgaacattattgctagtttcggaactgggtctggatagcgaagtgttgcctgtgaggggagatcaccctgccgctcagaaccggttcctctatgtgggtggtgccctgcacgctttacccaccggcctgaggggcttgctgaggccgagcccgcctttctcaaagccgctgttctgggccggtctgcgggagttaactaagcccagaggtaaggaacctgatgagacggtgcatagcttcgcccagcgacggctgggacctgaggtcgcatctcttgccatggactcactctgtcggggtgtgtttgccggtaattctcgagagctttccatccgcagctgtttccctagcctcttccaggctgagcagactcatcgctcgatcttgttggggctgctgttgggggctggcagaactccacagccagatagcgcacttatcaggcaggctctggctgagaggtggtctcagtggagtctgcggggaggcttagaaatgctcccacaggctctagagactcacctgacgagcagaggggtttcagtactgcgcggacagccagtctgcggactctccctccaggcggagggccgatggaaggtctctttgcgggattcaagccttgaggcggatcacgtaattagtgctatccctgcctccgtactgagtgagttattaccagcggaagctgcccctctggccagggccttatccgccatcaccgccgtgtctgttgccgtggtaaacttgcaataccagggggctcacctaccagtgcaggggtttgggcacctggtgccttcttcagaggatccaggagtgctcggaattgtctatgactccgttgccttccccgagcaagacggctccccccctggactgcgagtgactgtgatgctggggggatcctggttgcagacactggaggccagtggctgcgtcctgtcacaagagctgtttcagcagcgagcccaggaggcagctgcaacacaactcggcttaaaggagatgccatcacactgtttagtacacctgcacaagaattgtatccctcagtatacgttagggcactggcagaagcttgagtctgccaggcaattcctgacagcacacagactgcctctgaccctggcaggcgcatcctacgagggggtcgcggtgaatgattgcatagaatccggtaggcaagcagcggtgagcgtgctcggcacggaacccaattcgtag

SEQ ID NO: 298412 - DNA, 1434 bp, Artificial Sequence
  derived and/or modified sequence
atgggccgtacagttgtcgtgctgggagggggtatcagtgggttggccgcttcttaccacctgagtagagccccttgccctcccaaggtggtcctggtggagtcatccgaacggctaggcggttggatccgctctgtgagaggacccaacggggctatctttgaattgggccctagagggattagaccagccggtgccctaggagcaaggactttgctcttagtgagcgagcttggcctagactctgaagtgttgccagtcaggggcgatcaccccgctgcacaaaaccggttcctttatgtgggaggagcattgcacgctctccccacagggctcagagggctgcttcggccttcccccccatttagtaagcctttgttttgggcaggtctgcgggaactgactaagcccaggggcaaagaacccgacgagaccgtacactccttcgcccagaggcgtctggggccagaggtggctagtcttgcaatggacagcctttgccgcggagtgttcgcaggcaattcccgggagttgtcaattagatcctgctttcctagtttgtttcaagccgaacagacgcaccgctccatactgctggggctgctcctgggcgcagggagaacaccccagccggactcagccctgatccgtcaggcactggccgagcgctggtcacagtggtcactgcggggaggtctggagatgttgccccaagcactcgaaacacacctgactagcagaggggtgtccgtgctgaggggtcaacctgtttgcggattgagtctgcaagctgagggtagatggaaggtaagtctcagggactcatcgctggaagccgaccatgtcatatctgctatcccagcttccgtgctttctgagctactaccagccgaggccgctcctctggccagggccctgtcagccatcactgctgtttctgtcgccgtggtgaatctgcaataccaaggggctcatctgcccgtgcaggggttcggccacctggtgcccagcagcgaggaccccggagtcctaggcattgtctatgactctgtagcctttccagaacaggatggttctccgcctgggttgcgggtgacggtcatgctcgggggatcctggctgcagactctggaggcatcaggatgtgtgctgagccaagaactcttccagcagagggcccaggaagcagccgctacccagctcggactgaaggagatgcctagccattgcttagtgcatcttcacaaaaactgtatcccccagtacacgctggggcactggcagaagctggagagtgccagacaatttctgacagcccaccggctgcccctgaccctggctggtgcttcctacgaaggcgtggcagtgaacgactgtattgagagcgggaggcaggctgctgtgagtgtacttggtaccgagcctaattcttag

SEQ ID NO: 298413 - DNA, 1686 bp, Artificial Sequence
  derived and/or modified sequence
gccgcgagaacagagtggacggagcgtaggagagaccgaaaaggctgggggtgggagtagcggatttgaagcacttgttggcctacagaggtgtggcaagcagagcacctcagaactcaggcgtactgcccgccgcccgagccctgcgagggccgatagcgagggtgtggcccttatctgcacccagcagagcgccggcggggtttccgcatgggccggaccgtggtcgtgctgggcggaggcatcagcggcttggccgccagttaccacctgagccgggccccctgcccccctaaggtggtcctagtggagagcagtgagcgtctgggaggctggattcgctccgttcgaggccctaatggtgctatctttgagcttggacctcggggaattaggccagcgggagccctaggggcccggaccttgctcctggtttctgagcttggcttggattcagaagtgctgcctgtccggggagaccacccagctgcccagaacaggttcctctacgtgggcggtgccctgcatgccctacccactggcctcagggggctactccgcccttcaccccccttctccaaacctctgttttgggctgggctgagggagctgaccaagccccggggcaaagagcctgatgagactgtgcacagttttgcccagcgccgccttggacctgaggtggcgtctctagccatggacagtctctgccgtggagtgtttgcaggcaacagccgtgagctcagcatcaggtcctgctttcccagtctcttccaagctgagcaaacccatcgttccatattactgggcctgctgctgggggcagggcggaccccacagccagactcagcactcattcgccaggccttggctgagcgctggagccagtggtcacttcgtggaggtctagagatgttgcctcaggcccttgaaacccacctgactagtaggggggtcagtgttctcagaggccagccggtctgtgggctcagcctccaggcagaagggcgctggaaggtatctctaagggacagcagtctggaggctgaccacgttattagtgccattccagcttcagtgctcagtgagctgctccctgctgaggctgcccctctggctcgtgccctgagtgccatcactgcagtgtctgtagctgtggtgaatctgcagtaccaaggagcccatctgcctgtccagggatttggacatttggtgccatcttcagaagatccaggagtcctgggaatcgtgtatgactcagttgctttccctgagcaggacgggagcccccctggcctcagagtgactgtgatgctgggaggttcctggttacagacactggaggctagtggctgtgtcttatctcaggagctgtttcaacagcgggcccaggaagcagctgctacacaattaggactgaaggagatgccgagccactgcttggtccatctacacaagaactgcattccccagtatacactaggtcactggcaaaaactagagtcagctaggcaattcctgactgctcacaggttgcccctgactctggctggagcctcctatgagggagttgctgttaatgactgtatagagagtgggcgccaggcagcagtcagtgtcctgggcacagaacctaacagctgatccccaactctcattcatgaaaataaaaattgctggagcttg

SEQ ID NO: 298414 - DNA, 1740 bp, Artificial Sequence
  derived and/or modified sequence
gagaacagagtggacggagcgtaggagagaccgaaaaggctgggggtgggagtagcggatttgaagcacttgttggcctacagaggtgtggcaagcagagcacctcagaactcaggcgtactgcccgccgcccgagccctgcgagggccgatagcgagggtgtggcccttatctgcacccagcagagcgccggcggggtacggtcttaggacctcgatctccttctccctcattttctctcatccctacctattgtgggtttccgcatgggccggaccgtggtcgtgctgggcggaggcatcagcggcttggccgccagttaccacctgagccgggccccctgcccccctaaggtggtcctagtggagagcagtgagcgtctgggaggctggattcgctccgttcgaggccctaatggtgctatctttgagcttggacctcggggaattaggccagcgggagccctaggggcccggaccttgctcctggtttctgagcttggcttggattcagaagtgctgcctgtccggggagaccacccagctgcccagaacaggttcctctacgtgggcggtgccctgcatgccctacccactggcctcagggggctactccgcccttcaccccccttctccaaacctctgttttgggctgggctgagggagctgaccaagccccggggcaaagagcctgatgagactgtgcacagttttgcccagcgccgccttggacctgaggtggcgtctctagccatggacagtctctgccgtggagtgtttgcaggcaacagccgtgagctcagcatcaggtcctgctttcccagtctcttccaagctgagcaaacccatcgttccatattactgggcctgctgctgggggcagggcggaccccacagccagactcagcactcattcgccaggccttggctgagcgctggagccagtggtcacttcgtggaggtctagagatgttgcctcaggcccttgaaacccacctgactagtaggggggtcagtgttctcagaggccagccggtctgtgggctcagcctccaggcagaagggcgctggaaggtatctctaagggacagcagtctggaggctgaccacgttattagtgccattccagcttcagtgctcagtgagctgctccctgctgaggctgcccctctggctcgtgccctgagtgccatcactgcagtgtctgtagctgtggtgaatctgcagtaccaaggagcccatctgcctgtccagggatttggacatttggtgccatcttcagaagatccaggagtcctgggaatcgtgtatgactcagttgctttccctgagcaggacgggagcccccctggcctcagagtgactgtgatgctgggaggttcctggttacagacactggaggctagtggctgtgtcttatctcaggagctgtttcaacagcgggcccaggaagcagctgctacacaattaggactgaaggagatgccgagccactgcttggtccatctacacaagaactgcattccccagtatacactaggtcactggcaaaaactagagtcagctaggcaattcctgactgctcacaggttgcccctgactctggctggagcctcctatgagggagttgctgttaatgactgtatagagagtgggcgccaggcagcagtcagtgtcctgggcacagaacctaacagctgatccccaactctcattcatgaaaataaaaattgctggagct

SEQ ID NO: 298415 - DNA, 1434 bp, Artificial Sequence
  derived and/or modified sequence
atgggcagaaccgtggtggtgctgggcggcggcatcagcggcctggccgccagctaccacctgagcagagccccctgcccccccaaggtggtgctggtggagagcagcgagagactgggcggctggatcagaagcgtgagaggccccaacggcgccatcttcgagctgggccccagaggcatcagacccgccggcgccctgggcgccagaaccctgctgctggtgagcgagctgggcctggacagcgaggtgctgcccgtgagaggcgaccaccccgccgcccagaacagattcctgtacgtgggcggcgccctgcacgccctgcccaccggcctgagaggcctgctgagacccagcccccccttcagcaagcccctgttctgggccggcctgagagagctgaccaagcccagaggcaaggagcccgacgagaccgtgcacagcttcgcccagagaagactgggccccgaggtggccagcctggccatggacagcctgtgcagaggcgtgttcgccggcaacagcagagagctgagcatcagaagctgcttccccagcctgttccaggccgagcagacccacagaagcatcctgctgggcctgctgctgggcgccggcagaaccccccagcccgacagcgccctgatcagacaggccctggccgagagatggagccagtggagcctgagaggcggcctggagatgctgccccaggccctggagacccacctgaccagcagaggcgtgagcgtgctgagaggccagcccgtgtgcggcctgagcctgcaggccgagggcagatggaaggtgagcctgagagacagcagcctggaggccgaccacgtgatcagcgccatccccgccagcgtgctgagcgagctgctgcccgccgaggccgcccccctggccagagccctgagcgccatcaccgccgtgagcgtggccgtggtgaacctgcagtaccagggcgcccacctgcccgtgcagggcttcggccacctggtgcccagcagcgaggaccccggcgtgctgggcatcgtgtacgacagcgtggccttccccgagcaggacggcagcccccccggcctgagagtgaccgtgatgctgggcggcagctggctgcagaccctggaggccagcggctgcgtgctgagccaggagctgttccagcagagagcccaggaggccgccgccacccagctgggcctgaaggagatgcccagccactgcctggtgcacctgcacaagaactgcatcccccagtacaccctgggccactggcagaagctggagagcgccagacagttcctgaccgcccacagactgcccctgaccctggccggcgccagctacgagggcgtggccgtgaacgactgcatcgagagcggcagacaggccgccgtgagcgtgctgggcaccgagcccaacagctag

SEQ ID NO: 298416 - DNA, 1576 bp, Artificial Sequence
  derived and/or modified sequence
acttgttggcctacagaggtgtggcaagcagagcacctcagaactcaggcgtactgcccgccgcccgagccctgcgagggccgatagcgagggtgtggcccttatctgcacccagcagagcgccggcggggtacggtcttaggacctcgatctccttctccctcattttctctcatccctacctattgtgggtttccgcatgggccggaccgtggtcgtgctgggcggaggcatcagcggcttggccgccagttaccacctgagccgggccccctgcccccctaaggtggtcctagtggagagcagtgagcgtctgggaggctggattcgctccgttcgaggccctaatggtgctatctttgagcttggacctcggggaattaggccagcgggagccctaggggcccggaccttgctcctggcatgtggagagcaggtttctgagcttggcttggattcagaagtgctgcctgtccggggagaccacccagctgcccagaacaggttcctctacgtgggcggtgccctgcatgccctacccactggcctcagtcctagtctcacccttaaggtggcgtctctagccatggacagtctctgccgtggagtgtttgcaggcaacagccgtgagctcagcatcaggtcctgctttcccagtctcttccaagctgagcaaacccatcgttccatattactgggcctgctgctgggggcagggcggaccccacagccagactcagcactcattcgccaggccttggctgagcgctggagccagtggtcacttcgtggaggtctagagatgttgcctcaggcccttgaaacccacctgactagtaggggggtcagtgttctcagaggccagccggtctgtgggctcagcctccaggcagaagggcgctggaaggtatctctaagggacagcagtctggaggctgaccacgttattagtgccattccagcttcagtgctcagtgagctgctccctgctgaggctgcccctctggctcgtgccctgagtgccatcactgcagtgtctgtagctgtggtgaatctgcagtaccaaggagcccatctgcctgtccagggatttggacatttggtgccatcttcagaagatccaggagtcctgggaatcgtgtatgactcagttgctttccctgagcaggacgggagcccccctggcctcagagtgactgtgatgctgggaggttcctggttacagacactggaggctagtggctgtgtcttatctcaggagctgtttcaacagcgggcccaggaagcagctgctacacaattaggactgaaggagatgccgagccactgcttggtccatctacacaagaactgcattccccagtatacactaggtcactggcaaaaactagagtcagctaggcaattcctgactgctcacaggttgcccctgactctggctggagcctcctatgagggagttgctgttaatgactgtatagagagtgggcgccaggcagcagtcagtgtcctgggcacagaacctaacagctgatccccaactctcattcatgaaaataaaaattgctggagcttg

SEQ ID NO: 298417 - protein, 444 aa, Artificial Sequence
  derived and/or modified sequence
MGRTVVVLGGGISGLAASYHLSRAPCPPKVVLVESSERLGGWIRSVRGPNGAIFELGPRGIRPAGALGARTLLLACGEQVSELGLDSEVLPVRGDHPAAQNRFLYVGGALHALPTGLSPSLTLKVASLAMDSLCRGVFAGNSRELSIRSCFPSLFQAEQTHRSILLGLLLGAGRTPQPDSALIRQALAERWSQWSLRGGLEMLPQALETHLTSRGVSVLRGQPVCGLSLQAEGRWKVSLRDSSLEADHVISAIPASVLSELLPAEAAPLARALSAITAVSVAVVNLQYQGAHLPVQGFGHLVPSSEDPGVLGIVYDSVAFPEQDGSPPGLRVTVMLGGSWLQTLEASGCVLSQELFQQRAQEAAATQLGLKEMPSHCLVHLHKNCIPQYTLGHWQKLESARQFLTAHRLPLTLAGASYEGVAVNDCIESGRQAAVSVLGTEPNS

SEQ ID NO: 298418 - DNA, 1335 bp, Artificial Sequence
  derived and/or modified sequence
atggggagaactgttgtcgtcctgggaggagggatcagtggtctcgccgctagctaccaccttagtcgggctccttgcccaccaaaggtcgtcttagtcgagagctccgaaagacttggcgggtggatccgcagcgtacgcggtccaaatggcgctatctttgaacttggtcctcgtggcatccggcctgccggtgctctgggagcaagaacgttactgctggcatgcggggaacaggtaagcgaactagggcttgattccgaagtccttcctgttagaggagaccatcccgctgcacagaaccggttcttgtatgtggggggggccctacacgccctcccaacaggcctctcacctagcctcactctcaaggtagcctccctggctatggacagcttgtgccgcggcgtgtttgccgggaatagccgagaactgagtatacgaagctgttttccaagcctcttccaggccgagcagacccatcgctccatcctgctaggcttactcttaggtgcagggcgtacccctcagcccgatagcgcactgataagacaggctctggcagagagatggtcccaatggtctctgcggggtgggctggagatgctcccccaggcccttgagacccatctgactagccgtggggtttcagtgctgagaggacagccggtgtgtgggctgagtctgcaagccgagggcagatggaaggtgagcctgcgtgacagctccctagaagctgatcacgtcatctccgctatccctgcttccgtgctgtcggaattgctgccagccgaggccgcacctctggccagggctctgtccgccatcacagcagtgtccgtggccgtcgtgaacctgcagtaccaaggcgcacatctacctgtgcaagggttcggccatctcgtccccagctctgaggacccaggggtgttaggaatagtctacgattccgtcgccttccctgagcaggatggatctccgccaggtttacgagtgacagtcatgcttggcggatcatggctgcagacactggaagcgtcgggatgcgtcctgtcacaggagctgttccagcaaagggcccaggaggccgcagcaacccagttaggcctgaaggaaatgcccagccattgcctcgtacatctgcacaagaattgcatcccccagtacacactgggacactggcaaaaactggagtccgcaagacagtttctgacggcacatcgcctcccactcacattggccggcgcatcatatgagggcgttgcagtgaatgactgcatagagtctggaagacaggccgcggtctcagtgctgggtaccgaaccgaattcgtag

SEQ ID NO: 298419 - DNA, 1335 bp, Artificial Sequence
  derived and/or modified sequence
atgggccgcacagtggtggtgctgggcggcggcatcagcggcctggccgccagctaccacctgagccgggccccctgcccccccaaggtggtgctggtggagagcagcgagcggctgggcggctggatccgctctgtgcggggccccaacggggccatctttgagctgggcccccggggcatccggcctgctggggccctgggcgcccggaccctgctgctggcctgtggggagcaggtgtctgagctgggcctggacagcgaggtgctgcctgtgcggggggaccaccctgctgcccagaaccgcttcctgtatgtgggcggggccctgcacgccctgcccaccggcctgagccccagcctgaccctgaaggtggccagcctggccatggacagcctgtgccggggcgtgtttgctggcaacagccgggagctgagcatccgcagctgcttccccagcctcttccaggccgagcagacccacaggagcatcctgctgggcctgctgctgggcgccggccgcaccccccagcctgacagcgccctgatccggcaggccctggccgagcgctggagccagtggagcctgcggggcggcctggagatgctgccccaggccctggagacccacctgaccagcagaggagtgtctgtgctgcggggccagcctgtgtgtggcctgagcctgcaggccgagggccgctggaaggtgtccctgcgggacagcagcctggaggccgaccacgtgatcagcgccatcccagcctctgtgctgtctgagctgctgcctgctgaggccgcccccctggcccgggccctgagcgccatcacagctgtgtctgtggccgtggtgaacctgcagtaccagggcgcccacctgcctgtgcagggcttcggccacctggtgcccagcagcgaggaccccggggtgctgggcatcgtgtatgattctgtggccttccctgagcaggacggcagccccccaggcctgcgggtgacagtgatgctgggcggctcctggctgcagaccctggaggccagcggctgtgtgctgagccaggagctgttccagcagagggcccaggaggccgccgccacccagctgggcctgaaggagatgcccagccactgcctggtgcacctgcacaagaactgcatcccccagtacaccctgggccactggcagaagctggagagcgcccggcagttcctgacagcccaccggctgcccctgaccctggccggggccagctatgagggcgtggccgtgaatgactgcattgaaagtggccggcaggccgctgtgtctgtgctgggcacagagcccaacagctag

SEQ ID NO: 298420 - DNA, 1335 bp, Artificial Sequence
  derived and/or modified sequence
atgggccggaccgtggtggtgctgggcggcggcatcagcggcctggccgcgtcttaccacctctctcgggcaccttgcccccctaaggtggttctcgtggaatctagcgagaggttgggtggttggatcagaagcgtgcgggggccaaatggggcgatttttgaactgggcccacgcgggattcgccctgcgggcgctctaggcgcaagaaccttgctgctcgcttgcggtgaacaggtgtctgagctcggattagatagcgaggtcttgccggtgcggggagatcaccctgcggcgcagaaccgcttcctgtatgtgggcggcgctctgcatgcacttccgacggggctttccccttcgctgacacttaaagtggcctcccttgcaatggatagtctctgcagaggggtgtttgccggtaatagtagagaattatccatcaggtcctgctttccttctctgttccaagctgaacaaactcacaggagcatcctgctggggctgttactgggggcgggtaggactccacagccggatagtgcgctgattagacaggccctcgccgagaggtggtctcagtggtctttgagagggggattggaaatgttgcctcaggctctcgaaacccacctgacctctcggggagtgagtgtgttgagagggcagcctgtgtgtgggttgtcgctgcaggcagagggtaggtggaaggtctcgctccgtgatagctcactggaggcagatcatgtgatctcggccattccagcctcagtgctgtcggagttgcttcctgctgaagccgcccctctcgctcgtgctctgagtgcaataacggccgtatcagttgcagtggtcaatcttcagtaccagggcgcccatctgcctgtgcagggattcgggcacctggtacccagcagcgaggatcctggcgtgctggggattgtgtatgattcagtggccttcccagaacaggatgggagccctccaggtctccgggtcaccgttatgctcgggggcagctggctacaaacactagaagcctcaggctgcgtactgagccaagagctctttcagcaacgcgcccaagaagccgccgctactcaactgggtcttaaagagatgccctctcattgcctggtccaccttcacaaaaactgtattcctcagtatacactcgggcactggcagaaactggagtcagcccgccaatttctgacggcccacaggctgccactgactctcgccggtgctagctacgaaggagtggccgtgaatgattgcatcgaatcgggacgtcaggcagccgtgtccgttctggggacagagcctaatagctag

SEQ ID NO: 298421 - DNA, 1335 bp, Artificial Sequence
  derived and/or modified sequence
atgggaagaacggttgtggtccttggcggaggcatttcaggtctagcagcatcttatcatctctctagggccccatgtccccctaaagtagtgcttgtcgaaagctcagagaggttaggcggatggattagatcagttcgtgggcctaacggggctatatttgaactgggacccagagggatcaggcctgcgggagccttaggggcaaggacccttctgctggcatgcggcgagcaagtttctgaactcgggttagatagcgaagtcctccctgtgcgcggtgaccatccggcagctcagaaccggttcctgtatgtgggcggagctctacacgctctgcccactggactgagcccgtccctcacacttaaagtcgccagccttgctatggacagcctatgtaggggtgtcttcgctgggaattcccgtgagctttcaatccggagttgcttcccttccctgttccaggctgagcagacacaccgatcaatcctcctcggtctccttcttggagcaggtagaacgccacagcctgattcagctctgattaggcaggctctcgcagaacgatggtctcagtggtctctgcggggtggtctggaaatgctcccccaggctttagaaacccacctcaccagtcggggagtttcagttttgcggggacagcccgtatgcggcctgagccttcaagcggaaggccgttggaaggtttctctaagggattcttcactggaagccgaccatgtgatcagcgccatccccgctagcgtgttgtccgaactcctgcccgctgaagccgctcctctggcaagggcactgagcgcaattactgccgtcagtgtcgccgtggtcaatctgcaataccagggcgctcatttgccagtgcagggtttcggccacctggttcccagctctgaggatcctggtgtattagggatcgtctacgactcggtcgccttcccggaacaggacggcagtccacccggacttagggtgacagtgatgcttggcggttcttggctgcagacactcgaagcttctgggtgtgtgctcagccaagagcttttccaacagagggcacaggaagccgcagccacgcagttggggctgaaagaaatgcccagtcattgccttgttcatctccacaagaactgcatcccgcagtataccctggggcattggcaaaaacttgagagtgctagacagtttctcaccgctcaccgcctgcccctcaccctcgccggtgcaagctacgaaggcgtcgctgttaatgactgcatcgagagtgggagacaggcggcagtaagcgtgctcggcacagagcccaattcctag

SEQ ID NO: 298422 - DNA, 1335 bp, Artificial Sequence
  derived and/or modified sequence
atgggcagaaccgtggtggtgctgggcggcggcatcagcggcctggccgccagctaccacctgagcagagccccctgcccccccaaggtggtgctggtggagagcagcgagagactgggcggctggatcagaagcgtgagaggccccaacggcgccatcttcgagctgggccccagaggcatcagacccgccggcgccctgggcgccagaaccctgctgctggcctgcggcgagcaggtgagcgagctgggcctggacagcgaggtgctgcccgtgagaggcgaccaccccgccgcccagaacagattcctgtacgtgggcggcgccctgcacgccctgcccaccggcctgagccccagcctgaccctgaaggtggccagcctggccatggacagcctgtgcagaggcgtgttcgccggcaacagcagagagctgagcatcagaagctgcttccccagcctgttccaggccgagcagacccacagaagcatcctgctgggcctgctgctgggcgccggcagaaccccccagcccgacagcgccctgatcagacaggccctggccgagagatggagccagtggagcctgagaggcggcctggagatgctgccccaggccctggagacccacctgaccagcagaggcgtgagcgtgctgagaggccagcccgtgtgcggcctgagcctgcaggccgagggcagatggaaggtgagcctgagagacagcagcctggaggccgaccacgtgatcagcgccatccccgccagcgtgctgagcgagctgctgcccgccgaggccgcccccctggccagagccctgagcgccatcaccgccgtgagcgtggccgtggtgaacctgcagtaccagggcgcccacctgcccgtgcagggcttcggccacctggtgcccagcagcgaggaccccggcgtgctgggcatcgtgtacgacagcgtggccttccccgagcaggacggcagcccccccggcctgagagtgaccgtgatgctgggcggcagctggctgcagaccctggaggccagcggctgcgtgctgagccaggagctgttccagcagagagcccaggaggccgccgccacccagctgggcctgaaggagatgcccagccactgcctggtgcacctgcacaagaactgcatcccccagtacaccctgggccactggcagaagctggagagcgccagacagttcctgaccgcccacagactgcccctgaccctggccggcgccagctacgagggcgtggccgtgaacgactgcatcgagagcggcagacaggccgccgtgagcgtgctgggcaccgagcccaacagctag

SEQ ID NO: 298423 - DNA, 519 bp, Artificial Sequence
  derived and/or modified sequence
ggtcatatggttactgcccggcaagaaccacgtttggtcttaatatccatcatttatgagaacaattgtctgatcttccgggcgcctgatatggatcaattggtgctgcccagtaaacaaccttccagtaataagctacataactgccgaatttttggtctggatattaagggccgggattgcggaaacgaagcagcgaagtggttcactaacttcctcaaaacagaggcctaccggttagtgcagtttgaaactaacatgaaaggccgcacgtcacgcaagctgttgccgacactggaccagaattttcaagtcgcgtaccctgactattgccctcttctgatcatgactgacgctagtttagttgacctgaacactcggatggaaaaaaaaatgaagatggaaaacttcagaccgaacattgtcgtaacagggtgtgacgcttttgaggaggatacttgggacgagttgctgatcggttctgtagaggtgaagaaggtaatggcatgtccgaggtag

SEQ ID NO: 298424 - DNA, 519 bp, Artificial Sequence
  derived and/or modified sequence
ggccacatggtgacagcccggcaggagccccggctggtgctgatcagcatcatctatgagaacaactgcctgatcttccgggccccagacatggaccagctggtgctgcccagcaagcagcccagcagcaacaagctgcacaactgccgcatcttcggcctggacatcaagggccgggactgtggaaatgaagctgccaagtggttcaccaacttcctgaagacagaggcctaccgcctggtgcagtttgagaccaacatgaagggccgcaccagcaggaagctgctgcccaccctggaccagaacttccaggtggcctacccagactactgccccctgctgatcatgacagatgccagcctggtggacctgaacaccaggatggagaagaagatgaagatggagaacttccggcccaacatcgtggtgacaggctgtgatgcctttgaggaggacacctgggatgagctgctgattggctctgtggaggtgaagaaggtgatggcctgccccaggtag

SEQ ID NO: 298425 - DNA, 585 bp, Artificial Sequence
  derived and/or modified sequence
ggacacatggtcactgcccgacaggagcctcgcctcgtgctcatctccatcatttatgagaataactgcctgatcttcagggctccagacatggaccagctggttttgcctagcaagcagccttcctcaaacaaactccacaactgcaggatatttggccttgacattaaaggcagagactgtggcaatgaggcagctaagtggttcaccaacttcttgaaaactgaagcgtatagattggttcaatttgagacaaacatgaagggaagaacatcaagaaaacttctccccactcttgatcagaatttccaggtggcctacccagactactgcccgctcctgatcatgacagatgcctccctggtagatttgaataccaggatggagaagaaaatgaaaatggagaatttcaggccaaatattgtggtgaccggctgtgatgcttttgaggaggatacctgggatgaactcctaattggtagtgtagaagtgaaaaaggtaatggcatgccccaggtaaggagcctagctagaccccaggactgtggtgtggcccattcattggttcctaagcatcacctaaccc

SEQ ID NO: 298426 - DNA, 519 bp, Artificial Sequence
  derived and/or modified sequence
ggccacatggtgaccgcccggcaggagccccggctggtgctgatctctataatctacgagaataattgcctaattttcagggcccccgacatggaccagctggtgcttcctagcaaacaaccaagcagcaacaaactgcacaattgtagaattttcggtctcgacatcaagggcagagattgcggcaatgaagccgccaagtggtttaccaattttctcaagacagaagcttaccgcctcgttcagttcgaaaccaatatgaaggggcgaactagtcggaagctactgcccacattggaccagaattttcaggttgcataccccgattactgtccactgctcatcatgaccgacgctagcctggtggaccttaatacccgaatggagaaaaaaatgaaaatggaaaacttcagaccgaacatcgtggttacgggctgtgacgcttttgaggaagacacctgggacgagcttctaatcggaagtgtcgaggtgaagaaagttatggcttgtcctagatag

SEQ ID NO: 298427 - DNA, 519 bp, Artificial Sequence
  derived and/or modified sequence
ggacacatggtgactgcgagacaagagcccaggttggtactcatctccatcatttacgaaaataactgcctaatcttccgggcaccagatatggatcagctggtgctgccctccaagcagccctcgagtaacaagctgcacaattgccgcattttcggattggatataaaaggtagggactgcggcaatgaggccgctaaatggttcacaaatttcctgaaaaccgaggcttatcgacttgtccagtttgagactaacatgaagggcaggactagtcgtaagctcttgcctaccttagaccagaatttccaagtggcttatcccgactattgccctctcttgatcatgacggatgcctcgctggtagatctgaatacccgtatggagaagaaaatgaagatggagaattttaggcccaatattgtggttacaggatgcgatgctttcgaggaggatacctgggacgagctcctgatcggcagtgttgaggtgaagaaggtcatggcgtgcccgaggtag

SEQ ID NO: 298428 - DNA, 519 bp, Artificial Sequence
  derived and/or modified sequence
ggccacatggtgaccgccagacaggagcccagactggtgctgatcagcatcatctacgagaacaactgcctgatcttcagagcccccgacatggaccagctggtgctgcccagcaagcagcccagcagcaacaagctgcacaactgcagaatcttcggcctggacatcaagggcagagactgcggcaacgaggccgccaagtggttcaccaacttcctgaagaccgaggcctacagactggtgcagttcgagaccaacatgaagggcagaaccagcagaaagctgctgcccaccctggaccagaacttccaggtggcctaccccgactactgccccctgctgatcatgaccgacgccagcctggtggacctgaacaccagaatggagaagaagatgaagatggagaacttcagacccaacatcgtggtgaccggctgcgacgccttcgaggaggacacctgggacgagctgctgatcggcagcgtggaggtgaagaaggtgatggcctgccccagatag

SEQ ID NO: 298429 - protein, 421 aa, Artificial Sequence
  derived and/or modified sequence
MYHGMNPSNGDGFLEQQQQQQQPQSPQRLLAVILWFQLALCFGPAQLTGDCRIPQIEDAEIHNKTYRHGEKLIITCHEGFKIRYPDLHNMVSLCRDDGTWNNLPICQGCLRPLASSNGYVNISELQTSFPVGTVISYRCFPGFKLDGSAYLECLQNLIWSSSPPRCLALEAQVCPLPPMVSHGDFVCHPRPCERYNHGTVVEFYCDPGYSLTSDYKYITCQYGEWFPSYQVYCIKSEQTWPSTHETLLTTWKIVAFTATSVLLVLLLVILARMFQTKFKAHFPPRGPPRSSSSDPDFVVVDGVPVMLPSYDEAVSGGLSALGPGYMASVGQGCPLPVDDQSPPAYPGSGDTDTGPGESETCDSVSGSSELLQSLYSPPRCQESTHPASDNPDIIASTAEEVASTSPGIDIADEIPLMEEDP

SEQ ID NO: 298430 - DNA, 1266 bp, Artificial Sequence
  derived and/or modified sequence
atgtaccacggcatgaaccccagcaacggcgacggcttcctggagcagcagcagcagcagcagcagccccagagcccccagagactgctggccgtgatcctgtggttccagctggccctgtgcttcggccccgcccagctgaccggcgactgcagaatcccccagatcgaggacgccgagatccacaacaagacctacagacacggcgagaagctgatcatcacctgccacgagggcttcaagatcagataccccgacctgcacaacatggtgagcctgtgcagagacgacggcacctggaacaacctgcccatctgccagggctgcctgagacccctggccagcagcaacggctacgtgaacatcagcgagctgcagaccagcttccccgtgggcaccgtgatcagctacagatgcttccccggcttcaagctggacggcagcgcctacctggagtgcctgcagaacctgatctggagcagcagcccccccagatgcctggccctggaggcccaggtgtgccccctgccccccatggtgagccacggcgacttcgtgtgccaccccagaccctgcgagagatacaaccacggcaccgtggtggagttctactgcgaccccggctacagcctgaccagcgactacaagtacatcacctgccagtacggcgagtggttccccagctaccaggtgtactgcatcaagagcgagcagacctggcccagcacccacgagaccctgctgaccacctggaagatcgtggccttcaccgccaccagcgtgctgctggtgctgctgctggtgatcctggccagaatgttccagaccaagttcaaggcccacttcccccccagaggcccccccagaagcagcagcagcgaccccgacttcgtggtggtggacggcgtgcccgtgatgctgcccagctacgacgaggccgtgagcggcggcctgagcgccctgggccccggctacatggccagcgtgggccagggctgccccctgcccgtggacgaccagagcccccccgcctaccccggcagcggcgacaccgacaccggccccggcgagagcgagacctgcgacagcgtgagcggcagcagcgagctgctgcagagcctgtacagcccccccagatgccaggagagcacccaccccgccagcgacaaccccgacatcatcgccagcaccgccgaggaggtggccagcaccagccccggcatcgacatcgccgacgagatccccctgatggaggaggacccctag

SEQ ID NO: 298431 - DNA, 1266 bp, Artificial Sequence
  derived and/or modified sequence
atgtaccacgggatgaacccctctaacggagacggattcctggaacagcagcagcaacagcaacagccgcaaagcccacagcgactgttggccgtgatattgtggttccagctggctctgtgttttggccccgcacagctgacaggcgactgcaggattcctcagatcgaagacgccgagatccataacaaaacgtaccggcatggtgaaaagctgatcattacgtgccatgaaggttttaaaattcggtatcccgacctccacaacatggtgagtctgtgtagggacgatgggacctggaataacctcccaatctgccaggggtgcctccgacccctggctagttccaacggctatgttaacatctctgagctgcagaccagctttcccgttggaaccgtgatcagctatagatgcttccccgggtttaaattggatggaagtgcttatttagagtgtctccagaacctgatttggtcttcatcacctccacggtgccttgcactcgaagcacaggtgtgccccctcccgcctatggtgtcacacggagattttgtttgtcacccacgaccttgcgaacgatataaccacgggaccgttgttgagttctattgcgatcctggatactcactaacaagcgactataagtatatcacctgccagtacggtgagtggttcccaagctaccaggtttattgtatcaagtctgagcaaacatggccaagtacacatgaaacactccttacaacttggaaaatcgtggcattcaccgccaccagcgtgctcctagtgctacttcttgtaatccttgctcggatgtttcagacaaaattcaaagcgcactttcccccgcgcggcccccctcgctcctcctctagcgatcccgacttcgtggtggtggacggggtgcctgtgatgctgccatcctacgatgaggccgtctctgggggcctgtccgccctgggaccggggtacatggcttctgttggacagggatgcccactgccagttgacgaccaatcaccaccagcctatcccggcagtggagataccgacacaggtcctggcgagtctgagacttgcgactctgtctctggctcctctgagctgttgcaaagcctgtactcacctccaaggtgtcaagaaagcacacaccccgcttcagataaccctgatataattgcctccacagcagaggaagtcgcctcaacctctcctggtatcgatatcgccgacgaaattccacttatggaggaagacccttag

SEQ ID NO: 298432 - DNA, 1266 bp, Artificial Sequence
  derived and/or modified sequence
atgtaccacggcatgaaccccagcaatggagatggcttcctggagcagcagcagcagcagcagcagccccagagcccccagaggctgctggccgtcatcctgtggttccagctggccctgtgcttcggccctgcccagctgaccggggactgccgcatcccccagattgaagatgctgagatccacaacaagacctaccgccacggggagaagctgatcatcacctgccacgagggcttcaagatccgctacccagacctgcacaacatggtgtccctgtgcagagatgatggcacctggaacaacctgcccatctgccagggctgcctgcggcccctggccagcagcaatggctacgtgaacatcagcgagctgcagaccagcttccctgtgggcaccgtcatctcctaccgctgcttccctggcttcaagctggatggcagcgcctacctggagtgcctgcagaacctgatctggagcagcagccccccacgctgcctggccctggaggcccaggtgtgccccctgccccccatggtgagccacggggactttgtgtgccacccccggccctgtgagcgctacaaccacggcaccgtggtggagttctactgtgaccccggctacagcctgaccagtgactacaagtacatcacctgccagtacggggagtggttccccagctaccaggtgtactgcatcaagtctgagcagacctggcccagcacccatgagaccctgctgaccacctggaagatcgtggccttcaccgccacctctgtgctgctggtgctgctgctggtgatcctggccaggatgttccagaccaagttcaaggcccacttccccccccggggccccccaagaagcagcagcagtgaccctgactttgtggtggtggatggagtgcctgtgatgctgcccagctatgatgaagctgtgtctgggggcctgagcgccctgggccctggctacatggcctctgtgggccagggctgccccctgcctgtggatgaccagagccccccagcctacccaggcagcggggacacagacaccggccctggagagagcgagacctgtgacagcgtgtctggcagcagcgagctgctgcagagcctgtacagccccccacgctgccaggagagcacccacccagccagtgacaacccagacatcatcgccagcacagctgaggaggtggccagcaccagccctggcatcgacattgctgatgagatccccctgatggaggaggacccctag

SEQ ID NO: 298433 - DNA, 1266 bp, Artificial Sequence
  derived and/or modified sequence
atgtaccacggcatgaaccccagcaacggcgacggcttcctggagcaacagcagcagcagcagcaaccgcagagtcctcagcgccttctggccgtgatcctctggtttcagttagccctctgcttcggtcccgcccaattaaccggcgactgcaggatccctcagattgaagacgccgaaatacacaataaaacgtaccgccacggagagaaactgattatcacatgccacgagggctttaaaattagatatccggatctccataacatggtgtctctgtgcagggatgatggaacatggaacaaccttcctatttgtcagggctgtctccggcctcttgctagcagtaatgggtatgtgaacatctcagaacttcaaacatccttcccagtgggcaccgtgatttcttaccgttgcttccctggattcaaactggacgggtccgcttacctggaatgcctacagaacttgatatggtcttcatcgccaccaagatgtttggccctggaagcgcaagtgtgtcctctccccccaatggttagccatggggacttcgtgtgccaccctagaccctgtgagcggtataaccacggtacagtagtggagttctattgtgatcctggatattccctgacgtctgattataaatacatcacatgccagtacggggagtggtttccaagctaccaggtatactgcattaagagcgagcagacctggcctagcacccacgaaactctgctgacaacctggaagattgtggcctttacagccacctccgtcctgctggtcttgctgcttgtgatcctcgcccgaatgttccagactaagttcaaagctcacttccctccccgcggaccgccgcgttcgtcatcgtccgacccggatttcgtagtagttgacggagtacccgttatgctaccttcctatgacgaggctgtctctggaggcttgagtgccctcggcccggggtatatggcctccgttggtcagggctgtcccctccccgtagacgaccagtcacctcctgcttatcccggtagtggggatacagatacaggccctggcgaatctgagacttgcgattcagtaagtggatcttctgaacttctgcagtccctgtacagcccccctagatgccaagaatctacccaccctgccagcgataaccccgatattattgcttcgacagctgaagaagtcgcgagtacctctccaggaattgacatagctgacgagatccctctgatggaggaagacccctag

SEQ ID NO: 298434 - DNA, 1266 bp, Artificial Sequence
  derived and/or modified sequence
atgtaccatggcatgaaccccagcaatggcgacgggttcctggagcagcagcaacagcagcaacagcctcaaagccctcaacgactgcttgccgttatactgtggttccaactggccctctgctttggtcctgcacaactaactggcgactgcagaatcccccagatagaagatgccgaaatccataacaagacttaccgccacggcgaaaagctgatcatcacatgccacgaaggatttaaaatccgctacccggaccttcataacatggtttccctttgtcgggacgatggaacatggaataaccttcctatctgtcagggatgtctgagacccctggcaagctccaatggctacgtgaacatatctgagctccagacttccttcccggtaggcacggttatttcttacagatgcttcccgggttttaagctggatggctcagcatacctcgagtgtttacaaaatctaatttggtcttcttctcctccccgatgcctggccctggaggcccaggtgtgtcccctgccgccaatggtcagccatggagactttgtttgtcaccctaggccttgtgagagatacaatcacgggactgtggtggagttttattgcgatccaggctactccctgacctccgattacaagtacataacctgtcagtacggagagtggtttccatcttatcaagtctactgtatcaaatccgagcagacctggccaagcactcacgagaccttgctcactacttggaaaattgtagcctttaccgccacatcagtactactcgtgcttttgctggtgatcctggcaaggatgtttcagacgaagttcaaagctcattttccccctcggggtccacctcggtcttcctcctccgatcccgatttcgtggtggtagatggggtgcctgttatgctgccctcctacgatgaagccgtgagtgggggtctttccgcactagggcctggatacatggccagcgtgggtcagggttgtccactccccgtggatgaccagtcccctccggcttacccgggaagcggtgacaccgacactgggcctggcgaatccgaaacttgtgatagcgtgagtgggtcatccgagctactccagtcgctgtactctcctcccaggtgccaggagagcacacatccagccagcgacaatccagacattatagcatccaccgccgaagaggtcgcttcgacatctccaggtattgacatcgctgatgaaattcccttgatggaagaggacccctag

SEQ ID NO: 298435 - DNA, 1775 bp, Artificial Sequence
  derived and/or modified sequence
ctcgctcgctcgcgcagcggcggcagcagaggtcgcgcacagatgcgggttagactggcggggggaggaggcggaggagggaaggaagctgcatgcatgagacccacagactcttgcaagctggatgccctctgtggatgaaagatgtatcatggaatgaacccgagcaatggagatggatttctagagcagcagcagcagcagcagcaacctcagtccccccagagactcttggccgtgatcctgtggtttcagctggcgctgtgcttcggccctgcacagctcacgggcgattgccgtatccctcaaatcgaagatgctgagattcataacaagacatatagacatggagagaagctaatcatcacttgtcatgaaggattcaagatccggtaccccgacctacacaatatggtttcattatgtcgcgatgatggaacgtggaataatctgcccatctgtcaaggctgcctgagacctctagcctcttctaatggctatgtaaacatctctgagctccagacctccttcccggtggggactgtgatctcctatcgctgctttcccggatttaaacttgatgggtctgcgtatcttgagtgcttacaaaaccttatctggtcgtccagcccaccccggtgccttgctctggaagcccaagtctgtccactacctccaatggtgagtcacggagatttcgtctgccacccgcggccttgtgagcgctacaaccacggaactgtggtggagttttactgcgatcctggctacagcctcaccagcgactacaagtacatcacctgccagtatggagagtggtttccttcttatcaagtctactgcatcaaatcagagcaaacgtggcccagcacccatgagaccctcctgaccacgtggaagattgtggcgttcacggcaaccagtgtgctgctggtgctgctgctcgtcatcctggccaggatgttccagaccaagttcaaggcccactttccccccagggggcctccccggagttccagcagtgaccctgactttgtggtggtagacggcgtgcccgtcatgctcccgtcctatgacgaagctgtgagtggcggcttgagtgccttaggccccgggtacatggcctctgtgggccagggctgccccttacccgtggacgaccagagccccccagcataccccggctcaggggacacggacacaggcccaggggagtcagaaacctgtgacagcgtctcaggctcttctgagctgctccaaagtctgtattcacctcccaggtgccaagagagcacccaccctgcttcggacaaccctgacataattgccagcacggcagaggaggtggcatccaccagcccaggcatcgacattgcagatgagattcctctaatggaagaagatccctaatatgggtcaagatccagatgactctcctgctccttcggggaaaggaccttgtatcttggagtgaggtcacagaaggatagagcctgggggcaaaatgtctaacttgtctacatggggaccacagttcacattatgcatctcaggctccacagtgaggctgacaaactgcaatggcagtgcttttaaatgagatttgaggattcaccaagacccatggggaaccggggcagcagggaagccctcgcgtggtcttggatgaggggtgttaaatgtgtatcgtgctgtggaacatgggacaattccacgcacatcccaccgaatcatcacgcatcccattgactggcaagtactccccgccccctctg

SEQ ID NO: 298436 - protein, 524 aa, Artificial Sequence
  derived and/or modified sequence
MAGGAREVLTLQLGHFAGFVGAHWWNQQDAALGRATDSKEPPGELCPDVLYRTGRTLHGQETYTPRLILMDLKGSLSSLKEEGGLYRDKQLDAAIAWQGKLTTHKGSSPLPTATTPKPLIPTEASIRVWSDFLRVHLHPRSICMIQKYNHDGEAGRLEAFGQGESVLKEPKYQEELEDRLHFYVEECDYLQGFQILCDLHDGFSGVGAKAAELLQDEYSGRGIITWGLLPGPYHRGEAQRNIYRLLNTAFGLVHLTAHSSLVCPLSLGGSLGLRPEPPVSFPYLHYDATLPFHCSAILATALDTVTVPYRLCSSPVSMVHLADMLSFCGKKVVTAGAIIPFPLAPGQSLPDSLMQFGGATPWTPLSACGEPSGTRCFAQSVVLRGIDRACHTSQLTPGTPPPSALHACTTGEEILAQYLQQQQPGVMSSSHLLLTPCRVAPPYPHLFSSCSPPAVESIPVFGALCSSSSLHQTLEALARDLTKLDLRRWASFMDAGVEHDDVAELLQELQSLAQCYQGGDSLVD

SEQ ID NO: 298437 - DNA, 1575 bp, Artificial Sequence
  derived and/or modified sequence
atggccggcggcgccagagaggtgctgaccctgcagctgggccacttcgccggcttcgtgggcgcccactggtggaaccagcaggacgccgccctgggcagagccaccgacagcaaggagccccccggcgagctgtgccccgacgtgctgtacagaaccggcagaaccctgcacggccaggagacctacacccccagactgatcctgatggacctgaagggcagcctgagcagcctgaaggaggagggcggcctgtacagagacaagcagctggacgccgccatcgcctggcagggcaagctgaccacccacaagggcagcagccccctgcccaccgccaccacccccaagcccctgatccccaccgaggccagcatcagagtgtggagcgacttcctgagagtgcacctgcaccccagaagcatctgcatgatccagaagtacaaccacgacggcgaggccggcagactggaggccttcggccagggcgagagcgtgctgaaggagcccaagtaccaggaggagctggaggacagactgcacttctacgtggaggagtgcgactacctgcagggcttccagatcctgtgcgacctgcacgacggcttcagcggcgtgggcgccaaggccgccgagctgctgcaggacgagtacagcggcagaggcatcatcacctggggcctgctgcccggcccctaccacagaggcgaggcccagagaaacatctacagactgctgaacaccgccttcggcctggtgcacctgaccgcccacagcagcctggtgtgccccctgagcctgggcggcagcctgggcctgagacccgagccccccgtgagcttcccctacctgcactacgacgccaccctgcccttccactgcagcgccatcctggccaccgccctggacaccgtgaccgtgccctacagactgtgcagcagccccgtgagcatggtgcacctggccgacatgctgagcttctgcggcaagaaggtggtgaccgccggcgccatcatccccttccccctggcccccggccagagcctgcccgacagcctgatgcagttcggcggcgccaccccctggacccccctgagcgcctgcggcgagcccagcggcaccagatgcttcgcccagagcgtggtgctgagaggcatcgacagagcctgccacaccagccagctgacccccggcacccccccccccagcgccctgcacgcctgcaccaccggcgaggagatcctggcccagtacctgcagcagcagcagcccggcgtgatgagcagcagccacctgctgctgaccccctgcagagtggcccccccctacccccacctgttcagcagctgcagcccccccgccgtggagagcatccccgtgttcggcgccctgtgcagcagcagcagcctgcaccagaccctggaggccctggccagagacctgaccaagctggacctgagaagatgggccagcttcatggacgccggcgtggagcacgacgacgtggccgagctgctgcaggagctgcagagcctggcccagtgctaccagggcggcgacagcctggtggactag

SEQ ID NO: 298438 - DNA, 1575 bp, Artificial Sequence
  derived and/or modified sequence
atggctggcggagccagagaggttctcacattacagctggggcactttgcagggtttgtgggcgcccactggtggaatcagcaggacgccgctctcggacgggccactgacagtaaggaaccacctggtgagctgtgccctgacgtcctttaccggacaggccggaccctgcacgggcaggaaacctacaccccaaggctaatccttatggacctcaagggtagcttaagcagcttgaaggaggagggcggtttgtatcgggataagcagctggatgctgctatcgcctggcaggggaagctgaccactcataagggcagcagtcctcttcctaccgctaccacccccaagcctctcattcccacagaggccagtataagagtctggtccgatttcctgcgggtgcatctgcaccctaggtctatctgtatgattcaaaagtataatcatgatggcgaggccggacggctcgaggcctttggccagggagagtcagtgctgaaggaacctaagtaccaggaagagctggaagacaggctgcacttttacgtcgaggagtgcgactatctgcaggggtttcagatcttatgtgacctacacgatggcttctccggcgtgggcgccaaagcggctgaactgctgcaagacgagtacagtggcagggggatcataacctggggcctgctgcccggtccatatcatcgcggggaagcacagcgcaacatttatcggttgctgaacacagctttcggtcttgttcatttgacggcacacagttctcttgtctgtcccttgtcactaggtggatccttgggtctgaggccagagcctcctgtgtctttcccatatttgcactacgacgctaccctcccatttcactgtagcgccatactcgcaacagctcttgataccgtgacagtgccataccggctctgctcatcgcctgtgagcatggtgcatctggcagatatgttgagcttctgtggcaaaaaggtggtaacagccggagccattattccgttcccattagctccaggacagtctctcccagactctctaatgcagtttggcggtgctaccccatggacacccctgagcgcctgtggagaaccgtccgggacacgatgttttgcccagagtgttgttctgcgtggcatcgatcgagcttgtcatacctcacagctgactcccggtacaccacctccctccgccctccacgcatgcacgacaggggaagaaatcctagctcaatacctacagcagcagcagcctggcgtaatgagcagttcacacttgctcctgacaccctgtcgtgtggcacctccttatcctcaccttttcagcagctgctccccacccgctgtggaaagcatccccgtgtttggcgctctctgcagttccagcagcttgcatcagactctggaagcattagcacgagacctgaccaaactggatctacgacgctgggcatccttcatggatgccggggttgaacatgatgatgttgccgaattgctccaggagttacagtctctcgcccagtgctaccagggtggagatagcctggttgactag

SEQ ID NO: 298439 - DNA, 2245 bp, Artificial Sequence
  derived and/or modified sequence
agcgcagtatggcgggcggggcccgggaggtgctcacactgcagttgggacattttgccggtttcgtgggcgcgcactggtggaaccagcaggatgctgcgctgggccgagcgaccgattccaaggagcccccgggagagctgtgccccgacgtcctgtatcgtacgggccggacgctgcacggccaggagacctacacgccgcgactcatcctcatggatctgaagggtagtttgagctccctaaaagaggaaggtggactctacagggacaaacagttggatgctgcaatagcatggcaggggaagctcaccacacacaaaggttcctcaccactccccaccgctacaactccaaaaccacttatccctacagaggccagcatcagggtctggtcagacttcctcagagtccatctccatccccggagcatctgtatgattcagaagtacaaccacgatggggaagcaggtcggctggaggcttttggccaaggggaaagtgtcctaaaggaacccaagtaccaggaagagctggaggacaggctgcatttctacgtggaggaatgtgactacttgcagggcttccagatcctgtgtgacctgcacgatggcttctctggggtaggcgcgaaggcggcagagctgctacaagatgaatattcagggcggggaataataacctggggcctgctacctggtccctaccatcgtggggaggcccagagaaacatctatcgtctattaaacacagcttttggtctcgtgcacctgactgctcacagctctcttgtctgccccttgtccttgggtgggagcctgggcctgcgacccgagccacctgtcagcttcccttacctgcattatgatgccactctgcccttccactgcagtgccatcctggctacagccctggacacagtcactgttccttatcgcctgtgttcctctccagtttccatggttcatctggctgacatgctgagcttctgtgggaaaaaggtggtgacagcaggagcaatcatccctttccccttggctccaggccagtcccttcctgattccctgatgcagtttggaggagccaccccatggaccccactgtctgcatgtggggagccttctggaacacgttgctttgcccagtcagtggtgctgaggggtatagacagagcatgccacacaagccagctcaccccagggacacctccaccctctgcccttcatgcatgtaccactggggaagaaatcttggctcagtatttacaacagcagcagcctggagtcatgagttcttcccatctgctgctgactccctgcagggtggctcctccttacccccacctcttctcaagctgcagtccaccggcagtggagagcatcccagtgtttggggcactgtgttcctcttcgtccctgcaccagaccctggaagccttggccagagacctcaccaaactcgacttgcggcgctgggccagcttcatggatgctggagtggagcacgatgacgtagcagagctgctgcaggagctacaaagcctggcccagtgctaccagggtggtgacagcctcgtggactaaagttcccagtgtgggagaaaggagctagtttgcaataaaaacagctggatgcaggagcccagtgtcttcatgcagaggagctcaatgtcgcgggactagctacaccaacatatgcactttttacatttagaaacactgtgattagaccacagaacaataaatatgtgccatcagaccaaaaaaaagtagagaaaggagctgaactccactctcgatgctacttacagaggacatctgtaaagtcttcataaaagaccttgaatgatgcctaggatggcagagcccctgggtcctactccatcctccagcctttgtccttgtcctggcctcctgctctccagatctgtaaactgggctcaaggactgtacaagcagagtacaactacccgcctccccggtgccagggcgcctgttgggtttggtcctgtgtagatgattcccagagtctcattcatccagctcctcttcagacagaaggtccccatggtcagacagctggtctgcattgctggtactggttgcatcatcctcatcctcagagctggcttcacaggcagtgtggaagagctgcatgagttctcgaaaatggtgggaaacctaagaaaggaggagggctgtattcactgatccttagtaacatgttaacatttatgaagcactat

SEQ ID NO: 298440 - DNA, 1575 bp, Artificial Sequence
  derived and/or modified sequence
atggccggcggggcccgggaggtgctgaccctgcagctgggccactttgctggctttgtgggcgcccactggtggaaccagcaggatgctgccctgggccgggccacagacagcaaggagcccccaggagagctgtgcccagatgtgctgtacagaactggaagaaccctgcacggccaggagacctacacccccaggctcatcctgatggacctgaagggcagcctgagcagcctgaaggaggagggcggcctgtacagagacaagcagctggatgctgccatcgcctggcagggcaagctgaccacccacaagggcagcagccccctgcccacagccaccacccccaagcccctcatccccacagaggccagcatccgggtgtggagcgacttcctgcgggtgcacctgcaccccaggagcatctgcatgatccagaagtacaaccatgatggagaggccggccgcctggaggccttcggccagggcgagagcgtgctgaaggagcccaagtaccaggaggagctggaggaccggctgcacttctacgtggaggagtgtgactacctgcagggcttccagatcctgtgtgacctgcatgatggcttcagcggcgtgggcgccaaggctgctgagctgctgcaggatgagtacagcggccggggcatcatcacctggggcctgctgcccggcccctaccacagaggagaggcccagaggaacatctaccgcctgctgaacacagccttcggcctggtgcacctgacagcccacagcagcctggtgtgccccctgagcctgggcggcagcctgggcctgcggcctgagccccctgtgtccttcccctacctgcactatgatgccaccctgcccttccactgcagcgccatcctggccacagccctggacacagtgacagtgccctaccgcctgtgcagcagccctgtgtccatggtgcacctggccgacatgctgtccttctgtgggaagaaggtggtgacagctggggccatcatccccttccccctggcccctggccagagcctgcctgacagcctgatgcagtttggaggagccaccccctggacccccctgagcgcctgtggggagcccagcggcacccgctgctttgcccagagcgtggtgctgcggggcatcgaccgggcctgccacaccagccagctgaccccaggcaccccacctccttctgccctgcacgcctgcaccaccggggaggagatcctggcccagtacctgcagcagcagcagcccggggtgatgagcagcagccacctgctgctgaccccctgccgggtggccccaccctacccccacctgttcagcagctgcagccccccagctgtggagagcatccctgtgtttggagccctgtgcagcagcagcagcctgcaccagaccctggaggccctggcccgggacctgaccaagctggacctgcggcgctgggccagcttcatggatgctggggtggagcatgatgatgtggccgagctgctgcaggagctgcagagcctggcccagtgctaccagggcggggacagcctggtggactag

SEQ ID NO: 298441 - DNA, 1575 bp, Artificial Sequence
  derived and/or modified sequence
atggccggcggcgcccgggaggtgctgaccctgcagctgggccacttcgctggctttgtcggagcccattggtggaaccagcaggatgctgctctgggccgcgccacagactccaaggagcctcccggcgagctctgccccgatgtactatacagaacaggccggactctccacggacaggagacctacacaccgaggctcattctgatggatcttaaaggctcattgtcttctctgaaagaagaggggggtctgtatcgggacaagcagctcgatgcagccatcgcctggcaaggcaagttgaccacccataaaggaagctctccactgcccaccgcaaccacccccaaacccctgattcctacagaagcatctattcgcgtttggtcagattttttgcgggtgcatcttcatccaaggagcatctgcatgatccagaagtacaaccacgatggtgaagccggcagactggaggcctttggtcaaggcgagtccgttctgaaggagcccaaatatcaggaggaattggaagataggttgcacttctacgtcgaggaatgtgactatctgcaggggttccagatattatgtgacctgcacgacgggttcagtggcgtcggggctaaggccgctgaactcctacaggatgaatattccggacgaggcataattacctggggccttttgcccggtccctatcaccggggtgaggctcagagaaatatctacaggctgctgaatacagctttcggcctggtccacctgactgcacatagctccttggtttgcccactcagcttgggcggctctctcgggttgcggccagagcctcctgtcagcttcccttacctccactatgacgcaactcttccttttcattgcagtgcaatcttggcaacagccctagataccgtgacagtcccttatcgactatgttcctcacccgtcagcatggtgcacctcgcagatatgctgagcttttgtgggaaaaaagtggtgacagctggcgccataatcccttttccccttgcccccggacaaagtttacctgactcactcatgcagttcgggggcgcaacaccatggacccccctcagcgcatgtggtgagccatcaggaacaaggtgcttcgctcagtccgttgttctcaggggaattgaccgggcctgccacaccagccagctgactcccggcacgcctcccccctctgctctgcacgcttgtaccacaggcgaggaaattctcgcgcagtatctgcagcagcaacagcctggcgtgatgagtagctcacatctgttactcaccccatgccgcgttgctccaccctacccacatcttttctccagctgttctcccccagccgtggagagtattccggtgttcggggccctttgttcaagttcctccctgcaccagacgctggaggcgctggcccgagacctaaccaaattagacctgcgccgatgggcttctttcatggatgctggcgtggagcacgacgacgtcgccgagctccttcaggaactgcagtccctggctcagtgctaccagggaggcgattctcttgttgactag

SEQ ID NO: 298442 - DNA, 1575 bp, Artificial Sequence
  derived and/or modified sequence
atggccggaggagcccgagaggtgcttacattgcagctcggacactttgctggctttgtgggggcacattggtggaaccagcaggatgctgctctgggacgagccactgatagcaaggagccgcctggagaattatgccctgatgtgctgtaccggacgggaaggactctgcacgggcaggaaacatacacccctcggcttatcctgatggatctgaaaggctctctgtcttcgctgaaagaagaaggcggactctatcgggataagcagttggacgccgctattgcctggcagggcaaactgacaacccacaaaggaagtagtccattgcccaccgctaccacacctaaacctctcatacccaccgaggcatccatccgcgtatggagtgactttctaagagtccatctgcacccgcgaagcatctgtatgattcagaagtataaccatgacggcgaagctggccgtctggaagcttttggccagggggagtcagtcctaaaagaaccgaaataccaagaagaactggaggaccgtttacacttctatgtggaggagtgcgactacctacaaggcttccagatactatgtgatctacacgacggattttctggcgtgggtgctaaggctgctgaactgctgcaagacgaatatagtggtagggggatcatcacatggggtctgctccctggaccttatcacagaggggaagcacagcgaaacatttataggttattgaacaccgcctttggattagtccatttaactgcacacagcagtctggtgtgccctctgagtctgggcggttccctgggactcagaccagaaccccctgtcagctttccctatctacactacgatgcaaccctgccttttcactgttccgccatcctcgccactgcgctggacactgtcacggtaccatacaggttatgctcgtctcccgtttctatggtgcacctggccgatatgctttcattttgtggaaaaaaggtggtcaccgcgggtgccattattcctttccctcttgctcctggtcaatcattgcccgatagtcttatgcagttcgggggtgccactccgtggactcctttgtcagcttgcggcgagccctctggaacacgatgctttgcccaatctgtggtgttacgaggaatcgatagggcatgccacactagccagctgacgcctggaacccctcctccttccgcgctgcatgcttgtacgactggggaggaaattctggcacagtatttacagcagcaacagcctggcgtcatgagctcctcccacctccttctgactccctgccgggtcgcgcctccgtacccccaccttttcagcagctgtagtccgccagccgtagaatcaattcccgtattcggcgctctctgcagttcttcctcacttcaccagacactcgaggcccttgcacgggatcttacaaaattagacctccgtagatgggcttcgttcatggatgcaggcgtggagcacgacgatgtagctgagctcctacaagaactgcagtctctcgcccagtgttatcaaggtggggactcactagtagactag

SEQ ID NO: 298443 - protein, 315 aa, Artificial Sequence
  derived and/or modified sequence
MAGGAREVLTLQLGHFAGFVGAHWWNQQDAALGRATDSKEPPGELCPDVLYRTGRTLHGQETYTPRLILMDLKGSLSSLKEEGGLYRDKQLDAAIAWQGKLTTHKEELYPKNPYLQDFLSAEGVLSSDGVWRVKSIPNGKGSSPLPTATTPKPLIPTEASIRVWSDFLRVHLHPRSICMIQKYNHDGEAGRLEAFGQGESVLKEPKYQEELEDRLHFYVEECDYLQVVAWQCALQGGSSSHPANYLSSLTPAQGFQILCDLHDGFSGVGAKAAELLQDEYSGRGIITWGLLPGPYHRGVSGTWRSKHSNPIGRVA

SEQ ID NO: 298444 - DNA, 1421 bp, Artificial Sequence
  derived and/or modified sequence
aatcggctaggagcagcgagcggcgcggctgaggcgcggcggccccgtggagcagcgcagtatggcgggcggggcccgggaggtgctcacactgcagttgggacattttgccggtttcgtgggcgcgcactggtggaaccagcaggatgctgcgctgggccgagcgaccgattccaaggagcccccgggagagctgtgccccgacgtcctgtatcgtacgggccggacgctgcacggccaggagacctacacgccgcgactcatcctcatggatctgaagggtagtttgagctccctaaaagaggaaggtggactctacagggacaaacagttggatgctgcaatagcatggcaggggaagctcaccacacacaaagaggaactctatcccaagaacccttatctccaagactttctgagtgcagagggagtgctgagtagtgatggtgtctggagggtcaaatccattcccaatggcaaaggttcctcaccactccccaccgctacaactccaaaaccacttatccctacagaggccagcatcagggtctggtcagacttcctcagagtccatctccatccccggagcatctgtatgattcagaagtacaaccacgatggggaagcaggtcggctggaggcttttggccaaggggaaagtgtcctaaaggaacccaagtaccaggaagagctggaggacaggctgcatttctacgtggaggaatgtgactacttgcaggtagtggcgtggcaatgtgcactccagggtggaagctcttctcatcctgctaactatctttcgtcactcacccccgcccagggcttccagatcctgtgtgacctgcacgatggcttctctggggtaggcgcgaaggcggcagagctgctacaagatgaatattcagggcggggaataataacttggggcctgctacctggtccctaccatcgtggggtgagtggaacttggaggagtaaacattcgaatcccattgggagagtggcttaatgcaaactggtttttttctttacgaggaggcccagagaaacatctatcgtctattaaacacagcttttggtctcgtgcacctgactgctcacagctctcgtctgccccttgtccttgggtgggagcctgggcctgcgacctgagccacctgtcaacttcccttacctgcattatgatgtaagtctcggtgctcttgttctgactgcggcaggctacagggcctcctcatgctcccagtcagtcgctgtctgtactggctctgttcctgaggcccgagcttgaactcagctgtgatgtggcctctcagatcacactgtcctatgcttgtccagcctggggtcaaacatacccctgattcatcccctgggtctctctggtgttaacattctgcctccacacattcttttccagg

SEQ ID NO: 298445 - DNA, 948 bp, Artificial Sequence
  derived and/or modified sequence
atggccggcggcgccagagaggtgctgaccctgcagctgggccacttcgccggcttcgtgggcgcccactggtggaaccagcaggacgccgccctgggcagagccaccgacagcaaggagccccccggcgagctgtgccccgacgtgctgtacagaaccggcagaaccctgcacggccaggagacctacacccccagactgatcctgatggacctgaagggcagcctgagcagcctgaaggaggagggcggcctgtacagagacaagcagctggacgccgccatcgcctggcagggcaagctgaccacccacaaggaggagctgtaccccaagaacccctacctgcaggacttcctgagcgccgagggcgtgctgagcagcgacggcgtgtggagagtgaagagcatccccaacggcaagggcagcagccccctgcccaccgccaccacccccaagcccctgatccccaccgaggccagcatcagagtgtggagcgacttcctgagagtgcacctgcaccccagaagcatctgcatgatccagaagtacaaccacgacggcgaggccggcagactggaggccttcggccagggcgagagcgtgctgaaggagcccaagtaccaggaggagctggaggacagactgcacttctacgtggaggagtgcgactacctgcaggtggtggcctggcagtgcgccctgcagggcggcagcagcagccaccccgccaactacctgagcagcctgacccccgcccagggcttccagatcctgtgcgacctgcacgacggcttcagcggcgtgggcgccaaggccgccgagctgctgcaggacgagtacagcggcagaggcatcatcacctggggcctgctgcccggcccctaccacagaggcgtgagcggcacctggagaagcaagcacagcaaccccatcggcagagtggcctag

SEQ ID NO: 298446 - DNA, 444 bp, Artificial Sequence
  derived and/or modified sequence
atggccggcggcgccagagaggtgctgaccctgcagctgggccacttcgccggcttcgtgggcgcccactggtggaaccagcaggacgccgccctgggcagagccaccgacagcaaggagccccccggcgagctgtgccccgacgtgctgtacagaaccggcagaaccctgcacggccaggagacctacacccccagactgatcctgatggacctgaagggcagcctgagcagcctgaaggaggagggcggcctgtacagagacaagcagctggacgccgccatcgcctggcagggcaagctgaccacccacaaggaggagctgtaccccaagaacccctacctgcaggacttcctgagcgccgaggtgagagccagcgtgctgaacttcctgaccagatgccacaacctgagagtgagcatcggcgccggcagcgccgagtag

SEQ ID NO: 298447 - DNA, 948 bp, Artificial Sequence
  derived and/or modified sequence
atggcgggaggtgctcgcgaagtgcttacattgcaactgggacatttcgccggattcgtgggggcgcactggtggaaccagcaggacgctgccctaggaagagctaccgatagcaaagagcctcctggagagctgtgccccgatgtcctgtacaggaccggtcggaccctccacggccaggaaacatacacgccgcgtctgatcctgatggacttgaaggggagtctgagctctctgaaggaagagggcggcttgtacagggacaagcagttagatgctgctattgcttggcaaggcaaactgacgacacataaggaggagctgtatcccaaaaacccttatctccaggacttcttatccgctgagggtgttctaagtagcgatggcgtgtggcgcgtcaagtctattccaaacgggaaggggtccagcccgctccctaccgccaccactccgaaaccactgattcctacagaggcatctatcagagtgtggtcagactttttacgagttcatctgcacccccgctcaatatgtatgatccagaagtacaatcacgatggagaggctggaaggctggaggcattcgggcagggagaaagcgtgttaaaggaaccaaaataccaggaggagctcgaagataggctgcacttttacgtagaggaatgcgattaccttcaggtcgtagcctggcagtgcgccctgcaggggggaagctcaagccaccccgctaactacctctcttccctgacccctgcccagggttttcagatcctctgcgatttacatgatggtttctcgggggtgggcgcaaaggccgccgaactgctccaggatgagtacagtggcaggggtatcattacttggggcctcctgccaggtccctaccatcgtggggtgagcggaacatggcgcagcaaacatagcaacccaattgggcgtgtcgcctag

SEQ ID NO: 298448 - DNA, 444 bp, Artificial Sequence
  derived and/or modified sequence
atggctggtggagccagagaagttttaacattgcaactggggcatttcgctggcttcgttggggctcactggtggaatcagcaggacgccgctctaggacgtgcgacagacagcaaagagccccccggcgaactgtgtccagatgtattatataggacagggcgcacactacatggtcaggagacctacactccacggttgatcctcatggatctgaaaggctctctgagctcattaaaggaagagggcgggctctaccgagataagcagctggatgccgccatcgcctggcaaggaaagcttaccacacacaaggaggagctttatccaaagaatccttacctgcaggactttctgagcgcggaggtgagggcctccgttctcaacttcctgactcgctgccacaacttgcgggtgtcgataggagctgggtcggcggaatag

SEQ ID NO: 298449 - DNA, 948 bp, Artificial Sequence
  derived and/or modified sequence
atggccggcggggcccgggaggtgctgaccctgcagctgggccactttgctggctttgtgggcgcccactggtggaaccagcaggatgctgccctgggccgggccacagacagcaaggagcccccaggagagctgtgcccagatgtgctgtacagaactggaagaaccctgcacggccaggagacctacacccccaggctcatcctgatggacctgaagggcagcctgagcagcctgaaggaggagggcggcctgtacagagacaagcagctggatgctgccatcgcctggcagggcaagctgaccacccacaaggaggagctgtaccccaagaacccctacctgcaggacttcctgtctgctgagggcgtgctgagcagtgatggagtgtggagggtgaagagcatccccaacgggaagggcagcagccccctgcccacagccaccacccccaagcccctcatccccacagaggccagcatccgggtgtggagcgacttcctgcgggtgcacctgcaccccaggagcatctgcatgatccagaagtacaaccatgatggagaggccggccgcctggaggccttcggccagggcgagagcgtgctgaaggagcccaagtaccaggaggagctggaggaccggctgcacttctacgtggaggagtgtgactacctgcaggtggtggcctggcagtgtgccctgcagggcggcagcagcagccacccagccaactacctgagcagcctgaccccagcccagggcttccagatcctgtgtgacctgcatgatggcttcagcggcgtgggcgccaaggctgctgagctgctgcaggatgagtacagcggccggggcatcatcacctggggcctgctgcccggcccctaccaccggggcgtgtctggcacctggaggagcaagcacagcaaccccatcggccgggtggcctag

SEQ ID NO: 298450 - DNA, 444 bp, Artificial Sequence
  derived and/or modified sequence
atggccggcggggcccgggaggtgctgaccctgcagctgggccactttgctggctttgtgggcgcccactggtggaaccagcaggatgctgccctgggccgggccacagacagcaaggagcccccaggagagctgtgcccagatgtgctgtacagaactggaagaaccctgcacggccaggagacctacacccccaggctcatcctgatggacctgaagggcagcctgagcagcctgaaggaggagggcggcctgtacagagacaagcagctggatgctgccatcgcctggcagggcaagctgaccacccacaaggaggagctgtaccccaagaacccctacctgcaggacttcctgtctgctgaggtgcgggcctctgtgctgaacttcctgacccgctgccacaacctgcgggtgtccattggagctggcagcgctgagtag

SEQ ID NO: 298451 - DNA, 948 bp, Artificial Sequence
  derived and/or modified sequence
atggccggcggcgcccgggaggtgctgaccctgcagctgggccacttcgcgggttttgttggcgctcactggtggaatcagcaagacgctgctttaggccgcgcaactgactccaaggaaccacctggggagttgtgtccggacgtgctgtaccgtactgggcgtacattgcacggacaagaaacatacacacctcgtcttatactgatggatctgaaaggatccctgtcttctctcaaggaagaggggggcctgtatcgcgacaaacagctggatgcggccatcgcttggcagggtaagctcactacccacaaagaggagttgtatccgaaaaacccctacctgcaggacttcctcagtgccgagggcgtcctgtcgtcagatggagtgtggcgtgtcaagagcatacccaatggaaagggctcaagcccactgccgaccgctactaccccaaagcccctgatccccaccgaggctagtataagagtgtggtctgactttcttagagtccatctacaccctcgaagcatttgcatgatccagaaatataatcatgatggtgaggccggaaggttggaagctttcggacagggagagagcgttctcaaggaaccgaaataccaagaggagcttgaagaccgattacatttttacgtggaggaatgtgattatctgcaggtggtggcatggcagtgtgcactgcaagggggatcttccagccatcctgctaattatctctcgtcgctaaccccagctcagggcttccagatactgtgcgatcttcacgacggcttctctggcgttggtgctaaggccgctgagctgctacaagacgagtattccgggcggggcatcatcacatggggcttgttgcctgggccctatcatagaggagtaagcgggacatggaggtccaagcacagtaatcctatcggaagagtggcctag

SEQ ID NO: 298452 - DNA, 444 bp, Artificial Sequence
  derived and/or modified sequence
atggccggcggcgcccgggaggtgctgaccctgcagctgggccactttgcaggttttgtgggagcacactggtggaaccagcaggacgccgcccttgggagagcaactgactctaaagagccacccggtgagctgtgccctgacgttctgtacaggacaggccggacactacatggacaagagacctacactcctcgccttatcctcatggacctaaagggctctctgtcatctctgaaggaagaggggggcctgtaccgtgataagcagttagacgcagccattgcctggcagggcaaactgacaactcacaaggaggaactttaccctaagaatccatacctgcaggattttctttctgctgaagtaagagcctccgtgctgaatttcctcactcgctgccacaacttgagagtctcaatcggggcggggagcgccgaatag

SEQ ID NO: 298453 - DNA, 948 bp, Artificial Sequence
  derived and/or modified sequence
atggccggaggagcaagggaagtactaactctgcagctgggtcactttgctggttttgtcggtgctcactggtggaaccagcaggacgcggcactgggccgagcaacagattctaaggaacctcctggtgaattgtgtccagacgtgctgtataggacagggagaactctccatggccaggaaacttatacacctagactgattctgatggatctgaagggctcactttcatctcttaaggaagagggcggactatacagagacaagcagctggacgctgcaatcgcttggcaaggtaaattgactactcataaggaagaactctaccccaagaatccctatctacaggacttcttgtcagccgaaggggttttatcttccgacggggtttggcgcgtcaaatcgatccccaacggcaagggttcttcacccctccctaccgcaactactccaaagcctcttattccaacagaggcctccattcgagtgtggagcgacttccttcgggtccatctgcaccccaggagtatatgcatgattcagaaatacaatcacgatggcgaggccggtcgcctggaggcttttgggcagggggagagcgtgctaaaagaacctaagtaccaggaagaactcgaagacagactacacttctacgtcgaagaatgcgactatctccaggtggttgcttggcagtgcgcgcttcaaggaggatctagctcacacccagctaattatttgtctagtctgaccccagcccagggatttcagatcctgtgtgatctgcacgacggcttttcaggggtgggcgctaaagctgcagagctgctacaggacgaatattctggccgaggtatcataacctggggacttcttcccggaccctaccatcgcggtgtgtcgggaacttggcgctccaagcattctaatccgataggcagagtcgcatag

SEQ ID NO: 298454 - DNA, 444 bp, Artificial Sequence
  derived and/or modified sequence
atggctggtggcgcaagagaagtcctgacattacagctcggccacttcgcgggatttgtgggcgctcattggtggaaccagcaggatgccgcacttggcagggcaacagattcaaaagagccccctggagagttatgccctgatgttctctataggaccggaaggacccttcatggccaggagacttacacaccacgactgatcctgatggacttgaagggaagcctgagcagtctgaaggaggaggggggtctttacagggataaacagctggatgctgcaattgcttggcagggtaaactgaccacacacaaggaagagctctatcctaaaaatccgtaccttcaggattttctctccgcggaagtgcgggcttctgtcctcaactttctgacgcgctgtcacaacttaagagtgtctatcggcgcagggtccgcggagtag

SEQ ID NO: 298455 - protein, 750 aa, Artificial Sequence
  derived and/or modified sequence
MEDLFETFQDEMGFSNMEDDGPEEEERVAEPQANFNTPQALRFEELLANLLNEQHQIAKELFEQLKMKKPSAKQQKEVEKVKPQCKEVHQTLILDPAQRKRLQQQMQQHVQLLTQIHLLATCNPNLNPEASSTRICLKELGTFAQSSIALHHQYNPKFQTLFQPCNLMGAMQLIEDFSTHVSIDCSPHKTVKKTANEFPCLPKQVAWILATSKVFMYPELLPVCSLKAKNPQDKILFTKAEDNLLALGLKHFEGTEFLNPLISKYLLTCKTARQLTVRIKNLNMNRAPDNIIKFYKKTKQLPVLGKCCEEIQPHQWKPPIEREEHRLPFWLKASLPSIQEELRHMADGAREVGNMTGTTEINSDQGLEKDNSELGSETRYPLLLPKGVVLKLKPVADRFPKKAWRQKRSSVLKPLLIQPSPSLQPSFNPGKTPAQSTHSEAPPSKMVLRIPHPIQPATVLQTVPGVPPLGVSGGESFESPAALPAMPPEARTSFPLSESQTLLSSAPVPKVMMPSPASSMFRKPYVRRRPSKRRGARAFRCIKPAPVIHPASVIFTVPATTVKIVSLGGGCNMIQPVNAAVAQSPQTIPIATLLVNPTSFPCPLNQPLVASSVSPLIVSGNSVNLPIPSTPEDKAHMNVDIACAVADGENAFQGLEPKLEPQELSPLSATVFPKVEHSPGPPPVDKQCQEGLSENSAYRWTVVKTEEGRQALEPLPQGIQESLNNSSPGDLEEVVKMEPEDATEEISGFL

SEQ ID NO: 298456 - protein, 739 aa, Artificial Sequence
  derived and/or modified sequence
MGFSNMEDDGPEEEERVAEPQANFNTPQALRFEELLANLLNEQHQIAKELFEQLKMKKPSAKQQKEVEKVKPQCKEVHQTLILDPAQRKRLQQQMQQHVQLLTQIHLLATCNPNLNPEASSTRICLKELGTFAQSSIALHHQYNPKFQTLFQPCNLMGAMQLIEDFSTHVSIDCSPHKTVKKTANEFPCLPKQVAWILATSKVFMYPELLPVCSLKAKNPQDKILFTKAEDNLLALGLKHFEGTEFLNPLISKYLLTCKTARQLTVRIKNLNMNRAPDNIIKFYKKTKQLPVLGKCCEEIQPHQWKPPIEREEHRLPFWLKASLPSIQEELRHMADGAREVGNMTGTTEINSDQGLEKDNSELGSETRYPLLLPKGVVLKLKPVADRFPKKAWRQKRSSVLKPLLIQPSPSLQPSFNPGKTPAQSTHSEAPPSKMVLRIPHPIQPATVLQTVPGVPPLGVSGGESFESPAALPAMPPEARTSFPLSESQTLLSSAPVPKVMMPSPASSMFRKPYVRRRPSKRRGARAFRCIKPAPVIHPASVIFTVPATTVKIVSLGGGCNMIQPVNAAVAQSPQTIPIATLLVNPTSFPCPLNQPLVASSVSPLIVSGNSVNLPIPSTPEDKAHMNVDIACAVADGENAFQGLEPKLEPQELSPLSATVFPKVEHSPGPPPVDKQCQEGLSENSAYRWTVVKTEEGRQALEPLPQGIQESLNNSSPGDLEEVVKMEPEDATEEISGFL

SEQ ID NO: 298457 - DNA, 2253 bp, Artificial Sequence
  derived and/or modified sequence
atggaggacctgttcgagaccttccaggacgagatgggcttcagcaacatggaggacgacggccccgaggaggaggagagagtggccgagccccaggccaacttcaacaccccccaggccctgagattcgaggagctgctggccaacctgctgaacgagcagcaccagatcgccaaggagctgttcgagcagctgaagatgaagaagcccagcgccaagcagcagaaggaggtggagaaggtgaagccccagtgcaaggaggtgcaccagaccctgatcctggaccccgcccagagaaagagactgcagcagcagatgcagcagcacgtgcagctgctgacccagatccacctgctggccacctgcaaccccaacctgaaccccgaggccagcagcaccagaatctgcctgaaggagctgggcaccttcgcccagagcagcatcgccctgcaccaccagtacaaccccaagttccagaccctgttccagccctgcaacctgatgggcgccatgcagctgatcgaggacttcagcacccacgtgagcatcgactgcagcccccacaagaccgtgaagaagaccgccaacgagttcccctgcctgcccaagcaggtggcctggatcctggccaccagcaaggtgttcatgtaccccgagctgctgcccgtgtgcagcctgaaggccaagaacccccaggacaagatcctgttcaccaaggccgaggacaacctgctggccctgggcctgaagcacttcgagggcaccgagttcctgaaccccctgatcagcaagtacctgctgacctgcaagaccgccagacagctgaccgtgagaatcaagaacctgaacatgaacagagcccccgacaacatcatcaagttctacaagaagaccaagcagctgcccgtgctgggcaagtgctgcgaggagatccagccccaccagtggaagccccccatcgagagagaggagcacagactgcccttctggctgaaggccagcctgcccagcatccaggaggagctgagacacatggccgacggcgccagagaggtgggcaacatgaccggcaccaccgagatcaacagcgaccagggcctggagaaggacaacagcgagctgggcagcgagaccagataccccctgctgctgcccaagggcgtggtgctgaagctgaagcccgtggccgacagattccccaagaaggcctggagacagaagagaagcagcgtgctgaagcccctgctgatccagcccagccccagcctgcagcccagcttcaaccccggcaagacccccgcccagagcacccacagcgaggccccccccagcaagatggtgctgagaatcccccaccccatccagcccgccaccgtgctgcagaccgtgcccggcgtgccccccctgggcgtgagcggcggcgagagcttcgagagccccgccgccctgcccgccatgccccccgaggccagaaccagcttccccctgagcgagagccagaccctgctgagcagcgcccccgtgcccaaggtgatgatgcccagccccgccagcagcatgttcagaaagccctacgtgagaagaagacccagcaagagaagaggcgccagagccttcagatgcatcaagcccgcccccgtgatccaccccgccagcgtgatcttcaccgtgcccgccaccaccgtgaagatcgtgagcctgggcggcggctgcaacatgatccagcccgtgaacgccgccgtggcccagagcccccagaccatccccatcgccaccctgctggtgaaccccaccagcttcccctgccccctgaaccagcccctggtggccagcagcgtgagccccctgatcgtgagcggcaacagcgtgaacctgcccatccccagcacccccgaggacaaggcccacatgaacgtggacatcgcctgcgccgtggccgacggcgagaacgccttccagggcctggagcccaagctggagccccaggagctgagccccctgagcgccaccgtgttccccaaggtggagcacagccccggccccccccccgtggacaagcagtgccaggagggcctgagcgagaacagcgcctacagatggaccgtggtgaagaccgaggagggcagacaggccctggagcccctgccccagggcatccaggagagcctgaacaacagcagccccggcgacctggaggaggtggtgaagatggagcccgaggacgccaccgaggagatcagcggcttcctgtag

SEQ ID NO: 298458 - DNA, 2524 bp, Artificial Sequence
  derived and/or modified sequence
gaagaggaggtggagaaggcttgggctcgcgccgctgaagaaaaggaagcaaatgagctgatggaagatctgtttgaaactttccaagatgagatgggattctccaacatggaagatgatggcccagaagaggaggagcgtgtggctgagcctcaagctaactttaacacccctcaagctctacggtttgaggaactactggccaacctactaaatgaacaacatcagatagcgaaggaactatttgaacagctgaagatgaagaaaccttcagccaaacagcagaaggaggtagagaaggttaaaccccagtgtaaggaagttcatcagaccctgattctggacccagcacaaaggaagagactccagcagcagatgcagcagcatgttcagctcttgacacaaatccaccttcttgccacctgcaaccccaatctcaatccggaggccagtagcaccaggatatgtcttaaagagctgggaacctttgctcaaagctccatcgcccttcaccatcagtacaaccccaagtttcagaccctgttccaaccctgtaacttgatgggagctatgcagctgattgaagacttcagcacacatgtcagcattgactgcagccctcataaaactgtcaagaagactgccaatgaatttccctgtttgccaaagcaagtggcttggatcctggccacaagcaaggttttcatgtatccagagttacttccagtgtgttccctgaaggcaaagaatccccaggataagatcctcttcaccaaggctgaggacaatttgttagctttaggactgaagcattttgaagggactgagtttcttaaccctctaatcagcaagtaccttctaacctgcaagactgcccgccaactgacagtgagaatcaagaacctcaacatgaacagagctcctgacaacatcattaaattttataagaagaccaaacagctgccagtcctaggaaaatgctgtgaagagatccagccacatcagtggaagccacctatagagagagaagaacaccggctcccattctggttaaaggccagtctgccatccatccaggaagaactgcggcacatggctgatggtgctagagaggtaggaaatatgactggaaccactgagatcaactcagatcaaggcctagaaaaagacaactcagagttggggagtgaaactcggtacccactgctattgcctaagggtgtagtcctgaaactgaagccagttgccgaccgtttccccaagaaggcttggagacagaagcgttcatcagtcctgaaacccctccttatccaacccagcccctctctccagcccagcttcaaccctgggaaaacaccagcccaatcaactcattcagaagcccctccgagcaaaatggtgctccggattcctcacccaatacagccagccactgttttacagacagttccaggtgtccctccactgggggtcagtggaggtgagagttttgagtctcctgcagcactgcctgctatgccccctgaggccaggacaagcttccctctgtctgagtcccagactttgctctcttctgcccctgtgcccaaggtaatgatgccctcccctgcctcttccatgtttcgaaagccatatgtgagacggagaccctcaaaaagaaggggagccagggcctttcgctgtatcaaacctgcccctgttatccaccctgcatctgttatcttcactgttcctgctaccactgtgaagattgtgagccttggcggtggctgtaacatgatccagcctgtcaatgcggctgtggcccagagtccccagactattcccatcgccaccctcttggttaaccctacttccttcccctgtccattgaaccagccccttgtggcctcctctgtctcacccttaattgtttctggcaattctgtgaatcttcctataccatccacccctgaagataaggcccacatgaatgtggacattgcttgtgctgtggctgatggggaaaatgcctttcagggcctagaacccaaattagagccccaggaactatctcctctctctgctactgttttccccaaagtggaacatagcccagggcctccaccagtcgataaacagtgccaagaaggattgtcagagaacagtgcctatcgctggaccgttgtgaaaacagaggagggaaggcaagctctggagccgctccctcagggcatccaggagtctctaaacaactcttcccctggggatttagaggaagttgtcaagatggaacctgaagatgctacagaggaaatcagtggatttctttgagctaggagaataagagtctggagactgggagccttcacttcggcctccgattggtggcgcatagggtgtaaccaataggaaacccctaaagggtacttaaaccccagattttgcaactggggctcttgagcagcttgctttagcctgctcccactctgtggaatatacttttgcttcaataaatctgtgcttttattgcttcattgtttca

SEQ ID NO: 298459 - DNA, 2663 bp, Artificial Sequence
  derived and/or modified sequence
ggaggagagaagaggaggtggagaaggcttgggctcgcgccgctgaagtcggcttacccgctggccgcctcctgacaagcgggagggatccgcggtggacccagggaagcggaggagcctggcggccaccccctcttcctcacttccctgtactctcatcgctctcggcctccgacacgaaaaggaagcaaatgagctgatggaagatctgtttgaaactttccaagatgagatgggattctccaacatggaagatgatggcccagaagaggaggagcgtgtggctgagcctcaagctaactttaacacccctcaagctctacggtttgaggaactactggccaacctactaaatgaacaacatcagatagcgaaggaactatttgaacagctgaagatgaagaaaccttcagccaaacagcagaaggaggtagagaaggttaaaccccagtgtaaggaagttcatcagaccctgattctggacccagcacaaaggaagagactccagcagcagatgcagcagcatgttcagctcttgacacaaatccaccttcttgccacctgcaaccccaatctcaatccggaggccagtagcaccaggatatgtcttaaagagctgggaacctttgctcaaagctccatcgcccttcaccatcagtacaaccccaagtttcagaccctgttccaaccctgtaacttgatgggagctatgcagctgattgaagacttcagcacacatgtcagcattgactgcagccctcataaaactgtcaagaagactgccaatgaatttccctgtttgccaaagcaagtggcttggatcctggccacaagcaaggttttcatgtatccagagttacttccagtgtgttccctgaaggcaaagaatccccaggataagatcctcttcaccaaggctgaggacaatttgttagctttaggactgaagcattttgaagggactgagtttcttaaccctctaatcagcaagtaccttctaacctgcaagactgcccgccaactgacagtgagaatcaagaacctcaacatgaacagagctcctgacaacatcattaaattttataagaagaccaaacagctgccagtcctaggaaaatgctgtgaagagatccagccacatcagtggaagccacctatagagagagaagaacaccggctcccattctggttaaaggccagtctgccatccatccaggaagaactgcggcacatggctgatggtgctagagaggtaggaaatatgactggaaccactgagatcaactcagatcaaggcctagaaaaagacaactcagagttggggagtgaaactcggtacccactgctattgcctaagggtgtagtcctgaaactgaagccagttgccgaccgtttccccaagaaggcttggagacagaagcgttcatcagtcctgaaacccctccttatccaacccagcccctctctccagcccagcttcaaccctgggaaaacaccagcccaatcaactcattcagaagcccctccgagcaaaatggtgctccggattcctcacccaatacagccagccactgttttacagacagttccaggtgtccctccactgggggtcagtggaggtgagagttttgagtctcctgcagcactgcctgctatgccccctgaggccaggacaagcttccctctgtctgagtcccagactttgctctcttctgcccctgtgcccaaggtaatgatgccctcccctgcctcttccatgtttcgaaagccatatgtgagacggagaccctcaaaaagaaggggagccagggcctttcgctgtatcaaacctgcccctgttatccaccctgcatctgttatcttcactgttcctgctaccactgtgaagattgtgagccttggcggtggctgtaacatgatccagcctgtcaatgcggctgtggcccagagtccccagactattcccatcgccaccctcttggttaaccctacttccttcccctgtccattgaaccagccccttgtggcctcctctgtctcacccttaattgtttctggcaattctgtgaatcttcctataccatccacccctgaagataaggcccacatgaatgtggacattgcttgtgctgtggctgatggggaaaatgcctttcagggcctagaacccaaattagagccccaggaactatctcctctctctgctactgttttccccaaagtggaacatagcccagggcctccaccagtcgataaacagtgccaagaaggattgtcagagaacagtgcctatcgctggaccgttgtgaaaacagaggagggaaggcaagctctggagccgctccctcagggcatccaggagtctctaaacaactcttcccctggggatttagaggaagttgtcaagatggaacctgaagatgctacagaggaaatcagtggatttctttgagctaggagaataagagtctggagactgggagccttcacttcggcctccgattggtggcgcatagggtgtaaccaataggaaacccctaaagggtacttaaaccccagattttgcaactggggctcttgagcagcttgctttagcctgctcccactctgtggaatatacttttgcttcaataaatctgtgcttttattgcttcattgtttca

SEQ ID NO: 298460 - DNA, 2690 bp, Artificial Sequence
  derived and/or modified sequence
gtagggtgggggtgctggcggcggctgctttggcggcggttggtggccgtgcgggcggggagggagggggaggagagaagaggaggtggagaaggcttgggctcgcgccgctgaagtcggcttacccgctggccgcctcctgacaagcgggagggatccgcggtggacccagggaagcggaggagcctggcggccaccccctcttcctcacttccctgtactctcatcgctctcggcctccgacacgttccaagatgagatgggattctccaacatggaagatgatggcccagaagaggaggagcgtgtggctgagcctcaagctaactttaacacccctcaagctctacggtttgaggaactactggccaacctactaaatgaacaacatcagatagcgaaggaactatttgaacagctgaagatgaagaaaccttcagccaaacagcagaaggaggtagagaaggttaaaccccagtgtaaggaagttcatcagaccctgattctggacccagcacaaaggaagagactccagcagcagatgcagcagcatgttcagctcttgacacaaatccaccttcttgccacctgcaaccccaatctcaatccggaggccagtagcaccaggatatgtcttaaagagctgggaacctttgctcaaagctccatcgcccttcaccatcagtacaaccccaagtttcagaccctgttccaaccctgtaacttgatgggagctatgcagctgattgaagacttcagcacacatgtcagcattgactgcagccctcataaaactgtcaagaagactgccaatgaatttccctgtttgccaaagcaagtggcttggatcctggccacaagcaaggttttcatgtatccagagttacttccagtgtgttccctgaaggcaaagaatccccaggataagatcctcttcaccaaggctgaggacaatttgttagctttaggactgaagcattttgaagggactgagtttcttaaccctctaatcagcaagtaccttctaacctgcaagactgcccgccaactgacagtgagaatcaagaacctcaacatgaacagagctcctgacaacatcattaaattttataagaagaccaaacagctgccagtcctaggaaaatgctgtgaagagatccagccacatcagtggaagccacctatagagagagaagaacaccggctcccattctggttaaaggccagtctgccatccatccaggaagaactgcggcacatggctgatggtgctagagaggtaggaaatatgactggaaccactgagatcaactcagatcaaggcctagaaaaagacaactcagagttggggagtgaaactcggtacccactgctattgcctaagggtgtagtcctgaaactgaagccagttgccgaccgtttccccaagaaggcttggagacagaagcgttcatcagtcctgaaacccctccttatccaacccagcccctctctccagcccagcttcaaccctgggaaaacaccagcccaatcaactcattcagaagcccctccgagcaaaatggtgctccggattcctcacccaatacagccagccactgttttacagacagttccaggtgtccctccactgggggtcagtggaggtgagagttttgagtctcctgcagcactgcctgctatgccccctgaggccaggacaagcttccctctgtctgagtcccagactttgctctcttctgcccctgtgcccaaggtaatgatgccctcccctgcctcttccatgtttcgaaagccatatgtgagacggagaccctcaaaaagaaggggagccagggcctttcgctgtatcaaacctgcccctgttatccaccctgcatctgttatcttcactgttcctgctaccactgtgaagattgtgagccttggcggtggctgtaacatgatccagcctgtcaatgcggctgtggcccagagtccccagactattcccatcgccaccctcttggttaaccctacttccttcccctgtccattgaaccagccccttgtggcctcctctgtctcacccttaattgtttctggcaattctgtgaatcttcctataccatccacccctgaagataaggcccacatgaatgtggacattgcttgtgctgtggctgatggggaaaatgcctttcagggcctagaacccaaattagagccccaggaactatctcctctctctgctactgttttccccaaagtggaacatagcccagggcctccaccagtcgataaacagtgccaagaaggattgtcagagaacagtgcctatcgctggaccgttgtgaaaacagaggagggaaggcaagctctggagccgctccctcagggcatccaggagtctctaaacaactcttcccctggggatttagaggaagttgtcaagatggaacctgaagatgctacagaggaaatcagtggatttctttgagctaggagaataagagtctggagactgggagccttcacttcggcctccgattggtggcgcatagggtgtaaccaataggaaacccctaaagggtacttaaaccccagattttgcaactggggctcttgagcagcttgctttagcctgctcccactctgtggaatatacttttgcttcaataaatctgtgcttttattgcttcattgtttca

SEQ ID NO: 298461 - DNA, 2253 bp, Artificial Sequence
  derived and/or modified sequence
atggaagacctgttcgagacatttcaagacgagatgggcttttcaaacatggaggacgacggtcctgaggaagaggagcgcgtcgcagaaccacaggctaacttcaatactccccaggctctgaggttcgaggagctgctggccaacctgctaaatgagcagcatcagatcgcgaaagagctgttcgaacagctcaaaatgaagaagccttccgccaagcagcagaaagaggtcgaaaaagtgaaaccgcaatgcaaggaggtgcaccaaaccctgattctggaccctgcccagaggaagcggttacagcagcaaatgcagcagcacgtgcaattgctaactcagatccatctactcgctacatgcaatcccaacctcaatcctgaggcgagcagcactagaatttgtctgaaagaattgggaacttttgcccagagctccatagctctgcatcatcagtataacccaaagttccagacccttttccagccttgcaacctaatgggggccatgcagctgattgaggatttcagcacacacgtctcaattgactgcagtccacataaaaccgtgaagaagactgccaatgagttcccttgtctgccgaagcaagtggcctggatcctggcaacttcaaaggtttttatgtatcctgaactgttaccggtgtgtagtctgaaagctaagaacccgcaggataagatcttgttcaccaaggccgaagacaacttgctggctttggggctcaagcatttcgagggaacagaatttttaaacccactgatctctaagtacctgctgacgtgcaaaacagccagacagctgacagttagaattaagaatctgaacatgaatagggctccagacaacatcattaaattttataagaaaactaagcagctgcccgttctaggcaagtgttgcgaggaaatccagccccaccagtggaaaccacccatcgaacgggaggaacacagacttccattttggctcaaagcttccctgccttctatccaagaggagctgcggcatatggcagatggagcaagggaggtcggaaatatgactgggacaaccgagatcaactcagatcagggactagaaaaggacaactccgaactggggtctgaaacgcgatacccactgctgctcccaaagggggtcgtactgaaattgaaacctgtcgcagaccgcttccccaagaaggcctggcggcagaagcgatcttcagtgctcaagccactcctaattcagcccagcccctcacttcagcccagcttcaatcctggcaaaactcccgcccagtccacacatagcgaagcacccccatcgaagatggtgctgcgcatccctcaccctatccagccagccactgtattgcagactgttcccggcgtaccacctttgggcgtgtcaggcggagaatcattcgagagccccgcagccctcccagctatgccgccagaggcccgcacctcgttcccgctgagtgagtcacaaacactgctgagctcggcccctgttccaaaagttatgatgccctcccccgccagttccatgttccggaaaccttacgtccgcaggcggccgtcaaaacgtaggggcgcaagagcatttagatgtatcaagcccgctcccgtcatacatcccgcttccgtgatcttcactgtgccagctacaacagtgaagatagtgtctcttggcggaggctgtaatatgatccagccagtcaatgcggccgtagcccaatcacctcaaaccatcccgatcgccacactcctggtgaacccaacttcttttccttgtcccctgaatcaacccctggtggccagttctgtcagccccttgattgtcagcggcaatagtgtgaatctgcccatccccagcacccccgaagacaaagcacatatgaacgtcgatattgcttgcgctgtggcggacggcgaaaacgcattccagggtctcgagccaaagcttgaaccacaggagctgtctcctcttagcgccaccgtgttcccaaaagtggaacacagtccaggccccccacctgtcgataagcagtgtcaggaaggtctaagtgaaaactccgcttatcgctggacagttgtgaagaccgaggaagggcggcaggctctggagccccttccccaaggcattcaggagagccttaacaactcgtcgcctggcgatctggaagaggttgtaaagatggaacccgaggacgccactgaggagatctcaggttttctttag

SEQ ID NO: 298462 - DNA, 2253 bp, Artificial Sequence
  derived and/or modified sequence
atggaagacctgttcgagaccttccaagatgagatgggcttctctaatatggaggatgacgggcctgaagaagaggagagggtggccgaaccacaggcaaactttaataccccacaggcacttaggttcgaagagctcctggcaaacctcttgaacgaacagcatcagatcgcgaaagagctgtttgaacagcttaaaatgaaaaagccttctgcaaaacaacaaaaagaagttgagaaggtgaaacctcagtgcaaagaagtccaccagactctaattcttgatccagctcagaggaaacgtttgcagcaacagatgcaacagcacgtacagttattgacccagatacaccttctggctacctgcaaccccaacctgaatcctgaagccagcagcacacggatctgtctgaaagaactcggcactttcgcacagagcagcattgccttgcaccatcaatataaccctaaatttcagaccctgttccaaccatgtaacctaatgggcgccatgcaattaattgaagacttctcaacacatgttagtatcgactgctcacctcataagacagttaagaaaaccgcgaatgaatttccatgtctgcctaaacaggtggcatggatcctcgccacctcgaaagtttttatgtaccccgagctgctacctgtctgtagcctaaaggcaaagaacccacaggataagattctgttcactaaggccgaggacaatttgttggcacttggcttgaagcactttgagggtaccgaattcctcaatcccttgatcagtaaatacctccttacttgtaaaacagcgagacaattgactgtccggataaaaaacctcaacatgaatcgggctccagacaacatcattaagttctacaaaaagacaaagcaactgccggtgctaggcaagtgttgtgaagaaattcagccacatcagtggaagcccccaattgaacgggaggagcaccggctccccttctggttaaaagcttcactcccctcaatccaagaagaacttcgccacatggcagacggcgcgcgggaagtaggaaacatgacaggcacaacggagataaactcggaccaaggactggaaaaggacaactccgaactgggaagcgaaacgaggtatcctctcctcctgcccaagggcgtcgtgctgaagctgaaacccgtcgctgatagattccctaaaaaagcctggcgccaaaagagaagtagtgtgctgaaaccgctgttaattcaaccaagcccttcgctacagccctcatttaaccctgggaagacacctgctcagtctactcatagtgaggcgcctccttcgaagatggttctgaggatcccccacccgattcagcctgctacggtgctacaaacggtcccaggcgtgccaccgctgggcgtatcaggaggcgagagttttgagagcccagcagcactcccagccatgccgccagaagctagaacaagcttccccctttcagagagccagaccctcctgagtagcgccccggtccctaaggtaatgatgcctagtccagcgtcatccatgttccgcaagccatacgtgcgacgaagacccagtaaaaggcggggggcacgggcatttaggtgcatcaagccagcgcctgtaatccatcccgcttcggtcatctttaccgtgcccgctaccaccgttaaaatcgtgagcctgggcggaggctgtaatatgatacagcccgttaatgccgctgtggctcagtctcctcagacgatacccatcgcgaccctgctggtcaatccaacaagcttcccctgtcctctgaaccaaccactggtcgccagttctgttagtcccctgatagtcagcgggaattcggtcaacctccctatcccgtctacccctgaagacaaagcacacatgaatgtggatattgcctgtgcggtggcagatggagagaacgctttccagggcctagagcccaaattggaaccccaagagctgagtccgctgtctgcgacagtgtttcctaaggtcgaacattcccctgggcctcctcccgttgataaacaatgtcaggagggcctgagcgaaaacagtgcttataggtggaccgtggtgaaaacagaggaggggagacaggctcttgaacccttgcctcagggtattcaggaatctctaaataactcttcccccggggatcttgaggaggtcgtgaaaatggagccagaggatgctactgaggaaatctcaggctttctgtag

SEQ ID NO: 298463 - DNA, 2253 bp, Artificial Sequence
  derived and/or modified sequence
atggaggacctattcgaaactttccaggacgaaatggggttcagcaacatggaggacgatggccccgaggaggaagagcgggtggccgaaccccaggctaatttcaatactccccaagcacttcggtttgaagagcttctggctaatctactgaacgaacagcaccagatcgcgaaagagctcttcgaacaactcaaaatgaagaaaccttctgccaaacagcagaaagaggtcgagaaagtcaagccacagtgtaaggaagtgcaccagaccctgatactcgatcccgcccagaggaaacggctgcagcagcaaatgcagcagcacgtgcagttacttacccagattcacttactggcaacctgtaatcccaatctgaaccccgaagcttcctctacacgcatttgtctgaaggagctgggaacttttgcacagtcatcaatcgctctgcatcatcaatacaatcctaagtttcagaccctcttccaaccatgcaatctgatgggcgccatgcagttgatcgaggacttttcaacgcacgtctccattgactgcagccctcacaagaccgttaaaaaaacagctaatgaattcccctgcctcccgaagcaggtcgcatggattctggctacaagtaaggtctttatgtatcccgaactcctccctgtgtgcagcctcaaagctaagaaccctcaagacaaaattctctttaccaaagcggaggataacctgcttgcccttggcttaaaacacttcgagggcactgaattcctcaaccccctgattagcaaatatcttctgacctgtaagaccgcccgccaattaaccgtgcgtatcaagaatctgaacatgaaccgcgccccggataacataatcaagttctacaagaagacaaaacagttgcccgttctgggcaagtgttgcgaggagatacaaccacatcaatggaagccgcctattgaacgggaggagcatcgccttccgttctggctgaaagcgtcccttccttctattcaagaggaactacgtcatatggctgacggtgctagagaggtcggtaatatgactggcaccacagagatcaactcggatcaaggccttgagaaagacaactctgagctggggagtgagacacggtacccgctgctcctacctaagggcgtggtgctgaagctgaagcctgtggccgaccggttcccaaaaaaagcatggagacagaagcgctcctccgtcctgaagcctctgcttatccagccttctccctctctccaaccaagttttaatcctggcaagacccccgctcagagcacccattctgaggcgccaccttcaaagatggtccttcgcataccccatccaatccagccggctaccgttctgcaaacagtgcccggagtgccccctttgggggtgtcaggcggcgagtccttcgaatctccggcagccctgcccgctatgccaccggaggctagaacgtcctttcctttgagcgaatcccaaactcttctgtctagcgcccccgtgccgaaggtgatgatgccaagcccagcatcttccatgttcaggaagccatacgtgcgcagacgcccatccaagaggcgcggggcgcgagcttttcggtgtattaaaccagcccctgtgatccatcccgcatctgttatttttaccgtgcctgccacaaccgtgaagattgtgtccttgggaggaggttgcaacatgatccagcctgtgaatgctgcagtggctcagagtcctcaaactattcctatagcaaccctgctggtcaacccaacatcttttccttgtccacttaaccagcctctagtagcctcctcggtgtcgccgcttattgtatccgggaattccgttaatctgcctattccttccactcctgaagataaggcacatatgaatgttgatatcgcctgtgcagtagctgatggagagaatgctttccaaggtctggagcccaaactggagcctcaagaattgagccccctttccgcaacagtttttcctaaagtcgagcattcccctggacccccacccgtagataaacagtgtcaggagggtctgtctgagaattccgcctatagatggacagtcgtgaagactgaggagggccgacaggccctggaacctttaccgcaaggcattcaagagtctctcaacaattcctcgccgggtgaccttgaggaagtggtaaagatggaaccggaagatgctaccgaggagataagcggatttctttag

SEQ ID NO: 298464 - DNA, 2743 bp, Artificial Sequence
  derived and/or modified sequence
gaggagagaagaggaggtggagaaggcttgggctcgcgccgctgaagtcggcttacccgctggccgcctcctgacaagcgggagggatccgcggtggacccagggaagcggaggagcctggcggccaccccctcttcctcacttccctgtactctcatcgctctcggcctccgacacgaaaaggaagcaaatgagctgatggaagatctgtttgaaactagacagggtcttgccatgttctggaactcataggctcaagtaatcttcctgcctcaacctcccaaagtgctggaattacagttccaagatgagatgggattctccaacatggaagatgatggcccagaagaggaggagcgtgtggctgagcctcaagctaactttaacacccctcaagctctacggtttgaggaactactggccaacctactaaatgaacaacatcagatagcgaaggaactatttgaacagctgaagatgaagaaaccttcagccaaacagcagaaggaggtagagaaggttaaaccccagtgtaaggaagttcatcagaccctgattctggacccagcacaaaggaagagactccagcagcagatgcagcagcatgttcagctcttgacacaaatccaccttcttgccacctgcaaccccaatctcaatccggaggccagtagcaccaggatatgtcttaaagagctgggaacctttgctcaaagctccatcgcccttcaccatcagtacaaccccaagtttcagaccctgttccaaccctgtaacttgatgggagctatgcagctgattgaagacttcagcacacatgtcagcattgactgcagccctcataaaactgtcaagaagactgccaatgaatttccctgtttgccaaagcaagtggcttggatcctggccacaagcaaggttttcatgtatccagagttacttccagtgtgttccctgaaggcaaagaatccccaggataagatcctcttcaccaaggctgaggacaatttgttagctttaggactgaagcattttgaagggactgagtttcttaaccctctaatcagcaagtaccttctaacctgcaagactgcccgccaactgacagtgagaatcaagaacctcaacatgaacagagctcctgacaacatcattaaattttataagaagaccaaacagctgccagtcctaggaaaatgctgtgaagagatccagccacatcagtggaagccacctatagagagagaagaacaccggctcccattctggttaaaggccagtctgccatccatccaggaagaactgcggcacatggctgatggtgctagagaggtaggaaatatgactggaaccactgagatcaactcagatcaaggcctagaaaaagacaactcagagttggggagtgaaactcggtacccactgctattgcctaagggtgtagtcctgaaactgaagccagttgccgaccgtttccccaagaaggcttggagacagaagcgttcatcagtcctgaaacccctccttatccaacccagcccctctctccagcccagcttcaaccctgggaaaacaccagcccaatcaactcattcagaagcccctccgagcaaaatggtgctccggattcctcacccaatacagccagccactgttttacagacagttccaggtgtccctccactgggggtcagtggaggtgagagttttgagtctcctgcagcactgcctgctatgccccctgaggccaggacaagcttccctctgtctgagtcccagactttgctctcttctgcccctgtgcccaaggtaatgatgccctcccctgcctcttccatgtttcgaaagccatatgtgagacggagaccctcaaaaagaaggggagccagggcctttcgctgtatcaaacctgcccctgttatccaccctgcatctgttatcttcactgttcctgctaccactgtgaagattgtgagccttggcggtggctgtaacatgatccagcctgtcaatgcggctgtggcccagagtccccagactattcccatcgccaccctcttggttaaccctacttccttcccctgtccattgaaccagccccttgtggcctcctctgtctcacccttaattgtttctggcaattctgtgaatcttcctataccatccacccctgaagataaggcccacatgaatgtggacattgcttgtgctgtggctgatggggaaaatgcctttcagggcctagaacccaaattagagccccaggaactatctcctctctctgctactgttttccccaaagtggaacatagcccagggcctccaccagtcgataaacagtgccaagaaggattgtcagagaacagtgcctatcgctggaccgttgtgaaaacagaggagggaaggcaagctctggagccgctccctcagggcatccaggagtctctaaacaactcttcccctggggatttagaggaagttgtcaagatggaacctgaagatgctacagaggaaatcagtggatttctttgagctaggagaataagagtctggagactgggagccttcacttcggcctccgattggtggcgcatagggtgtaaccaataggaaacccctaaagggtacttaaaccccagattttgcaactggggctcttgagcagcttgctttagcctgctcccactctgtggaatatacttttgcttcaataaatctgtgcttttattgcttcattgtttca

SEQ ID NO: 298465 - DNA, 2555 bp, Artificial Sequence
  derived and/or modified sequence
cctcgatcccctcgccgcggtcccatggaggaggaggcgagccgcagcgccgcggcgacgaacccagggagaaaaggaagcaaatgagctgatggaagatctgtttgaaactttccaagatgagatgggattctccaacatggaagatgatggcccagaagaggaggagcgtgtggctgagcctcaagctaactttaacacccctcaagctctacggtttgaggaactactggccaacctactaaatgaacaacatcagatagcgaaggaactatttgaacagctgaagatgaagaaaccttcagccaaacagcagaaggaggtagagaaggttaaaccccagtgtaaggaagttcatcagaccctgattctggacccagcacaaaggaagagactccagcagcagatgcagcagcatgttcagctcttgacacaaatccaccttcttgccacctgcaaccccaatctcaatccggaggccagtagcaccaggatatgtcttaaagagctgggaacctttgctcaaagctccatcgcccttcaccatcagtacaaccccaagtttcagaccctgttccaaccctgtaacttgatgggagctatgcagctgattgaagacttcagcacacatgtcagcattgactgcagccctcataaaactgtcaagaagactgccaatgaatttccctgtttgccaaagcaagtggcttggatcctggccacaagcaaggttttcatgtatccagagttacttccagtgtgttccctgaaggcaaagaatccccaggataagatcctcttcaccaaggctgaggacaatttgttagctttaggactgaagcattttgaagggactgagtttcttaaccctctaatcagcaagtaccttctaacctgcaagactgcccgccaactgacagtgagaatcaagaacctcaacatgaacagagctcctgacaacatcattaaattttataagaagaccaaacagctgccagtcctaggaaaatgctgtgaagagatccagccacatcagtggaagccacctatagagagagaagaacaccggctcccattctggttaaaggccagtctgccatccatccaggaagaactgcggcacatggctgatggtgctagagaggtaggaaatatgactggaaccactgagatcaactcagatcaaggcctagaaaaagacaactcagagttggggagtgaaactcggtacccactgctattgcctaagggtgtagtcctgaaactgaagccagttgccgaccgtttccccaagaaggcttggagacagaagcgttcatcagtcctgaaacccctccttatccaacccagcccctctctccagcccagcttcaaccctgggaaaacaccagcccaatcaactcattcagaagcccctccgagcaaaatggtgctccggattcctcacccaatacagccagccactgttttacagacagttccaggtgtccctccactgggggtcagtggaggtgagagttttgagtctcctgcagcactgcctgctatgccccctgaggccaggacaagcttccctctgtctgagtcccagactttgctctcttctgcccctgtgcccaaggtaatgatgccctcccctgcctcttccatgtttcgaaagccatatgtgagacggagaccctcaaaaagaaggggagccagggcctttcgctgtatcaaacctgcccctgttatccaccctgcatctgttatcttcactgttcctgctaccactgtgaagattgtgagccttggcggtggctgtaacatgatccagcctgtcaatgcggctgtggcccagagtccccagactattcccatcgccaccctcttggttaaccctacttccttcccctgtccattgaaccagccccttgtggcctcctctgtctcacccttaattgtttctggcaattctgtgaatcttcctataccatccacccctgaagataaggcccacatgaatgtggacattgcttgtgctgtggctgatggggaaaatgcctttcagggcctagaacccaaattagagccccaggaactatctcctctctctgctactgttttccccaaagtggaacatagcccagggcctccaccagtcgataaacagtgccaagaaggattgtcagagaacagtgcctatcgctggaccgttgtgaaaacagaggagggaaggcaagctctggagccgctccctcagggcatccaggagtctctaaacaactcttcccctggggatttagaggaagttgtcaagatggaacctgaagatgctacagaggaaatcagtggatttctttgagctaggagaataagagtctggagactgggagccttcacttcggcctccgattggtggcgcatagggtgtaaccaataggaaacccctaaagggtacttaaaccccagattttgcaactggggctcttgagcagcttgctttagcctgctcccactctgtggaatatacttttgcttcaataaatctgtgcttttattgcttcattgtttca

SEQ ID NO: 298466 - DNA, 2253 bp, Artificial Sequence
  derived and/or modified sequence
atggaggacctgtttgagaccttccaggatgagatgggcttcagcaacatggaggatgatggccctgaggaggaggagcgggtggccgagccccaggccaacttcaacaccccccaggccctgcgctttgaggagctgctggccaacctgctgaatgagcagcaccagatcgccaaggagctgtttgagcagctgaagatgaagaagcccagcgccaagcagcagaaggaggtggagaaggtgaagccccagtgcaaggaggtgcaccagaccctcatcctggaccctgcccagaggaagaggctgcagcagcagatgcagcagcacgtgcagctgctgacccagatccacctgctggccacctgcaaccccaacctgaaccctgaggccagcagcacccgcatctgcctgaaggagctgggcacctttgcccagagcagcatcgccctgcaccaccagtacaaccccaagttccagaccctcttccagccctgcaacctgatgggcgccatgcagctgattgaggacttcagcacccacgtgtccattgactgcagcccccacaagacagtgaagaagacagccaatgagttcccctgcctgcccaagcaggtggcctggatcctggccaccagcaaggtgttcatgtacccagagctgctgcctgtgtgcagcctgaaggccaagaacccccaggacaagatcctcttcaccaaggccgaggacaacctgctggccctgggcctgaagcactttgagggcacagagttcctgaaccccctcatcagcaagtacctgctgacctgcaagacagcccggcagctgactgtgcgcatcaagaacctgaacatgaacagagccccagacaacatcatcaagttctacaagaagaccaagcagctgcctgtgctgggcaagtgctgtgaggagatccagccccaccagtggaagccacccatcgagcgggaggagcaccggctgcccttctggctgaaggccagcctgcccagcatccaggaggagctgcggcacatggctgatggagcccgggaggtgggcaacatgacaggcaccacagagatcaacagcgaccagggcctggagaaggacaacagcgagctgggcagcgagacccgctaccccctgctgctgcccaagggcgtggtgctgaagctgaagcctgtggccgaccgcttccccaagaaggcctggaggcagaagaggagctctgtgctgaagcccctgctgatccagcccagccccagcctgcagcccagcttcaaccctgggaagaccccagcccagagcacccacagcgaggccccacccagcaagatggtgctgcgcatcccccaccccatccagcctgccaccgtgctgcagacagtgcctggggtgccccccctgggcgtgtctggaggagagagctttgagagccctgctgccctgcctgccatgcctcctgaggcccggaccagcttccccctgtctgagagccagaccctgctgagcagcgcccctgtgcccaaggtgatgatgcccagccctgccagctccatgttcaggaagccctacgtgagaagaagacccagcaagagaagaggagcccgggccttccgctgcatcaagccagcccctgtgatccacccagccagcgtcatcttcaccgtgcctgccaccaccgtgaagatcgtgtccctgggcggcggctgcaacatgatccagcctgtgaatgctgctgtggcccagagcccccagaccatccccatcgccaccctgctggtgaaccccaccagcttcccctgccccctgaaccagcccctggtggccagctctgtgagccccctgattgtgtctggcaacagcgtgaacctgcccatccccagcaccccagaggacaaggcccacatgaatgtggacatcgcctgtgctgtggctgatggagaaaatgccttccagggcctggagcccaagctggagccccaggagctgagccccctgagcgccaccgtcttccccaaggtggagcacagccctggccccccacctgtggacaagcagtgccaggagggcctgtctgagaacagcgcctaccgctggacagtggtgaagacagaggagggccggcaggccctggagcccctgccccagggcatccaggagagcctgaacaacagcagccctggggacctggaggaggtggtgaagatggagccagaagatgccacagaggagatcagcggcttcctgtag

SEQ ID NO: 298467 - DNA, 2253 bp, Artificial Sequence
  derived and/or modified sequence
atggaggacctgttcgagaccttccaggacgagatgggcttcagcaacatggaggacgatgggcccgaggaagaagagagagtggcagagcctcaagcaaacttcaacaccccacaagccctgagattcgaagaactgttggctaacctgctgaacgagcaacaccaaattgctaaggaactgtttgaacaactaaaaatgaagaagccttcagcaaagcagcaaaaggaagtggagaaggtaaagccacagtgtaaggaagtgcatcagacccttatactcgaccctgcgcagagaaagcggttgcagcaacagatgcagcaacacgtgcagcttctaacacaaattcacctccttgccacctgcaacccaaacctcaaccccgaggcgagcagcacgcgcatttgtctcaaagaactgggaacctttgcccagagctctatcgcattgcaccaccagtataaccctaagtttcagactttatttcagccttgcaacctcatgggggcaatgcagttgatcgaggattttagcacgcatgttagcatcgattgtagcccccataaaactgttaagaaaacggccaatgagtttccttgtcttccgaagcaagtggcatggatcctcgctacctcaaaggtattcatgtaccctgagctactgccagtatgttcactgaaggccaagaatccccaagacaagatactctttactaaagccgaagataatctattagctctcgggctgaagcatttcgaaggcaccgaatttctgaatcccctgatcagcaaatacctcctgacctgtaaaacagcgagacagctgaccgtgcggataaaaaacctgaatatgaacagagcgcctgacaatattattaagttttacaaaaaaaccaagcagctcccagtgttgggcaagtgctgcgaagaaatccagccccatcagtggaaacctcctattgagagagaggagcaccgtttgcctttctggctgaaggcttctttaccatcaatccaggaggagctgagacatatggctgacggcgcaagggaagtgggaaacatgaccggcacaactgaaatcaatagtgatcagggcctggagaaggacaactcagaactgggttcagaaacacgttacccactgctcctgcccaaaggagtcgtgctgaaattgaagccagtggccgatcgctttcctaagaaggcctggcgccaaaaacggtcgagcgttctcaagcctctcctgatacaaccttcacccagcctccagcccagctttaaccccggtaaaacccctgctcagtctacccactccgaagcacccccaagcaagatggtgctccggataccacacccaatacaacctgcaaccgttttgcagacggtcccaggcgtccccccccttggcgtgtctggaggcgagagctttgagtccccagccgcgttgccagcgatgccacctgaggcaaggacatctttccctctcagtgaatcccagaccctgttgtccagtgcgcctgtccccaaggtcatgatgccgtctccggctagctcaatgttccggaaaccctacgtccgccgtagaccttccaaaagaaggggggccagggcctttaggtgcatcaagcccgccccagtcattcaccctgccagcgttatctttaccgtacccgctactactgtcaagattgtgtcccttggtggcggttgtaatatgatccagccagtgaatgccgccgtggcacagagtccccagacgattcctatcgctaccttgctcgtgaatcctacgagctttccttgccctctgaaccagcccttggtcgcatcctctgtgagccccctgatagtctccggaaattccgtgaatctgcctatcccaagcaccccagaggacaaggcgcatatgaacgtggacattgcctgtgctgtagccgacggcgagaatgccttccaggggcttgagcctaagctggagcctcaggagctgtcccccctgagtgctacagtttttcctaaggttgaacattcacctggacctccccccgttgacaagcagtgccaggagggactctccgagaactccgcctatcgttggacggtggtgaaaacagaggaaggacgacaagctctggagcccctccctcaaggaattcaggaatcactgaataatagtagccccggggacctagaagaggtcgtaaagatggaacctgaagacgcaacagaggagatctccggatttttgtag

SEQ ID NO: 298468 - DNA, 2253 bp, Artificial Sequence
  derived and/or modified sequence
atggaggacctgttcgagaccttccaggacgagatgggcttcagcaacatggaagacgacggcccagaggaagaagagagggtagctgagccacaggctaattttaacaccccgcaggccctcaggtttgaggagttactggcaaaccttttaaatgagcagcaccaaattgctaaggagttatttgaacagctgaagatgaagaagccctccgccaaacagcaaaaagaagtcgagaaggtgaaaccacaatgtaaggaggtccaccagacactcatccttgaccccgcacagcggaaacgcctgcagcagcagatgcaacagcacgtccagttgcttacccagatccacttgctagctacctgtaatcctaacctgaatcctgaggcctcctctactcgcatctgtctgaaagagttagggactttcgctcaaagctccatcgcattacaccaccagtataatcctaagtttcagaccctgtttcaaccttgtaatctgatgggcgcgatgcagctaatcgaggactttagcactcacgtgtctatcgactgcagtcctcacaaaacagtcaagaagactgccaatgaatttccttgtctgcccaaacaggttgcgtggattttggcaacatcaaaagtgtttatgtaccctgagctcttgcctgtgtgctcattgaaagcaaagaatccccaagacaagatcctcttcacaaaggccgaagacaatctgctggccttaggtttgaagcatttcgaaggcacagaatttcttaatcccctgatcagcaagtacctgctcacgtgtaagacagccaggcagctgacagttcgaatcaagaatctaaatatgaatcgggcccccgacaacatcattaagttttacaagaaaactaagcagttaccggtgctgggaaagtgttgtgaagaaattcagccgcaccaatggaagcctccaattgagcgggaggaacatcggttgcccttttggctaaaggcctcccttccttccattcaagaagaactgagacatatggccgatggcgcgcgggaagttgggaatatgactgggactacagagatcaactccgaccagggcctggaaaaggataatagtgagctgggcagtgaaacccgttatcccttattgttgcccaagggagtcgtgctcaaactgaagccggtcgcagatcgattcccgaaaaaggcatggcggcagaaacgaagcagtgttctcaagcccttactcatccagccaagcccctccttgcaacccagctttaatcccgggaagactcccgctcagtccacgcatagtgaagcccccccgagcaagatggtgcttcgtattccgcaccctattcagcccgccaccgtcctacagacagtgccaggcgtgccccctctaggcgtttcggggggggagagctttgagtccccagctgctctccccgccatgccccccgaggcccgtacaagctttcctctaagcgagtctcagacccttctttcttcagctcctgtccccaaggttatgatgccttctcctgccagcagtatgttcaggaagccctatgttaggcgccgacccagcaagagaagaggggctcgtgcgttcaggtgtattaagcctgcccccgtcattcacccagcctctgtcatatttaccgtgccagctactactgtgaagattgtatcccttgggggtggatgtaacatgatccaacctgtcaacgccgccgtagcacaaagccctcaaacaatccctatcgccacactgttagtgaaccctacgtcatttccctgcccattgaaccaaccgctcgttgcaagttcagtgtcccctttaatagtgagcggaaactctgtgaacctgcctatcccttccacaccagaagacaaagctcatatgaatgttgacattgcatgcgccgtggccgatggggaaaatgccttccagggcctggagccgaagttggagcctcaggaactgtcaccgctttctgctaccgtgttcccaaaggtcgagcatagcccaggaccccccccagtcgacaagcagtgccaggagggactcagcgaaaacagcgcttaccgatggacggtcgttaagacagaagagggaaggcaggccctggagcctctgcctcaaggcattcaggagagcctcaacaactcgagccctggtgaccttgaggaggtcgtaaaaatggaacctgaggatgccactgaagagattagcggcttcctatag

SEQ ID NO: 298469 - DNA, 2253 bp, Artificial Sequence
  derived and/or modified sequence
atggaggacctgttcgagaccttccaggacgagatgggcttcagcaatatggaggacgatggccctgaagaggaggagcgtgtggctgagccccaagccaacttcaacacaccgcaagccctacggtttgaggagttactggccaacctcctgaatgagcagcatcagattgccaaggagctatttgagcagctgaaaatgaaaaagcccagcgcgaagcagcagaaagaggtggagaaggtaaaacctcagtgcaaggaggtgcatcaaactctcatcctcgaccctgctcagcggaagcggctgcaacaacagatgcagcagcacgttcagcttctgacccagatccacttgctggccacctgcaaccctaacctgaacccagaggcatctagcaccagaatctgtctcaaagagttgggcacttttgcacagtcttcgatcgctctccaccaccagtataatccaaaattccagaccctgtttcagccatgtaacctgatgggcgcaatgcagctcatcgaggatttcagtacccacgtgtcaatcgattgctccccccataaaacggtcaagaagaccgcgaacgagttcccttgtctaccaaaacaggtcgcttggattctggcaacatcaaaagtatttatgtaccctgaactactcccagtgtgtagcctcaaggccaaaaacccccaggacaaaatactgttcacaaaagctgaggataacctgttagccctaggtttgaaacacttcgaggggaccgaatttctgaaccctctgatcagcaagtatctactcacatgcaagaccgcccgccagctgacggtgagaattaaaaaccttaacatgaacagagctcctgataacattatcaagttctataaaaagacaaaacagcttcctgtgctgggcaaatgctgtgaagagatccagccccaccaatggaaacctcccattgaaagagaggagcatcggcttcccttctggctgaaagccagcctcccctcaattcaggaagaactgaggcacatggcagatggagcccgggaagttggaaatatgacgggaacgacggagatcaatagtgatcaaggcctagagaaggacaactctgagcttggctctgagacaagatacccgcttttattgccgaaaggtgtggttctcaagttgaagcccgtggctgatcgcttccccaagaaggcctggcgccagaagcgctcaagcgtgctgaaacccctgctgattcagcccagcccttctttgcaacccagcttcaaccccggcaaaactcctgcccaatccacgcactctgaggccccacccagcaagatggtactcagaattccccatcctattcagccggcgaccgtcctgcagaccgtgcctggcgttcctcccctcggcgttagcggaggcgagtctttcgagtctccagccgctctacccgccatgccgcctgaggcgcgcaccagttttcccctgtccgagtcccagacactcctatcgtctgccccagtccctaaagtgatgatgcctagtcccgcatcatcaatgttccgcaaaccttacgttaggcgaaggccatctaagcgacgtggagctagggctttccgctgcatcaaacccgcccccgtgattcatccggctagtgtgatcttcactgtgccagctacgactgtgaagatcgtcagtctgggtgggggctgcaacatgatccaacccgtcaacgccgccgtcgcccagtctcctcagactatccctattgccaccttattggtgaacccaacctcgtttccctgccccctgaatcagccccttgtcgcttctagtgtctcaccgctaatcgtgagtggtaatagcgtgaatctcccaataccctcaacacccgaagacaaggcacatatgaacgttgacatagcatgcgctgtagccgacggagaaaatgcttttcaaggcctggagcctaagctggagccacaggagctctcgccactgagtgcaacggtgtttcccaaagttgagcactcccccgggccacccccagttgataaacagtgtcaggaaggcctgtctgagaactctgcctatcggtggacagtggtcaagactgaggaggggagacaggctctggagcccttgccccaggggatccaagaatccctcaataattcctcaccaggcgacctggaggaagttgtgaagatggagccggaggacgcaacggaagaaatttcagggtttctttag

SEQ ID NO: 298470 - DNA, 2253 bp, Artificial Sequence
  derived and/or modified sequence
atggaggatctgtttgaaacattccaggatgagatgggctttagtaacatggaagacgatggcccagaggaggaggagcgtgttgcagagcctcaagctaacttcaataccccacaggccctgcggttcgaagaactcctggccaacctacttaacgaacagcaccagatcgccaaggaactgtttgagcagcttaagatgaagaaaccaagcgcgaagcaacagaaagaagtggagaaggtcaaaccacagtgcaaggaagttcaccagacgctcatccttgaccctgctcagagaaagcgcctgcagcaacaaatgcagcagcacgtgcagcttctgacacagattcacctgctcgccacgtgcaatcctaacctgaacccagaagcctccagcactcgaatatgtctcaaagaactgggcactttcgcccagagcagtattgcactgcaccaccaatacaatccgaaattccaaacgttattccagccttgtaacctgatgggcgcaatgcagcttatcgaagacttcagcacccatgtctctatagattgcagccctcacaaaactgtaaagaagacggcaaacgagttcccttgcctaccaaagcaggtagcgtggatcctcgccacatctaaagtcttcatgtaccctgagttactgcctgtgtgctctctcaaggccaagaacccacaggataagatcctgttcaccaaggccgaggataacctgcttgccttaggcctcaagcacttcgagggtactgagtttctgaaccccctgatttcaaaatatctgctgacatgtaagactgctcgacaactcacagttaggattaaaaatttgaacatgaatagagccccagacaatattatcaaattttataagaaaacaaagcagctgcccgttctcggcaagtgctgtgaggaaattcagccccatcaatggaagcccccaatagagcgtgaggagcacaggcttcctttctggctgaaggccagcctccccagcatacaggaagaactgcgccacatggctgacggcgctcgcgaggtggggaatatgaccggtaccaccgaaattaactccgaccaaggcctggagaaagataactctgagctcggttccgagactaggtaccccctcctgttgcctaagggcgtggtgctgaagctcaaaccagtagcggatcggttccctaagaaggcatggcgccagaaaaggtctagcgttctcaagccccttctgatccagcccagccctagtctacagccttcattcaacccgggtaagactccagcccagtccactcactctgaggcaccgccatctaagatggtcctgagaattcctcacccaatccagccagccaccgtactgcaaacggtgcccggagtgcccccactgggagtaagtggaggcgagagctttgagagccccgcagccctaccagccatgccccctgaggccagaacatccttcccattgtctgagtcccagacccttttgagtagcgcacctgtccctaaagtcatgatgcctagtccagcatccagcatgtttcgaaagccctacgtgcgccgacgtcctagcaagcgcagaggcgcaagagcctttaggtgcatcaaacctgcccctgttatccatccggcttccgtcatttttactgtccctgctaccaccgtgaaaattgtgtcactgggcggtggttgtaacatgatccagcccgttaacgccgctgtagcacaaagccctcagacaattccgatcgcgacacttctcgtcaacccaactagcttcccttgccctctcaaccagcctttggtggcttcctccgtcagccccctcatcgtctccggtaactcggttaacctcccaattccatctactcccgaggacaaggcccacatgaatgtagatattgcatgcgctgtagcggatggcgaaaatgccttccagggcctggagcccaagttggaaccccaagagctgtctcccctaagcgcgaccgtgttcccaaaggtagagcattctcctggaccacctcctgtggataagcagtgccaggagggcctcagcgaaaattcagcataccgttggacagtggtgaagacagaggaaggcagacaggccttggaacccctgccacagggtatacaagaatccctgaataactctagccccggagacctagaagaagttgtgaagatggaacccgaagacgccacagaggaaatatcgggattcctgtag

SEQ ID NO: 298471 - DNA, 2253 bp, Artificial Sequence
  derived and/or modified sequence
atggaagatctgttcgaaaccttccaagatgagatggggttctccaacatggaggacgacggacctgaagaagaagagagggttgctgagccacaagcgaactttaacacacctcaagcacttcgattcgaggagctgctggccaacctactaaatgagcaacaccagatagccaaggagctattcgaacagctcaagatgaaaaaaccatctgctaagcagcagaaggaagtagaaaaggttaagccgcagtgtaaggaggttcaccagaccctgatcctcgaccctgcccagcgaaagcgccttcagcagcagatgcaacaacatgtccagctgctgacccaaattcacctgctggccacttgcaaccccaatttaaacccagaagcctccagcactaggatctgcttgaaagagctgggcacttttgcccaaagctctattgccctgcatcaccagtacaaccccaagttccagactctgttccagccatgcaaccttatgggtgctatgcagcttatagaagacttttccactcatgtgagcatagactgttctccgcataagactgtcaagaaaactgctaacgagtttccgtgcctgcccaaacaggttgcttggatcttagccacttctaaggtgtttatgtaccccgagctgctccctgtctgttcactcaaggccaagaacccgcaggataagattcttttcaccaaggctgaggacaacctgttggccctggggcttaagcacttcgagggtacggaatttctcaatcccttaattagtaagtatcttttgacctgtaagactgccaggcaactgaccgtgcggataaaaaatcttaacatgaatcgcgcaccagataacatcattaagttctataaaaagacaaagcagctccccgtattaggcaagtgctgcgaagaaatacaaccacaccagtggaaacctcctatagagcgggaggagcaccggctgccattttggctgaaggccagtctcccctcaatccaggaagaactcaggcacatggctgacggcgctcgggaagtcggcaacatgacagggaccaccgaaattaactcagaccagggtttagaaaaggacaatagcgagttaggcagcgaaaccaggtatcccctcctgttgcccaagggcgtcgttctcaaattaaaaccggtcgccgacagattcccaaaaaaagcctggagacagaaacgctcgtctgtactcaaaccactgctgattcaacctagccctagcctgcagccatccttcaacccaggaaagacgcccgctcaaagtactcactcagaggcgcctccgagcaagatggtgctgcggattccccaccccattcagccagcgaccgttttgcagactgtacctggagtgccccctctcggtgtcagtgggggagaaagtttcgaatcccccgctgccctgcccgcaatgccccctgaggctcgtaccagctttcctctctctgagtcacagaccctgctcagttcagcaccagtgccaaaagtgatgatgccctccccagcttctagcatgttccgcaagccctacgtgcggaggaggccgagtaagaggcgcggtgcgagagcgttccggtgtatcaagcctgctcctgtgatacacccagcctccgtcatatttaccgtccccgcaacaacagttaagattgtgtccctcgggggaggttgcaacatgattcagcccgtaaatgccgcagttgcccaaagcccccagaccatcccaatcgccaccctgctggtcaaccccactagtttcccatgccctctgaaccagcctcttgttgcctcctctgtgtcccctctgatcgttagtggtaattccgtgaatcttccaataccctccactcccgaagacaaagcccatatgaatgtcgacattgcatgtgcggtagcggacggagaaaacgccttccaaggactggaaccgaagctcgagccacaggagttgtccccgctctctgcaacggtgtttcctaaagtggagcattctcctggcccaccacctgtggataagcagtgccaggagggactttctgagaattcggcatatcgctggacagtcgtaaaaacagaagagggcaggcaggccctggagcctctgccccagggcatccaggaaagcctaaataattcctctcctggggatctcgaggaggttgtcaaaatggaaccggaagacgctaccgaagaaatcagcggcttcctctag

SEQ ID NO: 298472 - DNA, 2253 bp, Artificial Sequence
  derived and/or modified sequence
atggaggatcttttcgaaacgtttcaagatgaaatgggcttctccaatatggaggacgacggaccagaggaggaggagagagttgctgaaccccaggccaactttaatacacctcaagccctcagattcgaagagttactggccaaccttctgaacgaacagcatcagatagccaaggaactgtttgagcaactgaagatgaaaaagccatctgccaaacagcagaaggaggtcgaaaaggttaagccccagtgcaaggaagtgcatcagacactgatcctggatcctgctcaacgaaaacgcctccagcagcaaatgcagcagcatgttcagctgcttacgcagatccatttgctggccacatgtaaccccaatcttaatcctgaagcgagcagcacccggatctgcctcaaggagctgggaacgttcgcccagagcagcatcgcccttcaccaccaatataaccctaagttccagaccttatttcaaccctgtaatttgatgggtgccatgcagctcattgaagactttagcacacacgtaagcatcgattgtagcccacacaagacggtgaagaaaaccgctaacgaattcccgtgtcttcctaaacaggtggcctggatcctcgcgacatcaaaagtgtttatgtaccctgaactcctccccgtgtgctcactaaaggctaagaacccacaagacaaaatcctttttaccaaggccgaagacaatctactggccctgggtctgaaacattttgagggcaccgagttcctgaatcccctgattagcaagtacctgctgacatgcaagactgccagacaactgaccgtaaggattaagaacttaaacatgaaccgagccccagataacatcataaagttttataagaagacaaaacagctgcctgttctgggcaagtgctgcgaggagatccagccccatcagtggaagccccctatcgaaagagaggagcatcgccttcctttctggctgaaagcctcgttgcccagcattcaggaggagttgaggcacatggcagacggtgcaagggaagtcggcaatatgaccggtaccacggagattaactccgaccaggggcttgagaaagacaattccgagctgggtagtgagacacgatatccactgctgctgccgaaaggcgtggtactgaaactcaaacctgtggccgataggttccccaagaaagcttggcgacagaagcgaagctctgtacttaaaccactgcttatccagcctagtcccagccttcagccatcatttaacccgggaaaaaccccagcccaatccactcatagcgaagcccctccttcgaagatggtgctgcgaattccgcatcccatccaacctgcgacggtgctccagacagttcctggagtgccacccctcggagtcagcgggggagagagctttgagagccccgcagccctccccgctatgccccctgaggccaggacctccttccccctctctgaatcccaaactctcctgtcctcagctccagtacctaaggtgatgatgccaagtcccgcttcctcaatgttcagaaagccttacgtccgaaggcgcccatctaagcggagaggcgctcgtgccttcaggtgcatcaaacccgcaccagtgatccaccccgcttctgtgatcttcacagtgcctgcaacaacagtgaaaatcgtgtccctgggcggaggctgtaacatgattcaacccgtgaatgccgcagtggcacaatcgccacagactatccctatcgctactcttctggttaaccctacttcatttccgtgccctttaaaccaacccctggtggcctcaagcgtttcaccactgattgtgagcggcaacagtgttaatttacctattccaagcacccctgaggacaaagctcatatgaacgttgatatcgcatgcgccgtcgccgatggagaaaatgcctttcagggtcttgaaccaaaactggagccccaggagctgagcccattgagtgccactgtattccctaaggtggagcacagccccggacctcctcctgtggacaagcagtgtcaggaaggcctgtcagagaactctgcatatcgatggacggtggtgaaaaccgaagaaggaagacaggctctagagcctctcccgcaggggatacaagaatccctaaacaactcatctccaggcgatctggaggaggtggtgaagatggaaccagaggacgccactgaggaaattagtgggtttctatag

SEQ ID NO: 298473 - DNA, 2684 bp, Artificial Sequence
  derived and/or modified sequence
gaggaggaggcgagccgcagcgccgcggcgacgaacccagggagaaaaggaagcaaatgagctgatggaagatctgtttgaaactttccaagatgagatgggattctccaacatggaagatgatggcccagaagaggaggagcgtgtggctgagcctcaagctaactttaacacccctcaagctctacgccagcttctgttactgatgtaaggatgcagagtcctgtcaggagttaggtgtcaagtgaagtctccttgttatggggcagtgcagctgtaggccaagctgtatctgtttgggaagggagaaaaaacagtagctggcatccatatccacttctccgggtttgaggaactactggccaacctactaaatgaacaacatcagatagcgaaggaactatttgaacagctgaagatgaagaaaccttcagccaaacagcagaaggaggtagagaaggttaaaccccagtgtaaggaagttcatcagaccctgattctggacccagcacaaaggaagagactccagcagcagatgcagcagcatgttcagctcttgacacaaatccaccttcttgccacctgcaaccccaatctcaatccggaggccagtagcaccaggatatgtcttaaagagctgggaacctttgctcaaagctccatcgcccttcaccatcagtacaaccccaagtttcagaccctgttccaaccctgtaacttgatgggagctatgcagctgattgaagacttcagcacacatgtcagcattgactgcagccctcataaaactgtcaagaagactgccaatgaatttccctgtttgccaaagcaagtggcttggatcctggccacaagcaaggttttcatgtatccagagttacttccagtgtgttccctgaaggcaaagaatccccaggataagatcctcttcaccaaggctgaggacaatttgttagctttaggactgaagcattttgaagggactgagtttcttaaccctctaatcagcaagtaccttctaacctgcaagactgcccgccaactgacagtgagaatcaagaacctcaacatgaacagagctcctgacaacatcattaaattttataagaagaccaaacagctgccagtcctaggaaaatgctgtgaagagatccagccacatcagtggaagccacctatagagagagaagaacaccggctcccattctggttaaaggccagtctgccatccatccaggaagaactgcggcacatggctgatggtgctagagaggtaggaaatatgactggaaccactgagatcaactcagatcaaggcctagaaaaagacaactcagagttggggagtgaaactcggtacccactgctattgcctaagggtgtagtcctgaaactgaagccagttgccgaccgtttccccaagaaggcttggagacagaagcgttcatcagtcctgaaacccctccttatccaacccagcccctctctccagcccagcttcaaccctgggaaaacaccagcccaatcaactcattcagaagcccctccgagcaaaatggtgctccggattcctcacccaatacagccagccactgttttacagacagttccaggtgtccctccactgggggtcagtggaggtgagagttttgagtctcctgcagcactgcctgctatgccccctgaggccaggacaagcttccctctgtctgagtcccagactttgctctcttctgcccctgtgcccaaggtaatgatgccctcccctgcctcttccatgtttcgaaagccatatgtgagacggagaccctcaaaaagaaggggagccagggcctttcgctgtatcaaacctgcccctgttatccaccctgcatctgttatcttcactgttcctgctaccactgtgaagattgtgagccttggcggtggctgtaacatgatccagcctgtcaatgcggctgtggcccagagtccccagactattcccatcgccaccctcttggttaaccctacttccttcccctgtccattgaaccagccccttgtggcctcctctgtctcacccttaattgtttctggcaattctgtgaatcttcctataccatccacccctgaagataaggcccacatgaatgtggacattgcttgtgctgtggctgatggggaaaatgcctttcagggcctagaacccaaattagagccccaggaactatctcctctctctgctactgttttccccaaagtggaacatagcccagggcctccaccagtcgataaacagtgccaagaaggattgtcagagaacagtgcctatcgctggaccgttgtgaaaacagaggagggaaggcaagctctggagccgctccctcagggcatccaggagtctctaaacaactcttcccctggggatttagaggaagttgtcaagatggaacctgaagatgctacagaggaaatcagtggatttctttgagctaggagaataagagtctggagactgggagccttcacttcggcctccgattggtggcgcatagggtgtaaccaataggaaacccctaaagggtacttaaaccccagattttgcaactggggctcttgagcagcttgctttagcctgctcccactctgtggaatatacttttgcttcaataaatctgtgcttttattgcttcattgtttca

SEQ ID NO: 298474 - DNA, 2220 bp, Artificial Sequence
  derived and/or modified sequence
atgggcttcagcaacatggaggacgacggccccgaggaggaggagagagtggccgagccccaggccaacttcaacaccccccaggccctgagattcgaggagctgctggccaacctgctgaacgagcagcaccagatcgccaaggagctgttcgagcagctgaagatgaagaagcccagcgccaagcagcagaaggaggtggagaaggtgaagccccagtgcaaggaggtgcaccagaccctgatcctggaccccgcccagagaaagagactgcagcagcagatgcagcagcacgtgcagctgctgacccagatccacctgctggccacctgcaaccccaacctgaaccccgaggccagcagcaccagaatctgcctgaaggagctgggcaccttcgcccagagcagcatcgccctgcaccaccagtacaaccccaagttccagaccctgttccagccctgcaacctgatgggcgccatgcagctgatcgaggacttcagcacccacgtgagcatcgactgcagcccccacaagaccgtgaagaagaccgccaacgagttcccctgcctgcccaagcaggtggcctggatcctggccaccagcaaggtgttcatgtaccccgagctgctgcccgtgtgcagcctgaaggccaagaacccccaggacaagatcctgttcaccaaggccgaggacaacctgctggccctgggcctgaagcacttcgagggcaccgagttcctgaaccccctgatcagcaagtacctgctgacctgcaagaccgccagacagctgaccgtgagaatcaagaacctgaacatgaacagagcccccgacaacatcatcaagttctacaagaagaccaagcagctgcccgtgctgggcaagtgctgcgaggagatccagccccaccagtggaagccccccatcgagagagaggagcacagactgcccttctggctgaaggccagcctgcccagcatccaggaggagctgagacacatggccgacggcgccagagaggtgggcaacatgaccggcaccaccgagatcaacagcgaccagggcctggagaaggacaacagcgagctgggcagcgagaccagataccccctgctgctgcccaagggcgtggtgctgaagctgaagcccgtggccgacagattccccaagaaggcctggagacagaagagaagcagcgtgctgaagcccctgctgatccagcccagccccagcctgcagcccagcttcaaccccggcaagacccccgcccagagcacccacagcgaggccccccccagcaagatggtgctgagaatcccccaccccatccagcccgccaccgtgctgcagaccgtgcccggcgtgccccccctgggcgtgagcggcggcgagagcttcgagagccccgccgccctgcccgccatgccccccgaggccagaaccagcttccccctgagcgagagccagaccctgctgagcagcgcccccgtgcccaaggtgatgatgcccagccccgccagcagcatgttcagaaagccctacgtgagaagaagacccagcaagagaagaggcgccagagccttcagatgcatcaagcccgcccccgtgatccaccccgccagcgtgatcttcaccgtgcccgccaccaccgtgaagatcgtgagcctgggcggcggctgcaacatgatccagcccgtgaacgccgccgtggcccagagcccccagaccatccccatcgccaccctgctggtgaaccccaccagcttcccctgccccctgaaccagcccctggtggccagcagcgtgagccccctgatcgtgagcggcaacagcgtgaacctgcccatccccagcacccccgaggacaaggcccacatgaacgtggacatcgcctgcgccgtggccgacggcgagaacgccttccagggcctggagcccaagctggagccccaggagctgagccccctgagcgccaccgtgttccccaaggtggagcacagccccggccccccccccgtggacaagcagtgccaggagggcctgagcgagaacagcgcctacagatggaccgtggtgaagaccgaggagggcagacaggccctggagcccctgccccagggcatccaggagagcctgaacaacagcagccccggcgacctggaggaggtggtgaagatggagcccgaggacgccaccgaggagatcagcggcttcctgtag

SEQ ID NO: 298475 - DNA, 2220 bp, Artificial Sequence
  derived and/or modified sequence
atgggcttctccaatatggaggatgatggcccagaggaggaggagagggtggccgagccccaagcaaacttcaatactcctcaggccttgcgctttgaagagctgctggctaatctgttaaacgagcaacaccagatcgccaaggaattgttcgaacaattaaagatgaagaagccttctgctaagcagcagaaagaggtcgaaaaggtcaagccccagtgcaaggaagtgcaccagaccttgattctggaccccgcacagcgtaaacggctccaacagcagatgcaacagcacgttcagctgctgacccagattcatcttcttgcgacctgcaaccctaatttaaaccctgaagctagttcgactcgcatttgtctgaaggagctgggcaccttcgcccaaagcagcatagcgttacaccaccagtataacccgaagttccagaccttatttcagccttgcaacctgatgggagctatgcagctcatcgaggacttcagcacacacgtgtctattgattgttctccccataagacagtgaagaaaacagctaatgagttcccctgtttgcccaagcaggtggcctggattctggctacgtcaaaggtttttatgtaccccgaactgttgccagtctgcagtttgaaggcgaaaaatccgcaagataaaatcctattcactaaagcagaagacaacctgctagcgctgggactcaagcactttgagggaaccgaattcctcaatcccctcatctccaaatacctgttgacttgtaagaccgccagacaacttacagtgagaatcaagaacttgaatatgaacagggcacctgacaacattataaagttttataagaaaaccaaacagctgcccgtactgggcaagtgctgcgaggaaatccagcctcatcagtggaagccgccaatagaaagagaagagcatcgcttgccattctggcttaaggcaagcctgccaagtatccaggaggaactgagacacatggctgatggggcgagagaggtgggcaatatgacgggtacgaccgagattaactcggatcagggccttgagaaagacaattctgaactggggtccgaaactcgctaccctctccttctgccaaagggggtcgtcctgaagctgaaaccagtggcggaccggttccccaagaaggcatggcgtcagaagaggagttctgtgttgaagccccttcttatccagcctagccccagtctccagcccagtttcaaccctggcaaaacccccgcccagtccacacattctgaagctccgcctagcaagatggtgcttcgtatcccgcacccaattcaacccgcaacggtgctccagactgtgcctggcgtgccccccttgggagtgagcggcggagagagtttcgaaagtccagccgcattgcctgccatgcctccagaagccagaactagttttcctctctctgagtcacagactctccttagctccgcccctgtccctaaagtgatgatgcccagccctgcgtctagcatgttccggaagccgtacgtcaggaggaggccttcaaagcggaggggtgctcgggcttttcggtgcatcaagcctgcaccggttatccatcctgccagtgtcatattcacagtacctgccacaacagttaagatagtctctcttggcggtgggtgtaacatgattcagcctgtcaacgctgcagtcgcacagtcccctcagacgattcccattgcgacactattagtgaatcctaccagcttcccttgccccctgaaccagcctcttgttgcctcctcagtgtcccccctaatagtcagcgggaacagcgtgaatcttcccattccctccacgccagaagacaaggcccacatgaatgtagatattgcttgtgcggtcgcagacggcgaaaatgcatttcagggcctggagccgaagctcgagcctcaggagctctctcctctgtctgcaacagtgttcccaaaggtggagcatagccccggacccccgccagtggataaacagtgtcaagagggcctctcagagaactcagcctaccggtggaccgttgtgaaaactgaagagggaaggcaggctctggagcccctgcctcagggtatacaggaatcgctcaataacagctcccccggggatctggaggaggtggtaaaaatggaacctgaggatgcgaccgaggagatctcaggattcctctag

SEQ ID NO: 298476 - DNA, 2220 bp, Artificial Sequence
  derived and/or modified sequence
atgggattttccaacatggaggacgatggtccggaggaagaagaacgggtggctgaaccccaagctaactttaatacccctcaggcgctccgctttgaagagctcttagctaatctccttaacgagcagcaccaaatagccaaggaattgttcgagcaactgaaaatgaagaagccgtcggccaaacagcaaaaagaggtggagaaggtgaagccgcagtgcaaagaagtccatcagacactcatccttgacccggcccaaagaaaaaggctccagcagcaaatgcagcaacatgtgcagcttctgacccagatacacctgctggccacctgcaacccaaatctaaaccccgaagcctcttccacaaggatctgtctgaaagagctgggaactttcgcacagtcctcaatcgctttgcaccatcagtataaccctaagttccagaccctgtttcagccttgtaacctaatgggcgcgatgcagctgatcgaagatttctcgactcatgtttctattgactgcagccctcacaaaaccgtcaaaaagactgccaatgagttcccctgcctccccaagcaggtggcctggatcctggccacgtcgaaagtctttatgtacccagagctgttgcctgtatgcagcctcaaggcaaagaacccccaggacaaaatccttttcaccaaagccgaggacaaccttttagccctcggattgaagcacttcgaggggaccgaattcctgaatccactgatttcgaagtatctcctcacatgtaagacagcccggcagctgactgttcgcatcaagaatctgaacatgaatcgggcacccgataacatcatcaagttttacaaaaagacgaaacaattgcctgtcctgggcaagtgttgtgaagagatccagccccatcaatggaaacctcctatcgagcgggaggagcaccgacttcctttctggctgaaagcctcgctacccagtattcaagaggaactgcggcatatggcggacggtgccagagaggtaggcaacatgacaggtacaacggagatcaacagtgaccaaggactagaaaaggataattccgagttgggctcagaaacgagatacccgttgcttttgcctaagggggtggttcttaagttgaagcccgtggccgatcgctttccaaagaaggcctggaggcagaaaaggtcatcagtgttaaagccacttctgatacagccttccccttcccttcagcccagtttcaatccaggtaagactccggcacagtctactcacagcgaggcccctccttcaaaaatggtcctgcgaataccacacccaattcagcccgctaccgtgcttcagacagtgcctggagtcccccccctcggagtgagcggcggtgaatcttttgagagcccagccgccttgcccgcaatgccaccggaggccaggaccagctttccactgtcagaatcacaaaccctgctcagctctgcaccggtacccaaagtgatgatgccctctcctgcttcatctatgtttcgcaaaccttacgttagacggaggccttccaagcgtcggggagcacgggcttttcgctgtataaagcctgcccctgtgatccatccggcctctgtgattttcaccgtcccagccactactgtgaaaatagtgagcttggggggaggttgcaacatgatacagccagtcaatgctgccgttgctcaatctccacagacaattcctatcgcaaccctgctggtgaaccctaccagttttccatgccccctgaatcagccactggtcgcaagcagcgtcagcccccttattgtctctggtaactcagttaacttacccattccctccactcctgaggataaggcccacatgaatgtggacatcgcgtgcgcggtggctgacggcgaaaacgccttccaaggcctggagccaaagctggagccacaagagctgtcacccctgtccgccacagttttcccgaaggtggagcattcccctggaccaccccccgtagacaagcagtgccaggagggtctgagcgagaacagtgcttatagatggactgtcgtaaagactgaagaggggaggcaagccctggagccccttccacagggcatccaggaaagcttgaacaattcctccccaggggacttggaagaggtggttaagatggaacctgaagacgcgacggaggaaatctcaggttttctctag

SEQ ID NO: 298477 - DNA, 2701 bp, Artificial Sequence
  derived and/or modified sequence
gctttggcggcggttggtggccgtgcgggcggggagggagggggaggagagaagaggaggtggagaaggcttgggctcgcgccgctgaagtcggcttacccgctggccgcctcctgacaagcgggagggatccgcggtggacccagggaagcggaggagcctggcggccaccccctcttcctcacttccctgtactctcatcgctctcggcctccgacacgaaaaggaagcaaatgagctgatggaagatctgtttgaaactttccaagatgagatgggattctccaacatggaagatgatggcccagaagaggaggagcgtgtggctgagcctcaagctaactttaacacccctcaagctctacggtttgaggaactactggccaacctactaaatgaacaacatcagatagcgaaggaactatttgaacagctgaagatgaagaaaccttcagccaaacagcagaaggaggtagagaaggttaaaccccagtgtaaggaagttcatcagaccctgattctggacccagcacaaaggaagagactccagcagcagatgcagcagcatgttcagctcttgacacaaatccaccttcttgccacctgcaaccccaatctcaatccggaggccagtagcaccaggatatgtcttagctgggaacctttgctcaaagctccatcgcccttcaccatcagtacaaccccaagtttcagaccctgttccaaccctgtaacttgatgggagctatgcagctgattgaagacttcagcacacatgtcagcattgactgcagccctcataaaactgtcaagaagactgccaatgaatttccctgtttgccaaagcaagtggcttggatcctggccacaagcaaggttttcatgtatccagagttacttccagtgtgttccctgaaggcaaagaatccccaggataagatcctcttcaccaaggctgaggacaatttgttagctttaggactgaagcattttgaagggactgagtttcttaaccctctaatcagcaagtaccttctaacctgcaagactgcccgccaactgacagtgagaatcaagaacctcaacatgaacagagctcctgacaacatcattaaattttataagaagaccaaacagctgccagtcctaggaaaatgctgtgaagagatccagccacatcagtggaagccacctatagagagagaagaacaccggctcccattctggttaaaggccagtctgccatccatccaggaagaactgcggcacatggctgatggtgctagagaggtaggaaatatgactggaaccactgagatcaactcagatcaaggcctagaaaaagacaactcagagttggggagtgaaactcggtacccactgctattgcctaagggtgtagtcctgaaactgaagccagttgccgaccgtttccccaagaaggcttggagacagaagcgttcatcagtcctgaaacccctccttatccaacccagcccctctctccagcccagcttcaaccctgggaaaacaccagcccaatcaactcattcagaagcccctccgagcaaaatggtgctccggattcctcacccaatacagccagccactgttttacagacagttccaggtgtccctccactgggggtcagtggaggtgagagttttgagtctcctgcagcactgcctgctatgccccctgaggccaggacaagcttccctctgtctgagtcccagactttgctctcttctgcccctgtgcccaaggtaatgatgccctcccctgcctcttccatgtttcgaaagccatatgtgagacggagaccctcaaaaagaaggggagccagggcctttcgctgtatcaaacctgcccctgttatccaccctgcatctgttatcttcactgttcctgctaccactgtgaagattgtgagccttggcggtggctgtaacatgatccagcctgtcaatgcggctgtggcccagagtccccagactattcccatcgccaccctcttggttaaccctacttccttcccctgtccattgaaccagccccttgtggcctcctctgtctcacccttaattgtttctggcaattctgtgaatcttcctataccatccacccctgaagataaggcccacatgaatgtggacattgcttgtgctgtggctgatggggaaaatgcctttcagggcctagaacccaaattagagccccaggaactatctcctctctctgctactgttttccccaaagtggaacatagcccagggcctccaccagtcgataaacagtgccaagaaggattgtcagagaacagtgcctatcgctggaccgttgtgaaaacagaggagggaaggcaagctctggagccgctccctcagggcatccaggagtctctaaacaactcttcccctggggatttagaggaagttgtcaagatggaacctgaagatgctacagaggaaatcagtggatttctttgagctaggagaataagagtctggagactgggagccttcacttcggcctccgattggtggcgcatagggtgtaaccaataggaaacccctaaagggtacttaaaccccagattttgcaactggggctcttgagcagcttgctttagcctgctcccactctgtggaatatacttttgcttcaataaatctgtgcttttattgcttcattgtttca

SEQ ID NO: 298478 - DNA, 2220 bp, Artificial Sequence
  derived and/or modified sequence
atgggcttcagcaacatggaggatgatggccctgaggaggaggagcgggtggccgagccccaggccaacttcaacaccccccaggccctgcgctttgaggagctgctggccaacctgctgaatgagcagcaccagatcgccaaggagctgtttgagcagctgaagatgaagaagcccagcgccaagcagcagaaggaggtggagaaggtgaagccccagtgcaaggaggtgcaccagaccctcatcctggaccctgcccagaggaagaggctgcagcagcagatgcagcagcacgtgcagctgctgacccagatccacctgctggccacctgcaaccccaacctgaaccctgaggccagcagcacccgcatctgcctgaaggagctgggcacctttgcccagagcagcatcgccctgcaccaccagtacaaccccaagttccagaccctcttccagccctgcaacctgatgggcgccatgcagctgattgaggacttcagcacccacgtgtccattgactgcagcccccacaagacagtgaagaagacagccaatgagttcccctgcctgcccaagcaggtggcctggatcctggccaccagcaaggtgttcatgtacccagagctgctgcctgtgtgcagcctgaaggccaagaacccccaggacaagatcctcttcaccaaggccgaggacaacctgctggccctgggcctgaagcactttgagggcacagagttcctgaaccccctcatcagcaagtacctgctgacctgcaagacagcccggcagctgactgtgcgcatcaagaacctgaacatgaacagagccccagacaacatcatcaagttctacaagaagaccaagcagctgcctgtgctgggcaagtgctgtgaggagatccagccccaccagtggaagccacccatcgagcgggaggagcaccggctgcccttctggctgaaggccagcctgcccagcatccaggaggagctgcggcacatggctgatggagcccgggaggtgggcaacatgacaggcaccacagagatcaacagcgaccagggcctggagaaggacaacagcgagctgggcagcgagacccgctaccccctgctgctgcccaagggcgtggtgctgaagctgaagcctgtggccgaccgcttccccaagaaggcctggaggcagaagaggagctctgtgctgaagcccctgctgatccagcccagccccagcctgcagcccagcttcaaccctgggaagaccccagcccagagcacccacagcgaggccccacccagcaagatggtgctgcgcatcccccaccccatccagcctgccaccgtgctgcagacagtgcctggggtgccccccctgggcgtgtctggaggagagagctttgagagccctgctgccctgcctgccatgcctcctgaggcccggaccagcttccccctgtctgagagccagaccctgctgagcagcgcccctgtgcccaaggtgatgatgcccagccctgccagctccatgttcaggaagccctacgtgagaagaagacccagcaagagaagaggagcccgggccttccgctgcatcaagccagcccctgtgatccacccagccagcgtcatcttcaccgtgcctgccaccaccgtgaagatcgtgtccctgggcggcggctgcaacatgatccagcctgtgaatgctgctgtggcccagagcccccagaccatccccatcgccaccctgctggtgaaccccaccagcttcccctgccccctgaaccagcccctggtggccagctctgtgagccccctcatcgtgtctggcaacagcgtgaacctgcccatccccagcaccccagaggacaaggcccacatgaatgtggacatcgcctgtgctgtggctgatggagaaaatgccttccagggcctggagcccaagctggagccccaggagctgagccccctgagcgccaccgtcttccccaaggtggagcacagccctggccccccacctgtggacaagcagtgccaggagggcctgtctgaaaattctgcctaccgctggacagtggtgaagacagaggagggccggcaggccctggagcccctgccccagggcatccaggagagcctgaacaacagcagccctggggacctggaggaggtggtgaagatggagccagaagatgccacagaggagatcagcggcttcctgtag

SEQ ID NO: 298479 - DNA, 2220 bp, Artificial Sequence
  derived and/or modified sequence
atgggcttcagcaacatggaggacgacggccccgaggaggaggagagggtggccgagccccaggctaactttaacacaccccaagccctgagattcgaggaactgctagcgaacttgctcaacgagcaacatcagatcgccaaggaattatttgagcagctgaaaatgaagaagccaagcgcaaagcagcagaaggaggtcgagaaggtcaaaccccagtgcaaggaggtgcaccagaccctgatccttgaccctgctcaacgcaaacggctgcagcaacagatgcagcaacacgtccagctgttgacacagatccaccttttagcaacctgcaacccaaatctgaacccagaggcaagctctacacggatctgcctgaaagaactgggtaccttcgcccagagctcaatagcgctgcaccaccagtacaaccccaaattccagacattgttccagccttgtaatctcatgggcgcgatgcagctgattgaggattttagcacacacgtgagcattgattgtagccctcataagactgtcaaaaagactgcaaacgagttcccttgcctgcccaaacaggtcgcctggatcctggccaccagcaaagtttttatgtaccccgagttgctgcccgtttgttctctgaaggcaaagaatcctcaggacaagatcctctttaccaaggcggaggataacttactcgccctgggcttaaagcattttgagggaacggaattcctgaacccactcataagtaagtatctgctgacctgtaagaccgccaggcagctcacggtgaggattaaaaatctaaacatgaatagggcgccagacaacattattaagttctacaagaagaccaaacagctcccggtgcttggaaagtgttgcgaagaaatccagccccaccaatggaagcctccaattgaacgggaggagcaccggctgcctttttggctgaaagcttcgctgccctccattcaggaagagttaaggcacatggccgatggcgctcgggaagttggaaacatgaccggaacaacggagatcaattctgaccaaggtttagagaaagataacagcgagcttggttctgaaacaaggtacccactcctactccctaaaggcgtcgtactcaagctcaaaccagtggcggaccgtttccccaagaaggcgtggcgacagaaacggtcctctgtcctgaaacccctgctaattcagccttctccttctcttcagccatccttcaaccctggcaaaaccccagcgcagagtactcattcagaggccccgccaagcaaaatggtcctccggatcccgcatcctatccagcctgcaactgttttacagacagtccctggggtcccgcctctgggcgtcagtgggggtgagtctttcgagagccccgctgccctgcccgccatgccacctgaggcccgcacttccttccctctcagcgagtctcagaccctcctctctagcgccccagtccccaaggttatgatgccctctcccgcgtctagtatgttccgtaagccctacgtgagaaggcgtcctagcaagcggcggggtgcacgagctttccgttgcatcaaaccagctcctgtgatccacccggctagtgtgatcttcacggtgccagccacaacagtcaaaatcgttagcctaggtggtggttgtaacatgatacaaccagttaacgctgcggtcgcccagtcgccccagacgattccaatcgcaaccctgctggtgaaccccactagttttccttgtccactgaatcagcccctggtggcctcaagcgttagcccactgattgtcagtggtaattccgtcaatctccctatcccctcgacaccggaagacaaagcccatatgaatgtagatattgcctgcgccgtggccgatggagaaaacgcattccaggggctggaacccaaacttgaaccacaggaactatctccactgtcagccactgtttttccgaaagtcgaacactcacccgggcctccacctgtggataaacagtgccaggaaggcctttctgaaaacagcgcctaccggtggacggtcgtgaagactgaagaagggcgccaggccctggagcctttgccccaggggatccaagaatctctcaacaactcttctcccggtgacctcgaggaagtggtgaagatggagccggaagatgctaccgaggaaatttccggattcctctag

SEQ ID NO: 298480 - DNA, 2220 bp, Artificial Sequence
  derived and/or modified sequence
atgggcttcagcaacatggaggacgacggccccgaggaggaggagcgggttgctgaaccccaagctaattttaatacaccccaggcactgaggtttgaagaacttctggctaatctgctgaacgagcaacaccagattgcaaaggaactttttgagcagctgaaaatgaaaaagccttccgcaaagcagcagaaggaggtcgagaaggtgaagccgcagtgcaaggaggtacatcagaccctgatcttagaccctgcccagagaaaacgcttacaacagcagatgcagcagcacgtgcagctgcttacgcagattcacctgttggcaacatgtaatcccaacctcaacccagaggcctcgtctacgcggatctgtctcaaggagttaggaacatttgcacaatcaagtattgcactgcaccatcagtacaacccgaaattccagaccctgttccagccctgcaatctgatgggagccatgcagcttattgaagatttctctacccatgtcagcattgattgctccccccacaaaacagtcaaaaagacagccaacgaattcccatgtttacccaaacaggtcgcatggatactggctacgagcaaagtatttatgtacccagaactgctgcctgtctgctctctcaaagctaagaatccccaggataaaattctcttcactaaggctgaggacaacctgctggctctggggctgaagcattttgaagggactgagttcctcaaccccctcatttccaagtacctacttacgtgcaaaacagctcggcagttaacagtccggatcaagaatctcaatatgaatcgcgcaccggacaatattatcaaattctataagaaaaccaaacagctgccagttctgggcaagtgttgtgaggaaatacaaccccaccaatggaagccaccgattgagagggaagaacatcgtctgccattttggttgaaggccagtttgccctcaatccaggaggaactacgtcatatggctgacggagcacgcgaggtcggcaacatgaccgggacgactgagatcaattccgaccaggggctggaaaaggacaattccgaactgggctccgaaactcggtatccgctactgctgcccaagggagtggtgcttaagcttaagcccgtcgccgaccggtttccaaagaaggcctggagacagaagcggtctagtgtgttaaagccattactgatccagccaagtcccagcttgcagccgtcctttaacccaggcaagacaccggcacagagcacacattctgaggcaccccccagcaaaatggtgttgaggatcccacaccccattcaacccgcaactgtgttacagacagtacctggcgtcccaccgctcggtgtatccggcggagagagctttgagtctccagcagcactgcctgccatgccaccagaggcaagaacatcttttccattgtccgagtcacagactttgctatctagcgctcctgtgccaaaggtcatgatgccgtcacccgcatcctctatgtttcgcaagccatatgtgcggaggcgaccatctaagcgcaggggggctcgcgcctttcgctgtattaaaccagctcctgtgattcatccggcttctgttatcttcaccgtgccagccaccaccgttaagattgtatcgcttggcggaggctgcaacatgatccaacctgtgaacgccgctgtggcacaaagcccacagaccatccccatcgcaacactactagtcaatccaacaagctttccctgcccattgaatcagcccctcgtggcttcgtcagtgtcccccctgattgtgtcggggaacagtgtgaatcttcctatcccatcgacaccagaagataaggctcatatgaacgtggacatagcctgtgccgtcgcggacggggaaaatgcatttcagggcctggaacctaagttggaaccacaggagctttcccctctctccgctaccgtattccctaaggttgagcattcccctggacccccgcctgtggacaagcaatgtcaagaggggttgtccgaaaacagtgcctaccgatggactgtcgtcaaaacagaagaagggcgccaggcactggagcccttgccacagggaattcaggagtcactcaacaatagtagcccaggcgatctggaggaagttgtaaaaatggaaccggaggacgccacagaggaaattagcgggtttctctag

SEQ ID NO: 298481 - DNA, 2220 bp, Artificial Sequence
  derived and/or modified sequence
atggggttcagtaacatggaagatgacggccctgaggaggaggagagagtggctgaacctcaggccaacttcaatactcctcaggccctgaggtttgaggaactgctggccaatctcctgaacgaacaacaccaaattgcaaaggagctgttcgagcagctgaagatgaaaaagcccagcgcaaagcaacagaaagaagtggaaaaggtcaaaccgcagtgtaaagaagttcaccaaacactcatactggatcctgcccagcgcaagaggcttcagcagcaaatgcagcagcacgtgcaacttctcacacagattcacttactcgcaacctgcaaccccaatttgaaccccgaggcttccagtacccgaatttgccttaaggagctgggtacctttgcacagtcttccatcgccctgcatcaccagtataacccgaagtttcaaaccctttttcaaccctgtaatctaatgggtgcaatgcaacttatagaggatttttctacccacgtgtccatagactgcagtcctcataagacggtaaaaaagaccgcgaatgagtttccatgtctgcccaagcaggtggcctggatccttgcaacgtcaaaggtcttcatgtatccggaattattgccagtttgctccctcaaggcgaaaaatccgcaggacaagattctgttcaccaaggcggaagacaacctgttggcattaggactgaagcattttgaagggacagaatttctgaacccgctcatctcaaagtatctgcttacatgcaagaccgcaaggcagctcacagtcagaatcaagaatttaaacatgaatagggcacctgacaatatcataaaattttacaaaaaaaccaagcagttgccggttctgggcaaatgttgcgaggagatccaaccgcaccagtggaagcctccaatcgagcgggaagagcacagactccctttttggctaaaggcttcactcccaagcatccaggaggaactacggcacatggcagacggagccagggaggtcggtaacatgacaggaactacagagattaactcggaccagggtctcgagaaagacaattcagagctggggtcagagacgaggtatccattactcctacccaaaggagtagtgctgaagctcaaacccgtggctgatcgctttcctaaaaaagcctggcgccaaaaacggtctagcgtcttaaagcctctgctgatacagccttctccctccctgcagcctagtttcaacccgggaaagacccccgctcagtcgacccacagcgaagccccaccgtccaagatggtgctgagaatacctcaccccatccagccggcaacagtcctccagacagtgccaggcgtgccacctttgggagtttcagggggtgagtcattcgaatctccagcggctctgcctgccatgccacctgaggccaggacatcgttccctctgagcgagagccagacactcctctccagtgctcctgtgcctaaggtcatgatgccctccccagcgtcctccatgttccgtaaaccctatgtgagaaggcgcccatctaagcgccgaggggcacgtgcctttaggtgcataaaaccggctcctgtaattcatccagccagtgttatttttaccgttcccgcaactactgtcaagatcgtgtccctgggagggggatgcaacatgatacagcccgtgaatgcagctgtcgcccagtccccacagaccatccctatagccaccctgctggtgaaccctacgtctttcccttgccctctgaaccagccccttgtggccagctcagtctcccctttaatcgtgtccggcaactctgttaatctgcccatcccaagtacacccgaggataaagctcatatgaacgtggacatcgcatgcgctgtcgctgatggtgagaatgctttccaggggctggagcccaaactcgagcctcaggagctgtcccctctatccgcaactgtttttcccaaggtggagcattcacccggaccccctccagtcgataagcagtgccaggaggggctgagcgagaacagcgcttacagatggacggtcgttaagacagaagaaggacgtcaagccctggagcccctgccacagggcattcaagagagccttaacaactcatcccccggtgatctagaggaggtcgtcaagatggaacccgaggacgctactgaggagattagtgggtttctctag

SEQ ID NO: 298482 - DNA, 2220 bp, Artificial Sequence
  derived and/or modified sequence
atgggctttagcaacatggaggacgacggcccagaggaggaggaaagggttgccgagccacaggccaactttaacacgccacaagcgctgcgcttcgaagaattactggccaacctcctgaacgaacagcatcaaattgcaaaagagttgtttgaacagctcaaaatgaaaaagccctcggcaaaacagcaaaaggaggttgagaaggttaaacctcagtgtaaggaagtccaccagacactcatcctggaccctgcccagcgtaagcggctgcagcagcagatgcagcagcacgtgcagctcttgactcaaatccatctcctggctacttgtaatccaaatctgaatccggaagcctcgtctactagaatctgtctcaaggaactgggaacatttgcacaatcatcaatcgccctccatcaccaatacaatcccaaatttcaaaccctcttccagccatgtaatctgatgggagctatgcaacttatcgaggacttctctactcacgtgtcgatcgactgcagccctcacaagacagtgaaaaaaaccgccaatgagttcccctgtttgccgaaacaagtagcttggatactggctacatctaaggttttcatgtaccctgaactgctccccgtctgcagcctgaaggccaagaacccccaagataagatcctgttcaccaaagcagaggacaatctgttagcactgggactgaaacacttcgagggtactgagttcctgaatccattgatctccaagtacctgctgacctgtaagaccgcgaggcagcttaccgttaggataaagaacctgaatatgaaccgagctcctgataatattatcaagttttataagaaaacaaaacagctgcccgttctgggaaaatgttgcgaggagatccagccccaccagtggaagcctcctatcgagcgggaggagcatcgattgccattttggctgaaggcaagccttccctctatccaggaagagctgaggcacatggcagacggagcacgagaagtaggcaacatgacagggaccactgaaatcaactctgatcagggcctggagaaggataactcagaactgggatccgaaactcgatatccgcttttgctgccgaaaggcgttgtgctcaaactgaaaccagttgctgatcgctttcccaaaaaggcatggcggcagaaacggagtagtgttctaaagccattactgatccagccctccccgagcttacagccatccttcaatcccggtaagactcctgcgcagtctacacatagcgaagctcctcctagtaaaatggtgttgcgcataccccaccctatacagccagcaaccgttctccagaccgtgccaggtgtgcctccgctaggggtttcaggcggtgaatctttcgagagccccgctgccttacctgctatgcccccagaagccagaaccagttttcccctctctgagtcccagacccttttatcatcagcccctgtccctaaggtaatgatgccttctcccgcttctagtatgttccgcaagccatacgtgcggagacgccctagtaaacgtagaggagcgcgtgcattcaggtgtatcaagcctgccccagtgatccatcccgcaagcgtgatcttcaccgtacccgcaaccacagtaaaaatagtctcccttggaggcggatgcaatatgatacagcccgtgaatgcagccgtggcccagtcccctcagacaatccctattgctacactcctggtcaatcctacaagtttcccttgtcccctgaatcaacctctagtggccagctccgtttccccactgatcgtgtcaggcaacagtgttaatctccccattccctccacacccgaggataaggcccatatgaacgttgatatcgcgtgtgccgtggctgacggggaaaatgccttccagggtctggagcctaaacttgagccacaggaacttagtcccctcagtgccaccgtcttcccaaaagttgagcacagccccggacccccacctgttgacaaacagtgccaggagggattgagtgaaaactcagcttacaggtggaccgtcgtgaaaaccgaagagggtcgacaggcgctggaaccgctaccacagggaatccaggagagtctgaataattcaagtcccggtgatctggaagaggtggtcaaaatggaacccgaggatgcaactgaagagataagcggattcctgtag

SEQ ID NO: 298483 - DNA, 723 bp, Artificial Sequence
  derived and/or modified sequence
atgggggacgccctgggcagcgtggtggtcgttattactgccattattttttatgtactgcctctgaaatctgaggacccatgtaattggcagtgttatattgatcccagcttgaccgttttgatggtgatcattatactttcatccgcttttcctttgattaaagagactgccgctattctgctgcaaatggtgcccaagggagtgaatatggaggaactgatgtcgaaactctcggctgtccccggcatcagcagcgtccatgaagtccacatttgggagctggtttcgggcaaaatcatcgcaaccctgcacataaagtatcccaaagatcggggctaccaggacgccagtaccaagatccgggagatatttcaccacgccgggattcataatgtcaccatccagtttgagaacgtggacctcaaagagcctctggagcaaaaggacttactgttgctctgcaatagcccgtgtatttccaaaggttgtgcgaagcaactctgttgtccaccgggagcccttcccctggctcacgtaaacgggtgcgcggaacataacggcgggccttcattagacacctacgggtcagacggactgagccgacgcgatgccagagaggttgccatcgaggtttctctggactcctgtttgtcagaccacgggcagtccctgaacaagactcaggaagatcagtgttacgtaaaccgcacacatttctag

SEQ ID NO: 298484 - DNA, 723 bp, Artificial Sequence
  derived and/or modified sequence
atgggagatgccctgggctctgtggtggtggtgatcacagccatcatcttctacgtgctgcccctgaagtctgaggacccctgcaactggcagtgctacatcgaccccagcctgactgtgctgatggtgatcatcatcctgagcagcgccttccccctcatcaaggagacagctgccatcctgctgcagatggtgcccaagggcgtgaacatggaggagctgatgagcaagctgtctgctgtgcccggcatcagctctgtgcatgaggtgcacatctgggagctggtgtctgggaagatcatcgccaccctgcacatcaagtaccccaaggaccggggctaccaggatgccagcaccaagatccgggagatcttccaccacgccggcatccacaacgtgaccatccagtttgaaaatgtggacctgaaggagcccctggagcagaaggacctgctgctgctgtgcaacagcccctgcatcagcaagggctgtgccaagcagctgtgctgccccccaggggccctgcccctggcccacgtgaatggctgtgccgagcacaatggaggccccagcctggacacctacggcagtgatggcctgagcagaagagatgcccgggaggtggccatcgaggtgtccctggacagctgcctgagtgaccacggccagagcctgaacaagacccaggaggaccagtgctacgtgaacagaacccacttctag

SEQ ID NO: 298485 - DNA, 723 bp, Artificial Sequence
  derived and/or modified sequence
atgggcgacgccctgggcagcgtggtggtggtgatcaccgccatcattttttacgtcctgccactgaaatccgaggacccctgcaactggcaatgctacattgatccgtctctcaccgttctgatggttatcatcatcttgtcctcagccttcccactgataaaagagacggcggccattctgctccaaatggtgcctaagggcgtaaacatggaagagctcatgtcaaaactcagtgcagtgcccggcatcagtagcgtccatgaggttcacatctgggagctggtgagcgggaagattatcgcaactttgcacataaaatatccgaaggatcgtggataccaagacgcgtcaacgaaaataagggaaatttttcatcatgctggaattcacaacgttacgatccagtttgagaacgtcgatcttaaggagccattggaacagaaagatctcctgctgctgtgcaattccccatgtatctctaagggctgcgcgaagcagctttgctgccctcccggtgcccttccactggcccatgtgaatggctgtgctgagcacaacggagggccttccctggatacatacggctccgatggcttgtctcggagagatgctagagaggtggctatcgaagtgtccctggactcgtgcctgtccgaccacgggcaatcactcaacaagacacaggaagatcagtgttacgtcaacagaacacatttttag

SEQ ID NO: 298486 - DNA, 723 bp, Artificial Sequence
  derived and/or modified sequence
atgggggacgccttgggcagtgtggtggtcgtgattaccgcgattattttttacgtgcttccactaaagtctgaggatccctgcaactggcagtgctatatagacccgtctctgacagtcttgatggtaattatcatcctttcatctgccttcccactgatcaaagaaacagccgcaattctgctgcaaatggtccctaaaggagttaatatggaggaattgatgagcaagttatcggctgtacccggaatctcgtccgtccacgaagtgcatatttgggagctcgtatctggaaaaatcattgccaccctgcatatcaagtatccgaaagacagaggttaccaggacgcttcgactaagattagagaaatctttcatcacgccggaatccacaacgttacaattcagttcgaaaatgtggacctcaaggaaccacttgagcagaaggacctccttcttttgtgcaacagtccatgcatatctaaagggtgcgctaagcagctgtgctgtccacctggcgctctgccactggcccatgtgaatggatgcgcagaacacaacggcggtccctccttggatacctacggatctgacggtctgagcaggagggatgcccgtgaggtggccatcgaagtgagcctggattcatgcctgagcgatcacgggcagtccttaaataagacacaagaagaccagtgttacgtgaatcggacacacttttag

SEQ ID NO: 298487 - DNA, 723 bp, Artificial Sequence
  derived and/or modified sequence
atgggcgacgccctgggcagcgtggtggtggtgatcaccgccatcatcttctacgtgctgcccctgaagagcgaggacccctgcaactggcagtgctacatcgaccccagcctgaccgtgctgatggtgatcatcatcctgagcagcgccttccccctgatcaaggagaccgccgccatcctgctgcagatggtgcccaagggcgtgaacatggaggagctgatgagcaagctgagcgccgtgcccggcatcagcagcgtgcacgaggtgcacatctgggagctggtgagcggcaagatcatcgccaccctgcacatcaagtaccccaaggacagaggctaccaggacgccagcaccaagatcagagagatcttccaccacgccggcatccacaacgtgaccatccagttcgagaacgtggacctgaaggagcccctggagcagaaggacctgctgctgctgtgcaacagcccctgcatcagcaagggctgcgccaagcagctgtgctgcccccccggcgccctgcccctggcccacgtgaacggctgcgccgagcacaacggcggccccagcctggacacctacggcagcgacggcctgagcagaagagacgccagagaggtggccatcgaggtgagcctggacagctgcctgagcgaccacggccagagcctgaacaagacccaggaggaccagtgctacgtgaacagaacccacttctag

SEQ ID NO: 298488 - protein, 155 aa, Artificial Sequence
  derived and/or modified sequence
SNVMEANAARQATPAEWSQDDSNDMWEDQEEEEEEEEDGLAGQLLSDILATSKYEEDYYEDDEEDDPDALKDPLYQIDLQATLMTMRGEFYRPSASKKGSLSTFAPSGPAANHFAALTGLEMHFLLNLKWHLDPWPLASAVTLMTIQTRLTGAVT

SEQ ID NO: 298489 - DNA, 468 bp, Artificial Sequence
  derived and/or modified sequence
agcaacgtgatggaggccaacgccgccagacaggccacccccgccgagtggagccaggacgacagcaacgacatgtgggaggaccaggaggaggaggaggaggaggaggaggacggcctggccggccagctgctgagcgacatcctggccaccagcaagtacgaggaggactactacgaggacgacgaggaggacgaccccgacgccctgaaggaccccctgtaccagatcgacctgcaggccaccctgatgaccatgagaggcgagttctacagacccagcgccagcaagaagggcagcctgagcaccttcgcccccagcggccccgccgccaaccacttcgccgccctgaccggcctggagatgcacttcctgctgaacctgaagtggcacctggacccctggcccctggccagcgccgtgaccctgatgaccatccagaccagactgaccggcgccgtgacctag

SEQ ID NO: 298490 - DNA, 468 bp, Artificial Sequence
  derived and/or modified sequence
tccaacgtgatggaagcgaacgctgccagacaagcaactccagctgaatggagccaggacgactcaaatgatatgtgggaggaccaggaagaggaagaggaagaagaggaggatggtttggctgggcagctcctctcagatatactcgcaactagcaaatacgaggaggactactacgaagacgatgaggaggatgatcccgatgcgttaaaagaccccctttaccaaattgatctgcaggcaaccctcatgaccatgcggggtgagttctacagaccttctgcaagtaaaaagggcagtctgagtacttttgccccttctggacccgcggcgaatcattttgcggccctaacagggctagagatgcatttccttctcaacctcaaatggcatctggatccctggcctctggcttccgccgtaactctgatgacaatccagactcggcttacaggggcggtgacgtag

SEQ ID NO: 298491 - DNA, 468 bp, Artificial Sequence
  derived and/or modified sequence
agcaatgtgatggaggccaatgctgcccggcaggccaccccagctgagtggagccaggatgacagcaatgacatgtgggaggaccaggaggaggaggaggaggaggaggaggatggcctggccggccagctgctgagtgacatcctggccaccagcaaatatgaggaggactactatgaagatgatgaggaggatgatcctgatgccctgaaggaccccctgtaccagattgacctgcaggccaccctgatgaccatgagaggagagttctaccggcccagcgccagcaagaagggcagcctgagcacctttgcccccagcggccctgctgccaaccactttgctgccctgaccggcctggagatgcacttcctgctgaacctgaagtggcacctggacccctggcccctggccagcgctgtgaccctgatgaccatccagacccggctgactggagctgtgacctag

SEQ ID NO: 298492 - DNA, 468 bp, Artificial Sequence
  derived and/or modified sequence
agcaacgtgatggaggccaacgccgcccggcaggccacccccgccgagtggtcccaggatgattcgaatgatatgtgggaggatcaagaggaggaagaggaggaggaagaggacgggcttgccggacagctcctctccgacatcctggccacctccaagtacgaagaagactattatgaggatgacgaggaggacgatcctgatgcacttaaagacccgctgtaccagatcgatctgcaggcaaccctaatgacaatgcggggagaattttacaggccaagtgctagtaaaaagggttccttatccacattcgccccctcaggcccggcggccaaccacttcgctgccctcacagggttagaaatgcactttctgttgaacctcaagtggcacttggacccgtggccgttggcctccgcagtcaccttgatgaccatacagactagactgaccggagccgtgacctag

SEQ ID NO: 298493 - DNA, 468 bp, Artificial Sequence
  derived and/or modified sequence
agcaatgtaatggaggctaatgcagcccgtcaggcgacacccgcagaatggtcccaggatgattcgaacgatatgtgggaagatcaagaggaggaagaggaagaggaggaggacggtctcgcgggtcagctcctgagcgatatcctagcaacatcaaagtatgaagaggattattacgaagatgacgaggaagatgatcctgacgccctgaaggaccccctgtaccagatcgacttgcaggccactctgatgactatgaggggggagttttaccgcccttccgcctctaagaagggttcactttcaactttcgcaccatccggcccagctgccaaccatttcgccgcattgaccggcctcgagatgcacttcctcctcaatttaaagtggcatctggatccctggcccctggcctcggccgtcactttgatgaccattcagacgaggctgacaggcgctgtaacttag

SEQ ID NO: 298494 - DNA, 609 bp, Artificial Sequence
  derived and/or modified sequence
tccaacgtcatggaggctaatgccgctcgccaggccactcctgcagagtggagtcaagatgactccaatgatatgtgggaggaccaggaggaggaagaggaggaggaggaggatggtttagctggccaacttttatctgacattcttgctacaagtaaatatgaggaggattactacgaggatgatgaggaagatgaccctgatgccctgaaggatcctctctatcagattgatctgcaggccaccttaatgacaatgagaggcgagttctacagaccatcggcatctaaaaaggggagcctttctacatttgctccttctgggccagccgcaaaccattttgcagccctcactggccttgagatgcactttcttctcaacctaaagtggcatcttgacccttggcccttggcctcggcagtgacactgatgacaattcagaccaggctcaccggtgccgtcacttaggaatgctggaacaaaggacatttctcaaagttcccctgaagacatgccatctctagaaccttttttctccccgactctacccccacctctgttcctagagccctctgctggcgagtccagaaacattattgcccagaagga

SEQ ID NO: 298495 - protein, 853 aa, Artificial Sequence
  derived and/or modified sequence
MFLPHMNHLTLEQTFFSQVLPKTVKLFDDMMYELTSQARGLSSQNLEIQTTLRNILQTMVQLLGALTGCVQHICATQESIILENIQSLPSSVLHIIKSTFVHCKNSESVYSGCLHLVSDLLQALFKEAYSLQKQLMELLDMVCMDPLVDDNDDILNMVIVIHSLLDICSVISSMDHAFHANTWKFIIKQSLKHQSIIKSQLKHKDIITSLCEDILFSFHSCLQLAEQMTQSDAQDNADYRLFQKTLKLCRFFANSLLHYAKEFLPFLSDSCCTLHQLYLQIHSKFPPSLYATRISKAHQEEIAGAFLVTLDPLISQLLTFQPFMQVVLDSKLDLPCELQFPQCLLLVVVMDKLPSQPKEVQTLWCTDSQVSETTTRISLLKAVFYSFEQCSGELSLPVHLQGLKSKGKAEVAVTLYQHVCVHLCTFITSFHPSLFAELDAALLNAVLSANMITSLLAMDAWCFLARYGTAELCAHHVTIVAHLIKSCPGECYQLINLSILLKRLFFFMAPPHQLEFIQKFSPKEAENLPLWQHISFQALPPELREQTVHEVTTVGTAECRKWLSRSRTLGELESLNTVLSALLAVCNSAGEALDTGKQTAIIEVVSQLWAFLNIKQVADQPYVQQTFSLLLPLLGFFIQTLDPKLILQAVTLQTSLLKLELPDYVRLAMLDFVSSLGKLFIPEAIQDRILPNLSCMFALLLADRSWLLEQHTLEAFTQFAEGTNHEEIVPQCLSSEETKNKVVSFLEKTGFVDETEAAKVERVKQEKGIFWEPFANVTVEEAKRSSLQPYAKRARQEFPWEEEYRSALHTIAGALEATESLLQKGPAPAWLSMEMEALQERMDKLKRYIHTLG

SEQ ID NO: 298496 - DNA, 2562 bp, Artificial Sequence
  derived and/or modified sequence
atgttcctgccccacatgaaccacctgaccctggagcagaccttcttcagccaggtgctgcccaagaccgtgaagctgttcgacgacatgatgtacgagctgaccagccaggccagaggcctgagcagccagaacctggagatccagaccaccctgagaaacatcctgcagaccatggtgcagctgctgggcgccctgaccggctgcgtgcagcacatctgcgccacccaggagagcatcatcctggagaacatccagagcctgcccagcagcgtgctgcacatcatcaagagcaccttcgtgcactgcaagaacagcgagagcgtgtacagcggctgcctgcacctggtgagcgacctgctgcaggccctgttcaaggaggcctacagcctgcagaagcagctgatggagctgctggacatggtgtgcatggaccccctggtggacgacaacgacgacatcctgaacatggtgatcgtgatccacagcctgctggacatctgcagcgtgatcagcagcatggaccacgccttccacgccaacacctggaagttcatcatcaagcagagcctgaagcaccagagcatcatcaagagccagctgaagcacaaggacatcatcaccagcctgtgcgaggacatcctgttcagcttccacagctgcctgcagctggccgagcagatgacccagagcgacgcccaggacaacgccgactacagactgttccagaagaccctgaagctgtgcagattcttcgccaacagcctgctgcactacgccaaggagttcctgcccttcctgagcgacagctgctgcaccctgcaccagctgtacctgcagatccacagcaagttcccccccagcctgtacgccaccagaatcagcaaggcccaccaggaggagatcgccggcgccttcctggtgaccctggaccccctgatcagccagctgctgaccttccagcccttcatgcaggtggtgctggacagcaagctggacctgccctgcgagctgcagttcccccagtgcctgctgctggtggtggtgatggacaagctgcccagccagcccaaggaggtgcagaccctgtggtgcaccgacagccaggtgagcgagaccaccaccagaatcagcctgctgaaggccgtgttctacagcttcgagcagtgcagcggcgagctgagcctgcccgtgcacctgcagggcctgaagagcaagggcaaggccgaggtggccgtgaccctgtaccagcacgtgtgcgtgcacctgtgcaccttcatcaccagcttccaccccagcctgttcgccgagctggacgccgccctgctgaacgccgtgctgagcgccaacatgatcaccagcctgctggccatggacgcctggtgcttcctggccagatacggcaccgccgagctgtgcgcccaccacgtgaccatcgtggcccacctgatcaagagctgccccggcgagtgctaccagctgatcaacctgagcatcctgctgaagagactgttcttcttcatggcccccccccaccagctggagttcatccagaagttcagccccaaggaggccgagaacctgcccctgtggcagcacatcagcttccaggccctgccccccgagctgagagagcagaccgtgcacgaggtgaccaccgtgggcaccgccgagtgcagaaagtggctgagcagaagcagaaccctgggcgagctggagagcctgaacaccgtgctgagcgccctgctggccgtgtgcaacagcgccggcgaggccctggacaccggcaagcagaccgccatcatcgaggtggtgagccagctgtgggccttcctgaacatcaagcaggtggccgaccagccctacgtgcagcagaccttcagcctgctgctgcccctgctgggcttcttcatccagaccctggaccccaagctgatcctgcaggccgtgaccctgcagaccagcctgctgaagctggagctgcccgactacgtgagactggccatgctggacttcgtgagcagcctgggcaagctgttcatccccgaggccatccaggacagaatcctgcccaacctgagctgcatgttcgccctgctgctggccgacagaagctggctgctggagcagcacaccctggaggccttcacccagttcgccgagggcaccaaccacgaggagatcgtgccccagtgcctgagcagcgaggagaccaagaacaaggtggtgagcttcctggagaagaccggcttcgtggacgagaccgaggccgccaaggtggagagagtgaagcaggagaagggcatcttctgggagcccttcgccaacgtgaccgtggaggaggccaagagaagcagcctgcagccctacgccaagagagccagacaggagttcccctgggaggaggagtacagaagcgccctgcacaccatcgccggcgccctggaggccaccgagagcctgctgcagaagggccccgcccccgcctggctgagcatggagatggaggccctgcaggagagaatggacaagctgaagagatacatccacaccctgggctag

SEQ ID NO: 298497 - DNA, 1697 bp, Artificial Sequence
  derived and/or modified sequence
actgcgagtttccggtctgggctttggcgggtctggtttgaagctctcctgtttgacgaaagtatgtctcaggaaggtgcggtcccagctagcgcggttcccctggaagaattaagtagctggccagaggagctatgccgccgggaactgccgtccgtcctgccccgactcctctcattgtctcaacattctgacagttggattgagcatattcactgtgaaattattcgatgacatgatgtatgaattaaccagtcaagccagaggactgtcaagccaaaatttggaaatccagaccactctaaggaatattttacaaacaatggtgcagctcttaggagctctcacaggatgtgttcagcatatctgtgccacacaggaatccatcattttggaaaatattcagagtctcccctcctcagtccttcatataattaaaagcacatttgtgcattgtaagaatagtgaatctgtgtattctgggtgtttacacctagtttcagaccttctccaggctcttttcaaggaggcctattctcttcaaaagcagttaatggaactgctggacatggtttgcatggaccctttagtagatgacaatgatgatattttgaatatggtaatagttattcattctttattggatatctgctctgttatttccagtatggaccatgcatttcatgccaatacttggaagtttataattaagcagagccttaagcaccagtccataataaaaagccagttgaaacacaaagatataattactagcttgtgtgaagacattcttttctccttccattcttgtttacagttagctgagcagatgacacagtcagatgcacaggataatgctgactacagattatttcagaaaacactcaaattgtgtcgtttttttgccaactcccttttgcactacgctaaggaatttcttcctttcctctctgattcttgctgtactttgcaccaactgtatcttcagatacacagcaagtttcctccaagcctttatgctaccaggatttctaaagcacaccaagaggaaatagcaggtgctttcctagtgacactggatccacttatcagtcagctgctcacatttcagcctttcatgcaggtggttttggacagtaaattaggatatctctactcaaagccgttttctacagttttgagcagtgttctggtgaactctctctacctgttcatttacagggattaaagagtaaggggaaagctgaggtggctgtcaccttgtatcagcatgtttgtgttcatctgtgtacatttattacttcctttcatccctcactgtttgctgaactggtaagcatattacttactgtgctaagctaaggttacacttttgctttctcttcattgaaattgtgattcatatacagaagaaaatgtgggaatacttagtatattccttttgagtgaaacttagttgtgtcctagaaaatggtaatcccagattcctgtattatttagatctaatatttggctaaaatatttgagaaaacattttgggtggggaggtatgcaaagacaatgtgagaagaggaaaaatatgtagtacttaagtaagtttcaaaagaaaagtaaatagcttgtagtatcaggtctcttatagatctcagacataatatagattttaaaaaggatagaatttgatttgaaaagaggtt

SEQ ID NO: 298498 - DNA, 2562 bp, Artificial Sequence
  derived and/or modified sequence
atgtttctgccccacatgaaccatctgacattggagcagacatttttttcacaggtgctccccaaaacagtgaaacttttcgatgacatgatgtatgaactcacctcacaagcccgtggcctgtccagtcaaaacctggagatccagacaactctcaggaatatcttgcagaccatggtgcaactgctcggggctcttacgggctgtgtgcagcacatctgcgcaacccaggagtccatcattctggagaatatccaaagcttgccatcatctgtgttgcatattataaagtcaactttcgtacattgtaaaaacagcgaatctgtctacagcggttgcttgcatcttgttagtgacttgctgcaagctctgttcaaggaggcgtatagcctccaaaaacagcttatggaacttcttgacatggtctgcatggacccccttgtggatgacaatgatgacattttaaacatggtcatcgtcatacacagcctgcttgacatctgctcagttatttcttcgatggaccatgccttccatgccaatacatggaagtttatcatcaagcaatctcttaaacaccagtcgattattaagtcacagctaaagcataaagacatcattacctcactgtgcgaggatatcctgtttagcttccactcctgcttgcaactggctgagcagatgacacagtccgatgctcaagacaatgcagactatcgactcttccagaagacactgaagctgtgccggttcttcgccaactctttgcttcactacgctaaggagttcctgcccttcttatccgatagctgctgcacactgcaccaactttacctgcagatacattcgaaattccctccgtcgctgtacgcgaccagaataagtaaggcacaccaggaagaaatcgctggcgcctttctagtgacgttggacccgctgatctcacagctgctgaccttccagccatttatgcaggttgtccttgacagcaagcttgatcttccctgtgagctgcagttccctcagtgtctgctgcttgtcgtggttatggacaaactgccctcccagcccaaggaagtccaaaccctctggtgtacagattctcaggtgtctgagaccacaacacgcatcagtctcctcaaagcagtgttttattctttcgaacagtgctccggagagttatccttaccggtgcacctgcaaggcctgaaaagtaaagggaaagctgaggtggccgtcacactgtatcaacatgtttgcgtccatctgtgcacgtttatcacatctttccatcctagcttgtttgccgaacttgatgcagcccttctgaatgccgttttgtctgctaacatgattacatctctccttgcaatggacgcttggtgctttctcgctagatatgggactgcggagctttgtgcccatcatgttacgattgtcgcgcaccttataaagtcatgtcccggtgaatgttatcaactgatcaatttatcgatcctgctgaaacgcctgttcttctttatggccccaccacaccagttggaattcatccaaaaattcagcccgaaagaagcggagaatttacccctatggcagcatatctctttccaagctttgcctcccgagctcagagagcagaccgttcacgaggtgaccactgtaggtactgctgagtgtcggaaatggttgtcccgttcccgtactttgggggagttggagtctctgaacactgtcctctctgccctcctcgcggtctgtaatagcgccggggaagccctcgacactggcaagcagaccgctattatcgaagtggtatctcaactgtgggcattcctgaatattaagcaggtggccgaccaaccttacgtgcagcagactttttcactcctgctcccactgctcgggttcttcatacagactttggatccaaaactgatacttcaagccgtgaccctgcagacttcattgttgaagctggaactgcccgactatgtgagactggcaatgctcgattttgtgtcaagcctcgggaagttgtttatccctgaagctattcaggatcggatcctgccaaacctaagttgcatgttcgccctgctgttagccgacagaagttggctgctggaacaacatactcttgaagctttcacccaattcgcagagggaacaaatcacgaagagatcgtcccgcagtgcctgagcagtgaggaaacaaagaataaggtagtgtcattcttggagaaaaccggattcgtggatgaaacagaagcagctaaggtggaaagagtgaagcaggagaaagggattttctgggaacctttcgctaatgtcaccgttgaggaggccaagcggtcaagcttgcagccctatgctaaacgcgcccggcaggagttcccctgggaggaggaatatcgcagtgcactccataccattgccggagctctggaggcaactgagtcgcttctgcaaaagggacccgcccccgcctggctgagtatggaaatggaagccctgcaagagcggatggacaagttaaagcggtacatccacactttaggatag

SEQ ID NO: 298499 - DNA, 2562 bp, Artificial Sequence
  derived and/or modified sequence
atgttccttccccatatgaatcacctcaccttggaacaaacctttttttcccaggtactcccaaaaacggtaaagctttttgatgacatgatgtatgagctgacaagtcaggcccgggggctatcttcacaaaatctggaaattcagactaccttacgcaacattctgcagaccatggtgcagttactgggagcattgactggctgtgttcagcacatttgcgcaacccaagagtctattattttagagaatatacaatcccttccaagttccgttttgcacataattaagtcaaccttcgtccattgtaagaattcggagtctgtgtactcggggtgtctgcacctggtttcagatctgctgcaggccctgttcaaagaagcctattcacttcagaagcagctgatggagctcctggatatggtctgtatggatccgctggtggatgacaatgacgatattctgaacatggtgatcgtgatccactccctgctggacatttgctctgtcattagctccatggaccatgccttccacgcaaacacctggaagttcatcattaagcaatcccttaaacaccagtccatcatcaaaagccaacttaaacacaaagacattataacctcgctgtgtgaggacatattgtttagcttccactcctgtctgcaactggcagaacagatgactcaaagcgacgctcaggacaatgctgattacaggctatttcaaaagacgctgaagctctgtcgattttttgcaaactctttgctccattacgcaaaggagttcctgcctttcctgtcggactcgtgttgtaccctgcaccagctttacctgcagatccactccaagtttcctccctccctgtatgcaactcgcattagcaaggcccatcaggaagaaatcgccggggccttcctcgtgacactggatccccttatctctcaactgctcacctttcagccttttatgcaggtcgtgcttgacagtaagcttgaccttccctgtgaacttcagttcccccagtgtctcctgctcgtcgtggtgatggacaagttgccatcacaaccaaaagaagtacagacattgtggtgtactgattcccaggtctccgaaactaccacccgaatctctctccttaaagccgtcttttattcttttgagcaatgttccggagagctgagcctcccagtgcacctgcagggtttgaaaagcaaaggaaaggctgaagtggctgtcacactgtaccaacacgtgtgtgtccacctgtgcacatttataacgagctttcatccctctctgttcgcagaattggacgccgcccttctcaatgcagtgcttagcgcgaacatgatcacctctttgctcgctatggatgcttggtgctttctggcacgctacggcaccgcagaactttgtgctcaccatgtaacgattgtggctcatcttatcaagtcttgcccaggagagtgttaccagttaattaatctgagcattctgttaaagcggctcttctttttcatggcacccccacaccagctggagttcattcagaagttctcccctaaagaagccgagaatttgccactatggcagcatatttcattccaggccctcccaccagagctacgtgagcagactgtgcacgaggtgacgaccgtgggaacagcagagtgcagaaagtggctgagccggtcccggactctcggtgagcttgaatctctgaacacagttctctccgcccttctggccgtgtgcaatagtgcgggcgaggccctcgacaccggcaaacagacagctattatcgaggtcgtcagccagctctgggcctttttgaatatcaaacaggtggctgaccagccctacgtgcagcagacgttcagcctcttgctgcccctgctgggtttcttcatccagacactcgatccaaaactcattctccaagccgttacactccaaacttccctactgaagctcgagctgcctgactacgtccgtttggccatgctggatttcgtgtccagtctggggaaactgttcatccccgaagccatacaggatcgcatcctgcctaatttgtcctgtatgttcgccttactgctggctgatcggtcctggcttctagagcagcacaccctggaagcattcacccagttcgccgaaggcacaaaccatgaagagattgtcccgcagtgtttgtcaagcgaggagactaagaacaaggtggtgtcatttctggagaaaactgggttcgtggacgagaccgaggctgcgaaagttgagcgggtgaagcaggaaaagggtattttctgggagcccttcgctaacgtgaccgtcgaagaggcgaagcgctcaagtctgcagccatacgctaaaagagcacgacaagaattcccctgggaggaagaatataggtctgcgctgcacactattgctggggccctggaagcaacagaaagtttattgcagaaggggccagcccccgcttggttgtccatggaaatggaagctctgcaagaacgcatggataagttaaaacggtatatacatactctgggttag

SEQ ID NO: 298500 - DNA, 2562 bp, Artificial Sequence
  derived and/or modified sequence
atgttcctgccccacatgaaccacctgaccctggagcagaccttcttcagccaggtgctgcccaagacagtgaagctgtttgatgacatgatgtatgagctgaccagccaggcccggggcctgagcagccagaacctggagatccagaccaccctgaggaacatcctgcagaccatggtgcagctgctgggcgccctgaccggctgtgtgcagcacatctgtgccacccaggagagcatcatcctggagaacatccagagcctgcccagctctgtgctgcacatcatcaagagcacctttgtgcactgcaagaacagcgagagcgtgtacagcggctgcctgcacctggtgtctgacctgctgcaggccctcttcaaggaggcctacagcctgcagaagcagctgatggagctgctggacatggtgtgcatggaccccctggtggatgacaatgatgacatcctgaacatggtgattgtcatccacagcctgctggacatctgcagcgtcatcagctccatggaccacgccttccacgccaacacctggaagttcatcatcaagcagagcctgaagcaccagagcatcatcaagagccagctgaagcacaaggacatcatcaccagcctgtgtgaggacatcctcttctccttccacagctgcctgcagctggccgagcagatgacccagagtgatgcccaggacaatgctgactaccgcctcttccagaagaccctgaagctgtgccgcttctttgccaacagcctgctgcactacgccaaggagttcctgcccttcctgagtgacagctgctgcaccctgcaccagctgtacctgcagatccacagcaagttcccccccagcctgtatgccacccgcatcagcaaggcccaccaggaggagattgctggggccttcctggtgaccctggaccccctcatcagccagctgctgaccttccagcccttcatgcaggtggtgctggacagcaagctggacctgccctgtgagctgcagttcccccagtgcctgctgctggtggtggtgatggacaagctgcccagccagcccaaggaggtgcagaccctgtggtgcacagacagccaggtgtctgagaccaccacccgcatcagcctgctgaaggctgtgttctacagctttgagcagtgcagcggggagctgagcctgcctgtgcacctgcagggcctgaagagcaagggcaaggccgaggtggccgtgaccctgtaccagcacgtgtgtgtgcacctgtgcaccttcatcaccagcttccaccccagcctgtttgctgagctggatgctgccctgctgaatgctgtgctgagcgccaacatgatcaccagcctgctggccatggatgcctggtgcttcctggcccgctatggaacagctgagctgtgtgcccaccacgtgaccatcgtggcccacctgatcaagagctgccctggagagtgctaccagctgatcaacctgagcatcctgctgaagaggctcttcttcttcatggccccaccccaccagctggagttcatccagaagttcagccccaaggaggccgagaacctgcccctgtggcagcacatctccttccaggccctgcccccagagctgcgggagcagacagtgcatgaggtgaccaccgtgggcacagctgagtgcaggaagtggctgagccgcagcaggaccctgggggagctggagagcctgaacacagtgctgagcgccctgctggccgtgtgcaacagcgctggggaggccctggacaccgggaagcagacagccatcatcgaggtggtgtcccagctgtgggccttcctgaacatcaagcaggtggccgaccagccctacgtgcagcagaccttcagcctgctgctgcccctgctgggcttcttcatccagaccctggaccccaagctgatcctgcaggccgtgaccctgcagaccagcctgctgaagctggagctgcctgactatgtgcggctggccatgctggactttgtgagcagcctgggcaagctgttcatccctgaggccatccaggaccgcatcctgcccaacctgagctgcatgtttgccctgctgctggccgaccgctcctggctgctggagcagcacaccctggaggccttcacccagtttgctgagggcaccaaccacgaggagatcgtgccccagtgcctgagcagcgaggagaccaagaacaaggtggtgtccttcctggagaagacaggctttgtggatgaaacagaagctgccaaggtggagcgggtgaagcaggagaagggcatcttctgggagccctttgccaacgtgacagtggaggaggccaagaggagcagcctgcagccctatgccaagagggcccggcaggagttcccctgggaggaggagtaccgcagcgccctgcacaccatcgccggggccctggaggccacagagagcctgctgcagaagggccctgccccagcctggctgtccatggagatggaggccctgcaggagaggatggacaagctgaagcgctacatccacaccctgggctag

SEQ ID NO: 298501 - DNA, 2562 bp, Artificial Sequence
  derived and/or modified sequence
atgttcctgccccacatgaaccacctgaccctggagcagaccttcttctcccaagtgcttcctaaaaccgtcaaactgtttgacgatatgatgtacgagctgacaagccaggctagagggctgtcttcccagaacctggagattcagaccacccttaggaacatactgcagacgatggtgcagcttctgggcgctttgacaggatgtgtccagcatatttgtgcgacacaggagagcatcatcttagaaaacatccagagtcttccttccagtgtcctgcatatcattaagtcaacttttgtccactgcaaaaacagtgaatctgtctatagcgggtgccttcacttggtgagcgacttgctgcaggcgctgttcaaagaggcctactccttacagaagcagctgatggagctgttagatatggtgtgtatggaccctctggttgacgacaacgatgatatcctcaatatggtgatcgttattcattctttgttagacatctgcagtgtgataagttccatggatcacgccttccacgccaacacgtggaaattcataatcaaacagtcacttaaacaccagtccatcataaagagtcaactcaagcataaggacatcatcacctcactctgtgaggacatcctgtttagctttcacagttgcctacagctggctgaacagatgacccaatcagacgcacaagacaacgccgattacagactctttcaaaaaacactgaagctctgtcggttttttgctaacagccttctgcattacgccaaagagttcctgccatttctgagcgactcctgctgcaccctgcatcagctttatcttcagatacactcaaagttccctccctccctctatgcaacacgcattagcaaggcccaccaagaagaaatcgccggtgcttttttggtcacacttgacccactgatctcccagttactaactttccaaccttttatgcaggtggtgctggacagcaaactggaccttccctgtgagctacagttcccacagtgtcttctgctcgtcgttgttatggataagctgccctcccagcctaaggaggtccagacgctatggtgtacggacagtcaggtctccgagactaccacccgaatttcgctactcaaagccgtgttttactctttcgagcagtgtagcggggagctgagcctaccagtacacctacaagggttgaagagcaaaggcaaggctgaagtggccgtgaccctctatcaacacgtgtgtgtacatctatgtacttttattacgtctttccacccttccctgtttgccgaactggacgccgcactgctgaacgccgtgttgtccgccaacatgataaccagtcttttagctatggacgcctggtgcttcctggctagatatgggaccgccgagctctgtgcccatcacgtgactatcgtagcacatctcattaaaagctgtcctggggagtgttatcaacttataaatctgtcaatcctgcttaagagactgttctttttcatggctccgcctcaccaactggagttcattcagaaatttagtccgaaggaagccgagaacctgcctctctggcagcacatctctttccaggccctcccgcctgagttacgcgagcagactgtgcatgaggtgaccacggtgggcaccgccgaatgccgcaagtggctgtctcgaagccggacactgggcgaactggaatcgctcaataccgtgcttagcgccttgctggccgtttgtaactccgcaggggaggcgttggacaccggcaagcagacagctattattgaggtggtgagtcagctgtgggcattcctgaacatcaaacaggttgccgaccagccatatgtgcaacaaacgttcagtttgctattgccccttctggggttttttattcagacgctcgatcccaagctcatcctacaggccgtgaccctgcagaccagtctgctcaagctggagctgcctgactatgtcaggctggccatgcttgacttcgtctctagtctgggcaaactttttatacccgaagccatccaggaccgtatactgcctaatctgagctgcatgttcgcactgctcttagctgatagatcctggctcctggaacagcacactcttgaggcatttacccagtttgcggagggcactaaccacgaagagatcgtccctcagtgcctatccagtgaggagaccaagaataaagtcgtctctttcctggaaaagacggggttcgtggatgaaaccgaggctgctaaagtcgaaagagttaaacaagaaaagggtatcttttgggaaccattcgcaaatgtcaccgttgaggaagccaaacgtagctctctgcagccctacgccaagcgcgctcgccaggagtttccatgggaagaggagtacaggtctgctctgcacaccatcgcaggcgcactcgaggccacagagagcctgttgcaaaaaggcccagccccagcctggctgagtatggaaatggaggcactccaggaacgcatggataagctgaaaagatacatccataccttaggctag

SEQ ID NO: 298502 - DNA, 2562 bp, Artificial Sequence
  derived and/or modified sequence
atgttcctgccccacatgaaccacctgaccctggagcagaccttcttttcacaggtcctccctaaaactgtgaagctgtttgacgatatgatgtacgaacttacctcgcaggcccgggggttgtccagtcagaatctggagattcagacaacactcagaaatatattacagactatggtgcagctgctgggcgcacttacaggctgtgtccaacacatctgtgccacccaggaatccattatcctggaaaatatacagtcattgccatcatcagtactgcatatcatcaaatcaactttcgtgcactgcaagaattccgaaagcgtgtatagtgggtgtctccatctggtgtctgacctgctgcaagctttgtttaaagaggcgtactcactacaaaagcaacttatggagctcctggatatggtttgcatggacccgttggtcgatgacaatgatgatatcctgaatatggtgatagtgattcatagcttgcttgacatttgttccgtgatttcatctatggatcatgcctttcatgccaacacgtggaaatttattatcaagcagtcgttaaagcatcagagcatcatcaagtctcaactcaagcacaaggacatcataacttccctctgtgaggatattttattttcattccatagctgtttgcaactggccgaacagatgacgcagtccgacgcgcaggataatgctgattaccgcctcttccaaaagactctgaagctgtgtagattttttgctaattccctcttacattacgccaaggagtttctgccattcctgtcggacagctgctgtacactgcaccagttgtacctgcagatccatagcaaatttcccccgagcctttatgccacccgaatttctaaagcacaccaggaagaaatagctggcgctttcctcgtaacactggaccccctgatcagccaacttctgactttccaaccattcatgcaagtggtgctagattcaaagttagacctgccttgtgagttgcagtttcctcagtgcctactcctggtggtcgtcatggataagctgccttctcagccgaaggaagtgcagactctgtggtgcacagactctcaggtttccgaaaccacaacacggatcagtctgctaaaagctgttttttactcattcgagcagtgtagcggcgaattgtccctgcccgtgcatctccagggccttaagagcaaggggaaagcagaagttgcagtcacgctctatcaacacgtgtgcgtccacctctgtaccttcatcacatccttccacccctccctgttcgcagaactggatgccgccttactgaacgccgtattatctgccaacatgataaccagtctcctggccatggatgcttggtgttttctagcccgatacggtacggctgagttgtgcgctcaccatgtgaccatcgtcgctcaccttattaagtcatgtcctggggagtgctatcagttgatcaatttatctattcttctaaagagacttttctttttcatggctcctcctcatcagctggagtttatccagaaattcagccccaaggaggcagaaaatcttcctctctggcagcatataagcttccaagcactgcctcccgagcttagggagcagacagtgcacgaggttaccacagtggggaccgccgaatgtaggaaatggttgtcacgaagtcggaccttaggtgaactcgagagtttgaacacagtgcttagcgctctgctggcggtgtgcaacagcgccggtgaagccctggataccggtaagcagaccgccatcattgaagttgtcagtcaactgtgggcatttctgaatataaagcaagttgctgaccaaccctacgtgcagcaaaccttcagcttactgttgccacttctgggatttttcatacaaactcttgaccccaaactgatactgcaggcggtcacgctccaaacatccctgctcaagctcgaactgcctgattatgtgcggctcgccatgttggactttgtcagttcccttggaaagcttttcatcccggaagccatccaggaccgaattctgccgaacctgtcctgcatgtttgccctactgctggctgatagatcttggctgcttgagcagcatactctggaggcattcactcagttcgccgagggcaccaaccatgaagaaattgtgcctcagtgcctgtcttcagaggagaccaaaaacaaagttgtttctttcctggagaagactgggttcgtggatgagaccgaggctgctaaagtggagagggtcaagcaggaaaaggggattttttgggagcctttcgccaacgtgacggttgaggaagctaagcgctcctctctccagccttacgcaaaacgggcgagacaggagttcccatgggaagaggagtatcgtagtgctctgcacacgattgcaggagccttagaagccaccgaaagtttactccagaaggggcctgctcctgcgtggctctctatggagatggaagccctgcaggagcgtatggataaattgaagcgctatattcatacactgggctag

SEQ ID NO: 298503 - DNA, 2562 bp, Artificial Sequence
  derived and/or modified sequence
atgtttctgccacacatgaatcacctgacattggagcagacttttttctcacaggttctccctaaaacagtcaaactcttcgacgacatgatgtacgagctgaccagccaggcgagaggattaagctcacagaacctggagatacaaaccactctgaggaacatcttgcaaacgatggtgcagctgctgggggcactgacaggatgcgtgcagcacatctgtgccactcaggaatctattatcctagaaaatatccagtccttgccttcttctgtgttacatatcataaagtccacttttgtgcactgcaagaattctgagtccgtgtattcaggctgtttacatctggtgtctgatcttttgcaagctctattcaaggaggcctattcactgcagaagcagcttatggagctgcttgacatggtgtgcatggaccctctggtggacgacaacgacgatatactgaacatggtgatcgtaatccattctttattggatatatgttctgtgatctctagcatggatcatgcattccacgccaatacgtggaaatttattatcaagcaatcattgaagcaccagagtatcatcaagtcccaacttaagcataaagatatcatcactagcctgtgcgaagacattctgttttccttccatagctgccttcagttggctgagcagatgactcagagcgatgcacaggacaacgccgattaccggctgttccagaaaactctgaaactgtgtcgcttctttgcgaactcactgctgcactatgctaaagagtttcttccttttctgagcgattcttgctgtaccctccatcagttgtacttgcagattcatagtaagtttcccccatccctgtatgcaacgcgtatttcaaaggcccatcaagaggaaattgctggagcatttctggtgacattagatccactcatttctcagctgttaacctttcagccatttatgcaggtggtgctcgattcgaaattagacctcccatgcgagcttcaattcccacagtgtctactcctagtcgtggtaatggataaattgccgagtcagcccaaagaagttcaaacactgtggtgcaccgactcccaagtaagcgaaacgacaactaggatctcattactcaaagccgtcttctactccttcgaacagtgtagtggtgagctgtccctaccagtgcatcttcagggactcaaatcaaaaggaaaggccgaggtggctgtcacactataccagcacgtttgcgtccacctgtgtaccttcatcacttcgtttcatcctagcctttttgccgagcttgacgcagctctgttgaacgctgttctcagtgcaaatatgattacaagcctcctcgccatggacgcctggtgcttcctcgcccgatacggcacagctgaactttgcgctcaccacgtgacgatcgtggcccacctcatcaagtcctgcccgggagagtgttatcagctgatcaacttgagcattttactgaagcgactgttcttcttcatggccccaccccaccagcttgaatttatacagaagttcagcccgaaagaggcagagaatctgcctttatggcagcacatcagtttccaggcactgccacctgagttacgcgaacagacggtgcacgaagttactactgtaggcacagcagaatgcaggaaatggctgtctcgcagtcggaccctgggagagcttgaatcactcaataccgtgctgagtgcccttctcgcggtctgtaactcagcaggagaagccctggatactgggaaacagacagctattatcgaggtcgtctcgcaactatgggccttcctgaatataaagcaggttgctgaccagccttacgtgcaacagacattttcactgctgctgcccctccttggttttttcattcagaccctagatccaaaactgatactgcaggctgtgacacttcagacttcactgttaaaactcgagctacccgactatgtccggctggctatgttggattttgtgagcagcctaggcaaactcttcattcctgaggccatacaagacaggatccttccaaatcttagctgtatgtttgcactccttctagccgacagaagttggttactggagcaacataccctggaggcttttacccaatttgcagagggaaccaatcacgaggagattgtgcctcagtgtttgtcgtcagaagagaccaaaaataaggtcgtcagctttctggagaaaactggttttgtagacgaaaccgaggccgcaaaagtcgagcgggtcaagcaggagaaaggaatcttctgggaaccgtttgcaaacgtcactgttgaagaggctaagagaagttctttacagccttacgccaaaagggcccgtcaggagttcccctgggaagaggaataccgctcagcattgcatacgatcgctggcgctttggaagcaaccgaatctcttctccagaaggggccagcacccgcttggctttcaatggagatggaggccctacaagaacgcatggataaactcaagcgatacattcatacactgggatag

SEQ ID NO: 298504 - DNA, 2562 bp, Artificial Sequence
  derived and/or modified sequence
atgtttctcccacatatgaaccatctcacactggagcaaacctttttttcacaggtcctgcctaaaaccgtcaagcttttcgacgatatgatgtacgaacttaccagccaggctcggggactctccagccagaatcttgagattcagacaaccctgcgcaacatactgcagactatggtccaactcctgggcgctcttacagggtgcgtgcagcacatctgtgcgactcaggagagcatcatccttgaaaacatccaatcactcccaagctcagttctgcatataatcaaaagtacatttgttcactgcaagaattcggaaagcgtgtactcaggctgcctgcatctggttagcgatcttctgcaggccttgttcaaggaagcttattccctgcaaaagcagctgatggagctgctggatatggtttgtatggatccgctggtagacgataacgatgatattctcaatatggtgatcgtgatacatagcctcttggacatctgttctgttatttcttccatggaccacgcatttcacgcaaatacctggaaatttattattaagcagtccctgaaacatcagtctatcatcaagagccaactgaaacataaagacatcataactagtctttgtgaggacattctcttttcgttccacagctgcctgcagctcgctgagcagatgacacagagcgacgctcaggacaacgcagattataggctattccagaaaactttaaagctgtgtcgcttttttgccaattccctactacactacgccaaggagtttcttccctttctgtcggatagctgctgcactttgcaccagttgtatctgcagatacactccaagtttccgccttcactttatgccaccaggatcagcaaagcccatcaggaggaaattgctggggcatttctagtgacattagacccactgatcagccagttgttaacattccagcctttcatgcaggtggtgcttgatagtaagctcgacctcccctgtgaacttcagttccctcaatgtctcctgctcgtggtggtaatggacaagctgccgagccagcctaaagaggtgcagactctgtggtgcacagattcacaggtgagcgaaaccaccacgcgcatcagtttacttaaggctgtgttctactcttttgagcagtgcagtggcgaattgtccctacctgtccacctgcaaggtcttaaaagtaagggtaaagcagaggtagccgtgacactgtaccaacacgtctgtgtccatctttgcactttcatcacaagctttcatccctcactgtttgccgagctggatgccgcactcttgaacgcggtcctatcagcaaacatgatcacaagcctgctggccatggacgcctggtgcttcttggcacgctacggcacggctgaactctgcgcccaccacgtcaccattgtcgcacatctgataaaaagctgcccaggggagtgctaccagctaattaacttatctatcctccttaaaagattgtttttcttcatggcgccacctcaccagctggaatttattcagaagtttagccccaaggaagctgagaacctcccactctggcagcacattagtttccaggccttacctccagaactccgtgaacagaccgtgcatgaggttacaactgtcgggacagcagagtgccggaagtggctgagtcgctctcgcacactgggagaacttgagagcctgaacacagttctgagcgccctcctcgctgtctgcaactcagctggcgaagctctagatacaggcaagcagacagccattattgaggttgttagtcagctgtgggcatttttgaatattaagcaagtagctgaccaaccatacgtgcagcaaactttttcgctcctgctgccgctgcttgggtttttcatccagaccctcgatccgaaactaattctgcaggctgttacgctgcagacctctcttttaaaacttgaattgcccgattatgtgcgactggcgatgctcgattttgtatcttcgctcggtaagctgttcataccggaggctatccaagataggatcctccccaacctgagctgtatgttcgctctgctactcgccgacagatcatggctgttagagcagcataccctcgaggcattcacccaattcgcggaaggcacgaatcatgaagagatcgtaccacaatgtctgagtagtgaagagaccaaaaacaaggtggtatcttttctggagaaaaccgggtttgtcgacgaaacggaagccgcaaaggttgagagggtcaagcaggagaaagggatcttttgggagccattcgccaacgtcacagtcgaagaggcaaagcggagctcgcttcagccttatgccaagagggccaggcaggagtttccttgggaggaagagtacagatctgccttacacaccatcgccggagccctcgaggctacggaaagtcttctccagaaggggcctgctcctgcttggttaagcatggagatggaggctcttcaagaaagaatggataagctgaagcgttacattcacactttggggtag

SEQ ID NO: 298505 - protein, 330 aa, Artificial Sequence
  derived and/or modified sequence
MMYELTSQARGLSSQNLEIQTTLRNILQTMVQLLGALTGCVQHICATQESIILENIQSLPSSVLHIIKSTFVHCKNSESVYSGCLHLVSDLLQALFKEAYSLQKQLMELLDMVCMDPLVDDNDDILNMVIVIHSLLDICSVISSMDHAFHANTWKFIIKQSLKHQSIIKSQLKHKDIITSLCEDILFSFHSCLQLAEQMTQSDAQDNADYRLFQKTLKLCRFFANSLLHYAKEFLPFLSDSCCTLHQLYLQIHSKFPPSLYATRISKAHQEEIAGAFLVTLDPLISQLLTFQPFMQVVLDSKLGYLYSKPFSTVLSSVLVNSLYLFIYRD

SEQ ID NO: 298506 - DNA, 993 bp, Artificial Sequence
  derived and/or modified sequence
atgatgtacgagctgaccagccaggccagaggcctgagcagccagaacctggagatccagaccaccctgagaaacatcctgcagaccatggtgcagctgctgggcgccctgaccggctgcgtgcagcacatctgcgccacccaggagagcatcatcctggagaacatccagagcctgcccagcagcgtgctgcacatcatcaagagcaccttcgtgcactgcaagaacagcgagagcgtgtacagcggctgcctgcacctggtgagcgacctgctgcaggccctgttcaaggaggcctacagcctgcagaagcagctgatggagctgctggacatggtgtgcatggaccccctggtggacgacaacgacgacatcctgaacatggtgatcgtgatccacagcctgctggacatctgcagcgtgatcagcagcatggaccacgccttccacgccaacacctggaagttcatcatcaagcagagcctgaagcaccagagcatcatcaagagccagctgaagcacaaggacatcatcaccagcctgtgcgaggacatcctgttcagcttccacagctgcctgcagctggccgagcagatgacccagagcgacgcccaggacaacgccgactacagactgttccagaagaccctgaagctgtgcagattcttcgccaacagcctgctgcactacgccaaggagttcctgcccttcctgagcgacagctgctgcaccctgcaccagctgtacctgcagatccacagcaagttcccccccagcctgtacgccaccagaatcagcaaggcccaccaggaggagatcgccggcgccttcctggtgaccctggaccccctgatcagccagctgctgaccttccagcccttcatgcaggtggtgctggacagcaagctgggctacctgtacagcaagcccttcagcaccgtgctgagcagcgtgctggtgaacagcctgtacctgttcatctacagagactag

SEQ ID NO: 298507 - DNA, 993 bp, Artificial Sequence
  derived and/or modified sequence
atgatgtacgagcttactagccaagcccgcgggcttagtagtcagaacctcgagatacagactacacttagaaacattcttcagacaatggtgcagttgctcggggccttgaccggatgcgttcagcatatttgcgccacgcaggagtctatcatcctggagaacattcagagcctcccttcttctgtactgcacatcattaaatctacattcgttcactgcaagaattccgagtctgtgtatagcggatgcctgcatttagtaagcgacctcctacaagctctgtttaaggaggcctatagtcttcaaaagcaactcatggaactactcgatatggtatgcatggaccctcttgtcgacgataacgacgatattctgaatatggtgatcgtaattcactccctattggatatctgttcagtgatcagcagcatggaccacgctttccacgctaacacgtggaaattcatcatcaaacagtcgttgaaacaccaaagcatcatcaagtctcagctaaagcacaaggatataattacatcactttgcgaggacatactttttagcttccatagttgcctgcaactagcagaacagatgacccagtctgatgcccaagataacgccgactaccggttgtttcagaaaactttgaagttatgtcgattcttcgctaattccctgttgcactatgcgaaagagtttctcccctttctcagcgacagctgttgtactcttcaccagctgtacttacaaatccatagcaagtttcccccttctctgtacgccacgagaatctctaaagctcatcaagaagagattgcgggagcattcctggtgacactggatccgttaatatcccagcttctaaccttccagccatttatgcaggtagtcctagactcaaagcttggatatctgtattcaaaacccttttccactgtgctgagtagtgttctcgttaacagcctgtatctctttatttatagagactag

SEQ ID NO: 298508 - DNA, 993 bp, Artificial Sequence
  derived and/or modified sequence
atgatgtatgagctgaccagccaggcccggggcctgagcagccagaacctggagatccagaccaccctgaggaacatcctgcagaccatggtgcagctgctgggcgccctgaccggctgtgtgcagcacatctgtgccacccaggagagcatcatcctggagaacatccagagcctgcccagctctgtgctgcacatcatcaagagcacctttgtgcactgcaagaacagcgagagcgtgtacagcggctgcctgcacctggtgtctgacctgctgcaggccctcttcaaggaggcctacagcctgcagaagcagctgatggagctgctggacatggtgtgcatggaccccctggtggatgacaatgatgacatcctgaacatggtgattgtcatccacagcctgctggacatctgcagcgtcatcagctccatggaccacgccttccacgccaacacctggaagttcatcatcaagcagagcctgaagcaccagagcatcatcaagagccagctgaagcacaaggacatcatcaccagcctgtgtgaggacatcctcttctccttccacagctgcctgcagctggccgagcagatgacccagagtgatgcccaggacaatgctgactaccgcctcttccagaagaccctgaagctgtgccgcttctttgccaacagcctgctgcactacgccaaggagttcctgcccttcctgagtgacagctgctgcaccctgcaccagctgtacctgcagatccacagcaagtttcctcccagcctgtatgccacccgcatcagcaaggcccaccaggaggagattgctggggccttcctggtgaccctggaccccctcatcagccagctgctgaccttccagcccttcatgcaggtggtgctggacagcaagctgggctacctgtacagcaagcccttcagcacagtgctgagctctgtgctggtgaacagcctgtacctgttcatctacagagactag

SEQ ID NO: 298509 - DNA, 993 bp, Artificial Sequence
  derived and/or modified sequence
atgatgtacgagctgaccagccaggcccggggcctgagcagccagaaccttgagattcagactactctccgtaatatcctgcagactatggtgcaactgcttggcgctctgacgggctgcgtgcaacatatttgcgcaactcaggagagcattattctagaaaatatccagtccctgcccagtagtgttctacatattattaaaagcacctttgtgcattgtaagaattcggaatctgtttactccggctgcctccacctggtttccgacctcctgcaggccctatttaaagaagcttactcgctccaaaaacaacttatggaattgctggacatggtgtgcatggatccactggtggacgacaatgatgatatcctcaatatggtcattgtgattcacagtctgctcgacatatgttccgtaatctcttcaatggatcacgcgtttcatgccaacacctggaagttcattattaagcaaagcctgaagcaccagagtatcattaaaagtcaattaaagcacaaagacattatcactagcttatgcgaggacattcttttttcctttcatagctgcttacaactagcagagcaaatgacacaatctgacgcgcaggacaatgccgattaccggctgtttcagaaaactctgaaactgtgtaggtttttcgccaattcactcctccactacgctaaggagttcctgccatttttgagtgactcctgctgtactctgcaccagctttatcttcagatccactcgaaatttccccctagtctgtacgcaacccgcatcagcaaagctcaccaagaagagatcgctggtgccttcctggttacactggatccattaatcagccagctgctaacgtttcaacctttcatgcaagtcgtcctcgattccaagctgggatatctgtatagtaaaccgttttccacagtactctcttccgtgttggtgaattctctgtaccttttcatttatagggattag

SEQ ID NO: 298510 - DNA, 993 bp, Artificial Sequence
  derived and/or modified sequence
atgatgtacgaactgacgtcacaggcacgaggactatcctctcaaaacctggagatccaaactaccctgcgcaatattctccagaccatggtacagctgctgggagctctgactggctgtgtgcagcacatctgtgcaacccaggagtcgattatcctggagaacatccagtctctgcccagcagcgtcctgcatatcattaaatctactttcgttcactgcaagaattcggaatccgtgtacagtggatgtctccatttagtgagtgacctgctacaagccctgtttaaagaggcgtactcactccagaagcaactgatggaattactggacatggtgtgtatggatccgctggtggatgacaatgacgatatactcaacatggtcatagtgattcactccctcctggatatctgtagcgtgatcagcagtatggatcatgcttttcatgcaaacacttggaaattcatcatcaaacagtccttgaaacaccagtccatcattaagtctcaacttaagcacaaggacattatcaccagcctgtgcgaggatatcctcttcagttttcatagctgcttgcaactggctgagcagatgacacagagcgacgctcaggacaatgccgactaccgcttattccaaaaaactctgaaactgtgccgcttctttgccaacagcctgctccactacgccaaggagtttttgccattcctctctgacagctgctgcaccctgcatcagctctatttgcagatccacagtaagtttccccctagcttatatgcaacgcggatatcaaaggcccaccaggaggagatcgcgggagcattcctggtgacgctggacccgttgataagccagcttctgacctttcaaccttttatgcaggtggtcctcgatagcaagctgggctacctttactcaaagcccttttcaactgtcctcagctccgtcctggtgaatagtctgtatctcttcatctaccgtgattag

SEQ ID NO: 298511 - DNA, 1799 bp, Artificial Sequence
  derived and/or modified sequence
acggcggcaggggcgtgctcggaggacgcgcgctgcgctgctcctccaaagggcagctccgggggaaagagggtggcgtcccggggaagcccgcagccgccgccgatgtcgctgggactcggaagtgccgaaagaggggtgttgggaactcgcggcgcgcgtgaacgttgccgtcgccgccgcccgggacagcccggagaaactctcagcgtaggcatcgggaaccttcgtgccaaggagccatgctgccccgatgggaactggcactttacctacttgcctcactaggcttccacttctattccttctatgaagtttacaaagtctccagagaacacgaagaggagctggaccaggaatttgagctggagactgacactttatttggaggattaaagaaggatgcgaccgactttgagtggagcttctggatggaatgggggaagcagtggctggtgtggcttctccttggccacatggtagtgtctcaaatggccacactgctggcaagaaagcacagaccctggattctcatgctctatgggatgtgggcctgctggtgtgtgctggggacccctggtgtggctatggttttgctccataccaccatctctttctgcgtggcccagttccggtctcagctcctgacgtggctctgttctctcctcctcctctccacactgaggctgcagggtgtggaagaagttaagagaaggtggtacaagacagaaaacgagtactacctgctgcagttcacgctgaccgttcgctgcctgtactacaccagcttcagcctggagctctgctggcagcagctgcctgctgcatcgacctcctactcctttccctggatgctggcctatgtcttttattatccagtcttacacaatgggcccatcctcagcttctcggagttcatcaaacagatgcagcagcaggagcatgactccctgaaggccagcctgtgtgtcctggccctggggctgggccgccttctttgctggtggtggctggccgagctgatggctcacctgatgtacatgcatgccatctacagcagcatccccctcctggagactgtctcttgttggaccttaggaggactggcgttagcccaggtgctctttttctacgtgaagtacttggtgctctttggcgtgcctgctctgctcatgcgcctggatggactcactccacccgccctcccccgctgcgtgagcaccatgttcagtttcaccgggatgtggaggtattttgatgttggactgcataatttcttaatcaggtatgtgtacattccagtgggcgggtcccagcatggcctgctggggacactgttttccacggcgatgacatttgcatttgtgagctactggcatggcggctacgactacctctggtgctgggcagcgctcaactggctgggagtcactgtggagaatggagtccggaggctggtggagactccctgcatccaggacagtctggcccgatacttctccccacaagctcgccgtcgattccacgctgcccttgcttcttgttccacctcgatgctgatcctgtccaacctggtatttcttgggggcaatgaggttgggaaaacctactggaataggatcttcatacaaggaggtttatttttattttttttactcaatccatgttgggagacagcattccagggctttcctgtgtttctgcatttcttacaaacagaggtactggctacctttgttcccaactatttttcctggaatatttgtatagaaaacacctccgaattgtccagctactaa

SEQ ID NO: 298512 - protein, 518 aa, Artificial Sequence
  derived and/or modified sequence
MLPRWELALYLLASLGFHFYSFYEVYKVSREHEEELDQEFELETDTLFGGLKKDATDFEWSFWMEWGKQWLVWLLLGHMVVSQMATLLARKHRPWILMLYGMWACWCVLGTPGVAMVLLHTTISFCVAQFRSQLLTWLCSLLLLSTLRLQGVEEVKRRWYKTENEYYLLQFTLTVRCLYYTSFSLELCWQQLPAASTSYSFPWMLAYVFYYPVLHNGPILSFSEFIKQMQQQEHDSLKASLCVLALGLGRLLCWWWLAELMAHLMYMHAIYSSIPLLETVSCWTLGGLALAQVLFFYVKYLVLFGVPALLMRLDGLTPPALPRCVSTMFSFTGMWRYFDVGLHNFLIRYVYIPVGGSQHGLLGTLFSTAMTFAFVSYWHGGYDYLWCWAALNWLGVTVENGVRRLVETPCIQDSLARYFSPQARRRFHAALASCSTSMLILSNLVFLGGNEVGKTYWNRIFIQGGLFLFFLLNPCWETAFQGFPVFLHFLQTEVLATFVPNYFSWNICIENTSELSSY

SEQ ID NO: 298513 - DNA, 1557 bp, Artificial Sequence
  derived and/or modified sequence
atgttgccaagatgggagctggctctgtacctcctggcatccctcgggttccatttttactctttttacgaggtctacaaggtgtcccgtgagcacgaagaggagctggatcaggaattcgagctggagaccgatacactctttggagggctcaaaaaggacgcaacagacttcgagtggtctttctggatggaatggggcaagcagtggctggtatggctgctcttgggtcacatggtagtgtcacagatggccactctcctggcccgaaaacatcgcccctggattctgatgctgtacggcatgtgggcgtgttggtgtgttttgggaactcctggggtggcaatggtcctcctccataccactatcagcttttgcgtggcacagttcagaagccagctgcttacctggctatgtagcttgctgcttctatcaacgctgagactgcagggagttgaagaggttaagagacggtggtacaaaaccgagaacgagtattaccttttacagttcacactgactgtaagatgcttatactatacctcattttctctagaactgtgttggcaacagctgcccgccgccagcactagctacagctttccctggatgctggcatatgtgttttactaccccgtcctgcataatggtcccattctatccttcagtgaatttatcaagcagatgcaacagcaggaacacgacagcctgaaagctagcctatgcgtgctcgctctggggctaggccgccttctgtgctggtggtggttagcagagttgatggcccacctcatgtacatgcacgccatctattcctcaatccctctgctggagacagtcagctgctggaccctgggcggcctggctctcgctcaggtcctcttcttttatgttaaatacctcgtacttttcggcgtgccagccctcctaatgcgtctggacggtctgacaccccctgctttgcctcggtgtgtgagtacaatgttttcgttcactggcatgtggagatatttcgatgtggggctccacaatttcctcatcagatacgtttacatccccgtgggcggttcacagcacggtctcctcggcaccctgtttagtactgccatgacattcgccttcgttagttactggcacgggggctacgactacctttggtgttgggccgcgctgaattggctcggggtcacggtagagaatggagtgcgccgattggtagagactccctgtatacaagactccctcgccaggtatttcagccctcaggctaggcggcggtttcatgccgccttggccagttgctccacatcgatgctgatcctgtccaatctggtattcctcggtggaaacgaggtgggtaagacttactggaaccgaatcttcattcaaggaggcctgttcctattttttttgctaaatccatgctgggaaactgctttccagggattcccggtctttctgcacttccttcaaacagaagtcctcgcaaccttcgtgcccaattacttctcttggaatatctgcattgaaaacaccagcgagctcagcagctactag

SEQ ID NO: 298514 - DNA, 1557 bp, Artificial Sequence
  derived and/or modified sequence
atgctgccccgctgggagctggccctgtacctgctggccagcctgggcttccacttctacagcttctatgaggtgtacaaggtgtcccgggagcacgaggaggagctggaccaggagtttgagctggagacagacaccctgtttggaggcctgaagaaggatgccacagactttgagtggagcttctggatggagtggggcaagcagtggctggtgtggctgctgctgggccacatggtggtgtcccagatggccaccctgctggccaggaagcaccggccctggatcctgatgctgtatggcatgtgggcctgctggtgtgtgctgggcaccccaggagtggccatggtgctgctgcacaccaccatctccttctgtgtggcccagttccgcagccagctgctgacctggctgtgcagcctgctgctgctgagcaccctgcggctgcagggcgtggaggaggtgaagaggcgctggtacaagacagaaaatgagtactacctgctgcagttcaccctgactgtgcgctgcctgtactacaccagcttcagcctggagctgtgctggcagcagctgcctgctgccagcaccagctacagcttcccctggatgctggcctacgtgttctactaccctgtgctgcacaacggccccatcctgtccttcagcgagttcatcaagcagatgcagcagcaggagcatgacagcctgaaggccagcctgtgtgtgctggccctgggcctgggccgcctgctgtgctggtggtggctggccgagctgatggcccacctgatgtacatgcacgccatctacagcagcatccccctgctggagaccgtgtcctgctggaccctgggcggcctggccctggcccaggtgctcttcttctacgtgaagtacctggtgctgtttggagtgcctgccctgctgatgaggctggatggcctgaccccaccagccctgccccgctgtgtgtccaccatgttctccttcaccggcatgtggagatactttgatgtgggcctgcacaacttcctgatccgctacgtgtacatccctgtgggcggcagccagcacggcctgctgggcaccctcttcagcacagccatgacctttgcctttgtgtcctactggcatggaggctatgactacctgtggtgctgggccgccctgaactggctgggcgtgacagtggagaatggagtgcggcggctggtggagaccccctgcatccaggacagcctggcccgctacttcagcccccaggcccggcggcgcttccacgccgccctggccagctgcagcacctccatgctgatcctgagcaacctggtgttcctgggcggcaatgaggtgggcaagacctactggaaccgcatcttcatccagggcggcctcttcctgttcttcctgctgaacccctgctgggagacagccttccagggcttccctgtgttcctgcacttcctgcagacagaggtgctggccacctttgtgcccaactacttctcctggaacatctgcatcgagaacaccagcgagctgagcagctactag

SEQ ID NO: 298515 - DNA, 1557 bp, Artificial Sequence
  derived and/or modified sequence
atgctgccccggtgggagctggccctgtacctgctggccagcctgggcttccatttttattctttctacgaggtgtacaaagtgtcacgagagcacgaggaggagttagatcaggagttcgaactggaaacagatactctgttcggcggcctgaagaaagacgccactgacttcgagtggtcattttggatggagtggggtaaacagtggcttgtctggctgctccttggtcacatggttgtttcccagatggccactctgctggctaggaaacacaggccctggatcctgatgttgtatggaatgtgggcctgttggtgcgtgctgggcacacctggtgtggccatggtgctactgcataccacaatttccttttgcgtggcccagtttagaagtcagctcctcacctggctatgctctctgctcctgttgagcacgctgcgactgcagggagttgaagaggtgaagcgcaggtggtacaagacggagaatgagtactacctgctacagtttaccctgactgtcaggtgcctgtactatacaagcttcagtctagaactgtgctggcagcaactcccggccgcatccacctcttattctttcccttggatgttagcatacgttttctattaccccgtgctgcacaatggccccattcttagcttctctgaatttattaagcagatgcagcagcaggaacatgatagccttaaggccagtttatgcgtcttggcactggggctcggtcgccttctttgctggtggtggctcgctgagctgatggcgcatctgatgtacatgcatgcaatatattcttcgataccactcctcgagacagtgagttgctggaccctcggggggttggccttggcacaggttttatttttctacgtgaaatacctggtgctcttcggagtgcccgcccttctgatgcgtctcgacggcctgactccccccgccttgccacgatgcgttagcactatgttctcgtttaccggcatgtggaggtactttgacgtgggactccacaactttttgattcgttatgtgtacatccccgtgggcggatcccagcacgggctgctggggactttgtttagcacagctatgacgtttgctttcgtgagctattggcacggcggctatgactatctatggtgttgggccgcattgaactggctcggcgtcaccgtggagaacggcgtgcgcagattggtcgaaacaccctgcatccaggactccctcgcccgctactttagtcctcaggcaagacggcgtttccatgccgccttagccagttgctctacaagcatgctgatcttaagcaatttggtattcctgggtggcaacgaggtggggaagacttactggaatcggatattcatccagggggggttgttcctgttcttcctcctgaacccctgctgggaaacagctttccaggggttccccgtgttccttcacttcctgcagacagaggtgcttgccaccttcgtccccaactatttctcttggaatatttgtattgaaaacaccagcgagttaagttcttactag

SEQ ID NO: 298516 - DNA, 1557 bp, Artificial Sequence
  derived and/or modified sequence
atgcttccacgttgggaattagcactttacctgctcgcgtcgctgggctttcatttctattcattctacgaagtgtacaaggtgtccagagagcatgaagaagaactggatcaggagttcgagctggagacagatactctgttcggcggattaaagaaggatgctactgattttgaatggtctttttggatggagtggggcaaacagtggctcgtctggctgctgttgggtcacatggtcgtgtcccaaatggccacccttctggctcggaaacacagaccgtggattctgatgctgtatgggatgtgggcctgctggtgcgttttaggcacccccggtgtcgccatggttctccttcacactacgatatcattctgcgtagcacaattccgcagtcagcttctcacatggctctgttccctgctgctcctctctactctgcgactgcaaggtgtggaagaggtgaagaggcgctggtacaaaacagaaaacgagtactatttgttgcagtttacactgacggtgaggtgtctctactacacctccttctcacttgaactctgctggcagcagctcccagccgcttctacaagctactcattcccctggatgctggcctatgtgttttactatccggttctgcataacgggccaatcctgagttttagtgagttcatcaagcagatgcagcaacaagagcacgattctctgaaagcctctctgtgtgttctggcgctcggactgggccgtctgctctgttggtggtggctggcagaacttatggcccacttgatgtatatgcacgcaatttacagcagcatcccactgctggagaccgtttcctgttggactctcggagggctggccctggcccaggttttgttcttttacgtaaagtacctggtgctctttggcgtgccagcactcctaatgaggctggatgggctgacccctcctgccctcccccgttgtgtatcaactatgtttagcttcaccggcatgtggcggtattttgatgtaggactccacaacttcctcatccggtacgtttacatccctgtggggggatcccagcatggcctgctgggaaccctcttcagtacggcgatgacattcgcattcgttagctattggcatgggggttatgactacctatggtgctgggccgctctgaattggctgggagtgaccgtggagaacggggtccggagactcgtcgaaaccccctgtattcaggactccctggcccgttacttctccccccaggcaaggcgtcgatttcacgccgctctcgcttcctgcagcaccagcatgctgatcttgtccaacctcgtcttcctgggcggaaatgaggtggggaagacctattggaaccgaatctttatccagggtggcttatttctgtttttccttctcaacccatgctgggaaacagcatttcaaggattcccagtgtttcttcatttcctccagaccgaggtgctcgcaacatttgtcccaaactacttctcctggaacatctgcatagagaacacaagcgagctaagctcatactag

SEQ ID NO: 298517 - DNA, 1557 bp, Artificial Sequence
  derived and/or modified sequence
atgctgcccagatgggagctggccctgtacctgctggccagcctgggcttccacttctacagcttctacgaggtgtacaaggtgagcagagagcacgaggaggagctggaccaggagttcgagctggagaccgacaccctgttcggcggcctgaagaaggacgccaccgacttcgagtggagcttctggatggagtggggcaagcagtggctggtgtggctgctgctgggccacatggtggtgagccagatggccaccctgctggccagaaagcacagaccctggatcctgatgctgtacggcatgtgggcctgctggtgcgtgctgggcacccccggcgtggccatggtgctgctgcacaccaccatcagcttctgcgtggcccagttcagaagccagctgctgacctggctgtgcagcctgctgctgctgagcaccctgagactgcagggcgtggaggaggtgaagagaagatggtacaagaccgagaacgagtactacctgctgcagttcaccctgaccgtgagatgcctgtactacaccagcttcagcctggagctgtgctggcagcagctgcccgccgccagcaccagctacagcttcccctggatgctggcctacgtgttctactaccccgtgctgcacaacggccccatcctgagcttcagcgagttcatcaagcagatgcagcagcaggagcacgacagcctgaaggccagcctgtgcgtgctggccctgggcctgggcagactgctgtgctggtggtggctggccgagctgatggcccacctgatgtacatgcacgccatctacagcagcatccccctgctggagaccgtgagctgctggaccctgggcggcctggccctggcccaggtgctgttcttctacgtgaagtacctggtgctgttcggcgtgcccgccctgctgatgagactggacggcctgaccccccccgccctgcccagatgcgtgagcaccatgttcagcttcaccggcatgtggagatacttcgacgtgggcctgcacaacttcctgatcagatacgtgtacatccccgtgggcggcagccagcacggcctgctgggcaccctgttcagcaccgccatgaccttcgccttcgtgagctactggcacggcggctacgactacctgtggtgctgggccgccctgaactggctgggcgtgaccgtggagaacggcgtgagaagactggtggagaccccctgcatccaggacagcctggccagatacttcagcccccaggccagaagaagattccacgccgccctggccagctgcagcaccagcatgctgatcctgagcaacctggtgttcctgggcggcaacgaggtgggcaagacctactggaacagaatcttcatccagggcggcctgttcctgttcttcctgctgaacccctgctgggagaccgccttccagggcttccccgtgttcctgcacttcctgcagaccgaggtgctggccaccttcgtgcccaactacttcagctggaacatctgcatcgagaacaccagcgagctgagcagctactag

SEQ ID NO: 298518 - DNA, 3446 bp, Artificial Sequence
  derived and/or modified sequence
acggcggcaggggcgtgctcggaggacgcgcgctgcgctgctcctccaaagggcagctccgggggaaagagggtggcgtcccggggaagcccgcagccgccgccgatgtcgctgggactcggaagtgccgaaagaggggtgttgggaactcgcggcgcgcgtgaacgttgccgtcgccgccgcccgggacagcccggagaaactctcagcgtaggcatcgggaaccttcgtgccaaggagccatgctgccccgatgggaactggcactttacctacttgcctcactaggcttccacttctattccttctatgaagtttacaaagtctccagagaacacgaagaggagctggaccaggaatttgagctggagactgacactttatttggaggattaaagaaggatgcgaccgactttgagtggagcttctggatggaatgggggaagcagtggctggtgtggcttctccttggccacatggtagtgtctcaaatggccacactgctggcaagaaagagaaggtggtacaagacagaaaacgagtactacctgctgcagttcacgctgaccgttcgctgcctgtactacaccagcttcagcctggagctctgctggcagcagctgcctgctgcatcgacctcctactcctttccctggatgctggcctatgtcttttattatccagtcttacacaatgggcccatcctcagcttctcggagttcatcaaacagatgcagcagcaggagcatgactccctgaaggccagcctgtgtgtcctggccctggggctgggccgccttctttgctggtggtggctggccgagctgatggctcacctgatgtacatgcatgccatctacagcagcatccccctcctggagactgtctcttgttggaccttaggaggactggcgttagcccaggtgctctttttctacgtgaagtacttggtgctctttggcgtgcctgctctgctcatgcgcctggatggactcactccacccgccctcccccgctgcgtgagcaccatgttcagtttcaccgggatgtggaggtattttgatgttggactgcataatttcttaatcaggtatgtgtacattccagtgggcgggtcccagcatggcctgctggggacactgttttccacggcgatgacatttgcatttgtgagctactggcatggcggctacgactacctctggtgctgggcagcgctcaactggctgggagtcactgtggagaatggagtccggaggctggtggagactccctgcatccaggacagtctggcccgatacttctccccacaagctcgccgtcgattccacgctgcccttgcttcttgttccacctcgatgctgatcctgtccaacctggtatttcttgggggcaatgaggttgggaaaacctactggaataggatcttcatacaaggctggccttgggtgaccctctctgtcctgggattcctgtactgctactcccacgtgggcattgcctgggcccagacctacgccacggactaatgctgttgggcccaggccagtccttgttgctggcctccaaggcaaatagtgcttcaccctgacctctcactccaggacagcctctaagggatttgatctgctcatcttcagttgaatgccctcactccaagactggatgctggatctcatagaaaattcacagccagacaatcttctaatctggagtctttgagatcttctaccccaactcatcattttcctattgaggaaacgggtccagggcagtcgtgtgtcttacccagctacacagggtgacattttggtctagaacctagtctcatgagccctttgcattctttccccttaagcaagaatagaatgtagtggaaatttattgattgagacacagaaatcctgattagtgataggcctgtcttctgggcaatatttctaaaatatttgagtgacattgatgtttaagtgacctccttcatcacatcctgcagtatctccagaagcagcactagggtttgagtttcatacttcagcccctctgtaggaatgagaccaagccacagctgtcttttgaattacgtagtcgaagaagacggtagcagccctgtagcattctaaggcatctatacccaaggagtcctgtgatttgagcttcagcagggtgatctacatttgggtgcttgtttctgagatttgcagagaagtataacatggtagttcctctaccttacagttaatcgtttcttaataaagaagcagaatttagaaaccacaggatagtgtacccacagatgggtgttatcaaggccagtcatgaggatggtgtcctggagtcttgtccaccctctccatacaagtctcaaaagtcatcctcctactcagtgattcacgtttagtggtttatattattaaggtttgattcaaacagagccttttctgtcctgtagataatctacatgtttgtagaattattttgaatatgtttgaggaaaatgtttaaaatctaaatatactcacataacttgattattcactcctctgaaaagatgctggataggctaccaaagttcccaagtggtagataattcagaagacttgtttgaatttggattttttttttttttggagtggggaagggtataaaggaggcttaaaatttgaatccataatatatctaattacaggagaatttacaacatctcaagtacgtaaattaagttgtcattgagtgaaaggttcacttggacctagtgctgcctcctgtttattacatagcatggcccttatgtcttgagttgaggttatcatctcaatgaggcttaagctcctagagtacaggaccattttgttgattgtctttcttcatagcttctctgcttggcaaagagatgggagggggccagatactgactacctggggtaggcacattatgtgttaaagcaagacagaggccagagaggggcaggtagacctgcatagcagcagcctcagcagctgtcttggtaaaggagagagagagacatggggccagtaattccggggtgctcagaagttttaggagggaatgagcctcagggaggagtgagcacctaaatgaacgcagtaaaccttcatggaccaacagtgattgaggatttgtgggcagccagagggagtctgactgaagtttacttggaaagaaagggcttgctaagaaaaaagggagtaaaaatgatgatagggaagtgtctaatgtatgtgcacatataagtaatacaaaagttttgagctcttccaagtataccatttatatacaaacaaataggtttattcattcattaaactactttggaagcgtcagtggatatatttgaaagtggtaatcctgaatctcttttaaactattatatgattcataatggttctcaggaattaataaatgattactgtgtttagctctg

SEQ ID NO: 298519 - protein, 207 aa, Artificial Sequence
  derived and/or modified sequence
MEWGKQWLVWLLLGHMVVSQMATLLARKRRWYKTENEYYLLQFTLTVRCLYYTSFSLELCWQQLPAASTSYSFPWMLAYVFYYPVLHNGPILSFSEFIKQMQQQEHDSLKASLCVLALGLGRLLCWWWLAELMAHLMYMHAIYSSIPLLETVSCWTLGGLALAQVLFFYVKYLVLFGVPALLMRLDGLTPPALPRCVSTMFSFTGMW

SEQ ID NO: 298520 - DNA, 1293 bp, Artificial Sequence
  derived and/or modified sequence
atggagtggggtaaacagtggctagtatggttgctcctgggccatatggttgtatcacagatggccactttactggcccgcaaacataggccctggatcctcatgctatacggcatgtgggcctgttggtgcgtgctgggcacccccggagttgcaatggtgctactccacactactattagcttttgtgtagcccagttccgcagccagctgctgacctggctatgtagcctgttgctgctgtctacgctgcggttacagggagtcgaagaggtcaaacggaggtggtataagacggaaaatgaatactatctacttcagtttacactcacggtaaggtgtctctattacacaagtttcagtttggaactctgttggcagcaactccctgcagcgtccaccagctattctttcccatggatgttagcgtacgttttctactatcctgtccttcacaacggacccattctctcttttagcgaatttataaagcaaatgcagcagcaagagcacgattcgctgaaagcatcactctgcgtgctggcacttggactgggccggctgttgtgttggtggtggcttgccgagctgatggctcacctgatgtacatgcacgccatttattcctccattccgctcctggagaccgtgtcttgttggacccttggggggctggccctcgcgcaggtgctgtttttttatgtcaagtacctggtcctcttcggtgtccccgctcttctcatgaggctcgacgggctgactccccctgcattacctcgctgcgtttcaacaatgttctcctttacgggaatgtggcggtatttcgatgtaggtctgcataactttctgatccgctacgtttacatccccgtaggtgggtcccagcatggcctgctcgggactttgttctctacagccatgacgtttgctttcgtgtcgtactggcacggcggttacgattacctatggtgctgggcagcgttgaactggcttggagtgactgtggagaacggagtgcgtcggttagttgaaaccccatgtatccaggacagtctggccagatactttagcccccaagcacgcagacgattccatgcagctttagcctcatgtagcacgagtatgctgattctgagtaatttagtgtttctgggtggaaatgaagtgggaaagacttattggaatcggattttcatccagggttggccttgggtgaccctttccgtactggggttcctgtactgctatagccacgtgggcatcgcttgggcccagacttacgcgacagattag

SEQ ID NO: 298521 - DNA, 1293 bp, Artificial Sequence
  derived and/or modified sequence
atggagtggggcaagcagtggctggtgtggctgctgctgggccacatggtggtgtcccagatggccaccctgctggccaggaagcaccggccctggatcctgatgctgtatggcatgtgggcctgctggtgtgtgctgggcaccccaggagtggccatggtgctgctgcacaccaccatctccttctgtgtggcccagttccgcagccagctgctgacctggctgtgcagcctgctgctgctgagcaccctgcggctgcagggcgtggaggaggtgaagaggcgctggtacaagacagaaaatgagtactacctgctgcagttcaccctgactgtgcgctgcctgtactacaccagcttcagcctggagctgtgctggcagcagctgcctgctgccagcaccagctacagcttcccctggatgctggcctacgtgttctactaccctgtgctgcacaacggccccatcctgtccttcagcgagttcatcaagcagatgcagcagcaggagcatgacagcctgaaggccagcctgtgtgtgctggccctgggcctgggccgcctgctgtgctggtggtggctggccgagctgatggcccacctgatgtacatgcacgccatctacagcagcatccccctgctggagaccgtgtcctgctggaccctgggcggcctggccctggcccaggtgctcttcttctacgtgaagtacctggtgctgtttggagtgcctgccctgctgatgaggctggatggcctgaccccaccagccctgccccgctgtgtgtccaccatgttctccttcaccggcatgtggagatactttgatgtgggcctgcacaacttcctgatccgctacgtgtacatccctgtgggcggcagccagcacggcctgctgggcaccctcttcagcacagccatgacctttgcctttgtgtcctactggcacggcggctatgactacctgtggtgctgggccgccctgaactggctgggcgtgacagtggagaatggagtgcggcggctggtggagaccccctgcatccaggacagcctggcccgctacttcagcccccaggcccggcggcgcttccacgccgccctggccagctgcagcacctccatgctgatcctgagcaacctggtgttcctgggcggcaatgaggtgggcaagacctactggaaccgcatcttcatccagggctggccctgggtgaccctgtctgtgctgggcttcctgtactgctacagccacgtgggcatcgcctgggcccagacctacgccacagactag

SEQ ID NO: 298522 - DNA, 1293 bp, Artificial Sequence
  derived and/or modified sequence
atggagtggggcaagcagtggctggtgtggctgctgctgggccacatggtcgtgtctcagatggctacactgttggcaagaaagcaccgcccgtggatattgatgctgtatgggatgtgggcatgttggtgcgtgctgggaacccctggcgttgccatggtgctcctccacacaacaatctctttttgcgttgctcaatttcgatcccagctcctgacctggctctgctccttgctacttctgagtacgctcagacttcagggggtggaggaggtgaaacgacgctggtataagactgagaacgaatattatctgctacagttcactctcacggttcgctgtctatattatacctcgttttctttagagctttgttggcagcagttgcccgccgcctccactagctacagttttccctggatgctagcttacgtcttctattaccctgtactgcacaacggtccaatcctgagcttctcagagtttatcaaacagatgcagcaacaggagcatgattctcttaaagcttcattgtgtgtcttggccctggggttgggccgcctcctgtgttggtggtggctcgccgagttaatggcccatctgatgtatatgcatgctatatactcaagtattccccttttagagaccgttagctgctggacccttggcggtctggccctggcacaggttctgttcttttacgtgaaatacctggtgctatttggcgtccccgcactgcttatgaggttagacggcttgacgcccccagccctgcctaggtgtgtcagcacaatgttctccttcacaggaatgtggcggtactttgatgtgggcttgcacaactttctcatcaggtatgtatacattcctgtgggcggtagccagcacggcctcctggggaccctattcagcacagccatgacgttcgcttttgtgagctattggcacggaggctatgactacttatggtgctgggcagcattgaattggctcggggtgaccgttgaaaatggggttaggcgtctcgtggagaccccttgtatccaggactcccttgcgcggtacttctccccccaggcccgtcggagattccacgccgcgttagcaagctgctcaacctccatgctcatactatccaatctcgtgttcctgggaggcaacgaggttggcaagacctactggaacaggatcttcattcagggatggccgtgggtgaccttatcggtactcggattcctatattgctactcgcacgtgggcatcgcctgggcccagacatacgcaacagattag

SEQ ID NO: 298523 - DNA, 1293 bp, Artificial Sequence
  derived and/or modified sequence
atggaatggggcaaacagtggctcgtgtggctgttattaggccacatggttgtgagtcagatggccacgcttctggctcgcaaacatcgtccctggattctgatgctgtacggcatgtgggcctgttggtgcgtgctggggactcccggagtggccatggtactgttgcatacaaccattagcttctgtgtagctcagttcaggtcccagctgctaacctggctctgctccttacttctgctgagtacccttcgcctacagggcgttgaagaagtgaagcgccgatggtataagaccgaaaacgagtattatctgcttcagtttacgctgactgtaaggtgtctatactacactagctttagcttagagctgtgctggcaacagttacccgcagcttctacttcatacagcttcccttggatgctggcttacgttttctattatccagttctgcacaacggacctatcctgtctttctccgaattcattaaacaaatgcagcagcaggagcacgattcgctcaaggcttccctttgcgtgctggctttggggctcggcagactcctgtgttggtggtggttagcggagttaatggcgcaccttatgtacatgcacgccatttactctagtataccactgctggagaccgtgtcatgctggaccttaggaggcctggctctggcccaggtgctcttcttttacgtcaagtacctggttctgttcggtgtgcccgcattactgatgagactggacggacttaccccccctgccctccctcggtgtgttagtaccatgttttcattcacagggatgtggaggtattttgatgttggcttgcacaatttcctaattagatatgtttacattccagtagggggatcacagcacggtttgttgggaacccttttctccaccgcaatgaccttcgcctttgtgagctactggcacggcggatacgattacctgtggtgttgggctgctctaaactggctgggcgttacagttgaaaacggcgtgcggaggctggtcgagaccccatgcatccaggattcactggccaggtacttttctccgcaggctcgaaggaggttccacgccgcactagcttcatgctcaacttctatgctgatcctgagcaacctcgtttttctgggaggtaatgaggtggggaaaacttattggaaccgcatctttatccagggctggccatgggtgacactttctgttctcggcttcctctactgctactcacacgtgggaatcgcatgggcccagacgtacgcaacagattag

SEQ ID NO: 298524 - DNA, 1293 bp, Artificial Sequence
  derived and/or modified sequence
atggagtggggcaagcagtggctggtgtggctgctgctgggccacatggtggtgagccagatggccaccctgctggccagaaagcacagaccctggatcctgatgctgtacggcatgtgggcctgctggtgcgtgctgggcacccccggcgtggccatggtgctgctgcacaccaccatcagcttctgcgtggcccagttcagaagccagctgctgacctggctgtgcagcctgctgctgctgagcaccctgagactgcagggcgtggaggaggtgaagagaagatggtacaagaccgagaacgagtactacctgctgcagttcaccctgaccgtgagatgcctgtactacaccagcttcagcctggagctgtgctggcagcagctgcccgccgccagcaccagctacagcttcccctggatgctggcctacgtgttctactaccccgtgctgcacaacggccccatcctgagcttcagcgagttcatcaagcagatgcagcagcaggagcacgacagcctgaaggccagcctgtgcgtgctggccctgggcctgggcagactgctgtgctggtggtggctggccgagctgatggcccacctgatgtacatgcacgccatctacagcagcatccccctgctggagaccgtgagctgctggaccctgggcggcctggccctggcccaggtgctgttcttctacgtgaagtacctggtgctgttcggcgtgcccgccctgctgatgagactggacggcctgaccccccccgccctgcccagatgcgtgagcaccatgttcagcttcaccggcatgtggagatacttcgacgtgggcctgcacaacttcctgatcagatacgtgtacatccccgtgggcggcagccagcacggcctgctgggcaccctgttcagcaccgccatgaccttcgccttcgtgagctactggcacggcggctacgactacctgtggtgctgggccgccctgaactggctgggcgtgaccgtggagaacggcgtgagaagactggtggagaccccctgcatccaggacagcctggccagatacttcagcccccaggccagaagaagattccacgccgccctggccagctgcagcaccagcatgctgatcctgagcaacctggtgttcctgggcggcaacgaggtgggcaagacctactggaacagaatcttcatccagggctggccctgggtgaccctgagcgtgctgggcttcctgtactgctacagccacgtgggcatcgcctgggcccagacctacgccaccgactag

SEQ ID NO: 298525 - protein, 40 aa, Artificial Sequence
  derived and/or modified sequence
MESKDEVSDTDSGIILQSGPDSPVSPMKELTHAVHKQQRA

SEQ ID NO: 298526 - DNA, 123 bp, Artificial Sequence
  derived and/or modified sequence
atggagagcaaggacgaggtgagcgacaccgacagcggcatcatcctgcagagcggccccgacagccccgtgagccccatgaaggagctgacccacgccgtgcacaagcagcagagagcctag

SEQ ID NO: 298527 - DNA, 123 bp, Artificial Sequence
  derived and/or modified sequence
atggaatccaaggatgaggtcagcgataccgactctggcattattctgcaaagcggaccagactcaccagtctccccaatgaaggaacttacacacgccgtccacaagcagcagcgcgcatag

SEQ ID NO: 298528 - DNA, 123 bp, Artificial Sequence
  derived and/or modified sequence
atggagagcaaggatgaggtgtctgacacagacagcggcatcatcctgcagagcggccctgacagccctgtgagccccatgaaggagctgacccatgctgtgcacaagcagcagagggcctag

SEQ ID NO: 298529 - DNA, 123 bp, Artificial Sequence
  derived and/or modified sequence
atggagagcaaggacgaggtgagcgacaccgacagcggcatcatcctccagagtgggcccgacagtccggtgagtccaatgaaagaactgacccacgcagtacacaagcagcaacgcgcgtag

SEQ ID NO: 298530 - DNA, 477 bp, Artificial Sequence
  derived and/or modified sequence
atggacctggccagcgagatcaccagcgccacccagaccagcagcctctgtagttcaggccggggacacgcaggatatcccgcaccaggaattgtagcccacggttttgaaacccacggaacagctcgcgtcgcccagggacatttactgcctccatgtttgttgccccctccccagatgccagttctggcggccctcagagatctgtctcggcgcggatctacctcttcttcgcggagtccatctcggcccgtatcaacatcagcttcaaagccctgcctccctgctagctgtctcggcgagacatggagtattagtataaaccttgtgggaagcagtggccatctgcagtccccaggagcccagcgggatgcacaacgcgagacaggatgcctggggcccagttggctcccacatcaccaaggccgcgacgaagagttatccctctcacacagcgcccagggcgaggagttctag

SEQ ID NO: 298531 - DNA, 123 bp, Artificial Sequence
  derived and/or modified sequence
atggagtccaaggatgaagtgtcagacacggattctggtatcatccttcagtctgggccagattctccagttagccccatgaaggagctcacccacgccgtccacaaacagcagagggcatag

SEQ ID NO: 298532 - DNA, 570 bp, Artificial Sequence
  derived and/or modified sequence
ggagtgggagtgggccggggccagggccggggagaggggccatccccgcgcgacccgcagcgccgcacagcgagggggagggcgcctgcggggaggacagggtcgggggagcgcccttccgcaggctcctttcattcttccacttaggggtctccaggaatgaaaactggccccagccaggccagagcgcgcgaatgaaaggcggcactgggaccaagagagaagcttcgtcccgcctgggctgcggaaactggcggcgccaggggtgtcccaccgcgcgggcgtccgaaagcggggcaaaggggacagcctcgcccctcgagcggctgctcccgcagctcgctcacccctgcggctggggaagctccaggctacctacacaacctggcccaggctggtcacggtgtcccccctccctgctctgtgccctctccttccagaaatccaccatggagagtaaggatgaggtcagcgacaccgacagtggcatcatcctgcagtctggccccgacagcccggtctccccaatgaaggagctgacccatgcagtgcacaagcagcagagggccc

SEQ ID NO: 298533 - DNA, 4966 bp, Artificial Sequence
  derived and/or modified sequence
agtgccacccaatcagaaacatggtcggtgcccgtggaacaatgagctactgatgagggtgtggcctggaaaacggcttttagacaaaactgtcattttatgggtcagctatagacagacatggcgcttcagctgtcttcagaataatgtcacccggcctcctctcctgtcttctgcagtcttaaaagacctagtccctaactgaggtctggcttttcctcagccctggatgaagtggagaagtgttgatttttggaggagacatcctgaaatttgcaggactggctgctggccacatcagcatgttggtctttggagatgaaacacacagccactttctggtgattggtcaggcagtggacgatgtgcgccttgcccagaacatggctcagatgaatgatgttattctgtcaccaaactgctggcagctctgtgaccggagcatgattgaaattgagagtgttccagatcagagagcagttaaggttaacttcttaaaaccaccccccaattttaattttgatgaatttttcacaaagtgtacgaccttcatgcattattatccttctggtgagcacaaaaacctcctgaggcttgcatgcacgctgaagcctgatcctgaactggagatgtccctacaaaagtatgtgatggaaagcattttgaagcagattgataacaaacagcttcagggctatttatctgagcttcgcccagtgacgattgtgtttgtgaacctgatgtttgaagaccaagacaaagcagaagagataggcccagccatccaggatgcctatatgcacatcacttctgtcctgaagatcttccaaggccaaatcaataaagtcttcatgtttgacaagggctgctctttcctctgtgtctttggcttccctggggaaaaggtacctgacgagctcactcatgctctggaatgtgctatggatatatttgacttctgctctcaagtccacaaaatccaaactgtatccatcggtgttgccagtgggattgtcttctgtgggatcgttggacacactgtgagacacgagtacacagtcattggtcaaaaagtcaacttagctgccaggatgatgatgtactacccaggaattgtgacctgcgactctgtcacctacaatgggagcaacctaccagcgtacttttttaaagagcttccaaagaaagttatgaaaggtgttgcagattctggaccattgtatcagtattggggccgtactgagaaagtcatgtttggtatggcgtgcctcatctgcaacagaaaggaggattaccctttgctgggacgtaataaagagatcaactacttcatgtatactatgaagaaatttttgatatctaacagcagccaagtcttaatgtatgagggattaccaggatatggaaaaagccagatacttatgaaaattgagtacctggcccaaggtaagaatcacaggattattgccatttcattgaataagatcagcttccatcaaactttctataccatccagatgttcatggccaatgtcctaggcctagacacttgtaaacattataaagaacgacagaccaaccttcgaaataaagtcatgacactgttggatgaaaagttctactgtcttcttaatgacattttccatgttcagttccctatttctcgggagatttccaggatgagcaccttgaaaaagcaaaaacaattggaaatattgtttatgaagatcttgaagctgatagtgaaagaggaaaggattatttttatcattgatgaggcccagtttgtggattcgacctcctggagatttatggagaagcttatccggactcttcctatcttcatcattatgtccctgtgtcccttcgttaacattccctgtgcagctgccagggccgtaataaagaacaggaacaccacctacattgtcattggtgcagtacagcctaacgacatctccaacaagatctgtcttgacctcaatgtgagctgcatctccaaagaactggactcgtacctgggggagggaagctgtgggattccattttactgtgaagaattgcttaaaaacctggaacatcatgaggtactcgttttccaacaaacggagtctgaggaaaagacaaataggacctggaataacctgttcaagtattccattaagctaacagagaagttaaacatggttactctccatagtgataaggaaagtgaagaagtctgtcacctcacaagtggtgtcagactgaaaaacctgtcacctccaacgtcattaaaagaaatctctctgatccagctggatagcatgagactttcccaccaaatgctggtgagatgtgctgccatcattggcctgaccttcaccactgagttgttgtttgagattctcccctgttggaatatgaagatgatgatcaagaccctggcaaccctagtggaatctaacattttttattgtttccggaatggcaaggagcttcaaaaggccctgaaacagaatgatccctcatttgaggtgcactatcgttccttgtctctgaagcccagtgaagggatggatcacggtgaagaggaacagcttcgtgaactggagaatgaggtgatcgagtgccacaggattcgattctgtaaccctatgatgcagaaaacagcctacgagctgtggctcaaggaccagagaaaagccatgcacttgaaatgtgcccgctttttagaagaagatgcccacagatgtgaccactgccgaggcagggacttcattccctatcatcacttcacagtgaatattcggctcaacgctttagacatggatgccattaaaaagatggctatgtctcatggatttaaaactgaagaaaagcttatcttgtccaactcagagattcctgagacatctgcattttttcctgaaaatcgcagtcctgaagaaataagagaaaagatcttgaatttctttgaccacgttttaacaaaaatgaagacatctgacgaagacattatccctctggaatcttgccagtgtgaagaaatcctagagattgtcatcttgcctctggcccaccattttctggctttgggagaaaatgacaaagccttatattacttcttagaaattgcatctgcttatctcatcttttgtgataactacatggcatacatgtatttgaatgaaggacagaagttgctaaaaactctcaagaaggacaaatcttggagccagacatttgagtctgccaccttttacagcctcaaaggtgaggtctgtttcaatatgggccagatagtgcttgccaagaaaatgctgaggaaggcactgaagctcctcaaccgaatctttccttacaacttaatctccttgtttctccatatccatgtcgagaaaaacagacactttcattatgtgaatcggcaggcccaagagagcccacctccagggaagaagaggctggcacaactttaccggcaaactgtctgcctttccttgctgtggcgcatctatagctacagttatctttttcactgcaagtattatgcccacctggcagttatgatgcaaatgaatactgcactggaaactcaaaattgtttccagatcattaaggcttacctagactattcgctataccaccacctggctggctacaaaggtgtgtggttcaaatatgaagtcatggccatggagcacatcttcaacctccccctgaaaggcgagggcattgaaatcgtggcatacgtggctgagacactggtcttcaacaagctcataatgggacacctggatttggccattgagttaggctcccgagcccttcagatgtgggcactgctccagaatcccaaccgacattatcagtccctctgcagacttagcagatgtctccttctgaacagcagatacccgcaattgatccaggtgctggggcggctgtgggagctttctgtaacacaggaacacatcttcagcaaggcatttttctattttgtctgcttggacatcctgctttattctggttttgtttatagaacatttgaagaatgtttggaattcatacaccaatacgaaaacaacagaatcctcaagttccacagtggactcctcctgggactttattcctctgtagctatctggtatgccagacttcaggaatgggacaacttttacaaattttccaatagagctaaaaatcttttgccaagaagaaccatgacacttacttactatgacggaatatctaggtacatggaggggcaagttcttcaccttcaaaaacaaatcaaagaacagtcagagaatgcccaagccagtggggaggagctactcaagaacttggagaatctggtggctcaaaataccactggccctgtcttttgcccaaggctctaccacctgatggcttacgtctgtatattaatgggagatgggcagaaatgtggcctcttcctgaacacagccttgcggctctctgaaacacaggggaatatactggagaaatgctggctgaacatgaacaaagaatcatggtactcaacctctgagttaaaagaagaccaatggcttcagacgatcttgagtctcccatcatgggaaaaaattgtagcaggcagggtaaacattcaggatcttcaaaaaaacaaattcctgatgagagctaataccgtggacaatcatttctaacatgtcaaagaaaaaagattttaataagcactatgtccttgtgattatctattattgacctttctccgtggctggcccactccaggttcctacataatctcttctgttccagacacagaaacagacatgttgatttcttctctttctggagggcctacaagggtcaggagtgtcatggtttacttcttcctaatgttacaaaaaattgcttttaccattcatgttgttttagcttgacctgtttatttcagcccatgcaaaactgtatcatattacaaattattaatctc

SEQ ID NO: 298534 - DNA, 960 bp, Artificial Sequence
  derived and/or modified sequence
accaaggccaccaccacccgggccaccagctccatgagcacccccagcagcaccccaggcaccacctggatcctgacagagctgaccacagctgccaccaccacagctgccaccccccacggccaccctgtgctgcacccccgggaccacctggacccccaccgggcccagcactacacagtgacagtgcccaccggcagcacagccacagccagcagcacccgggccacagctggcaccctgaaggtgctgaccagccaccacacccacagccaccagctgcagagccacagcctgctgcagagccgggactgcaaccggcccagcagcacagagaagcacagccaccacacccacagctaccagcgctacagccaccccctcttcctgcccacagcctggacccggctgagccagaccaccacccccacagccaccatgagcacagccacccccagcagcaccccagagaccgtgcacaccagcacagtgctgaccaccaccaccaccaccacccgggccaccctgtggcccccacctcctccaccccaggagcagctgaccctgcccaagtgccgcctgccccagcccaggcacagccaccccctgctgcagcccagagatggcacccacgccagctctgtggaccagcacaaccaccacacccacaaccagaggctgcacggggaccccctgctgcaccccaccacccacacagccaccgtgctgaccaccaccaccaccacccccctggtgctgtggcagcacccccccctggcccacaggcctgtggtgccccccagcctgaccaccacagccaccaccatcacagccaccggcagcaccaccaaccccagcagcaccccaggcaccacccccatcccccctgtgctgaccaccacagcccacacctgcagccaccagcagcacagcgacagcctgctgtgcccccgggactag

SEQ ID NO: 298535 - DNA, 960 bp, Artificial Sequence
  derived and/or modified sequence
accaaggccaccacaacaagagcaacaagctctatgtctacgcccagttctacacctggaactacatggatcctgacagaattgacgacagccgccacgacaaccgccgcaacacctcacggccatcccgtcctgcatcccagagaccatctcgacccccatagagcccaacattacacagtgaccgtccccacaggatcaaccgccaccgcttcgagcacacgcgctacagcaggaaccctcaaagtcttgactagccatcacacacacagccaccaacttcagtcccactccttgctgcagagccgggattgtaacagaccctcatcgaccgagaagcattctcatcacactcattcctaccaacgatacagccacccccttttccttccaaccgcctggactaggcttagccagacaactacccccacagcaaccatgtcaaccgccaccccttccagcacacccgagaccgtacacacgtcaaccgtcttaactacaaccactaccaccactcgtgccactctctggcctcctcccccaccaccacaagaacagctgacgctccccaagtgccggctgccgcaaccccgtcattctcaccctctcctccagcctagagacggaacccacgcatcttccgtagaccagcataatcaccatactcacaatcagcggctccacggagaccccctactccaccccacaacacacacagctacggtactgactactactactaccacccccctcgtgctttggcagcatcctcccctcgcccatagacctgttgtgcccccttcactgacaacgaccgccaccaccattaccgccaccggatctaccacaaacccctccagtacacctggtactactccgataccacccgtcctgacaacaactgcccatacttgctctcatcaacagcacagcgactctcttctatgccctcgtgactag

SEQ ID NO: 298536 - DNA, 960 bp, Artificial Sequence
  derived and/or modified sequence
accaaggccaccaccaccagagccaccagcagcatgagcacccccagcagcacccccggcaccacctggatcctgaccgagctgaccaccgccgccaccaccaccgccgccaccccccacggccaccccgtgctgcaccccagagaccacctggacccccacagagcccagcactacaccgtgaccgtgcccaccggcagcaccgccaccgccagcagcaccagagccaccgccggcaccctgaaggtgctgaccagccaccacacccacagccaccagctgcagagccacagcctgctgcagagcagagactgcaacagacccagcagcaccgagaagcacagccaccacacccacagctaccagagatacagccaccccctgttcctgcccaccgcctggaccagactgagccagaccaccacccccaccgccaccatgagcaccgccacccccagcagcacccccgagaccgtgcacaccagcaccgtgctgaccaccaccaccaccaccaccagagccaccctgtggcccccccccccccccccccaggagcagctgaccctgcccaagtgcagactgccccagcccagacacagccaccccctgctgcagcccagagacggcacccacgccagcagcgtggaccagcacaaccaccacacccacaaccagagactgcacggcgaccccctgctgcaccccaccacccacaccgccaccgtgctgaccaccaccaccaccacccccctggtgctgtggcagcacccccccctggcccacagacccgtggtgccccccagcctgaccaccaccgccaccaccatcaccgccaccggcagcaccaccaaccccagcagcacccccggcaccacccccatcccccccgtgctgaccaccaccgcccacacctgcagccaccagcagcacagcgacagcctgctgtgccccagagactag

SEQ ID NO: 298537 - protein, 676 aa, Artificial Sequence
  derived and/or modified sequence
MPDHDSTALLSRQTKRRRVDIGVKRTVGTASAFFAKARATFFSAMNPQGSEQDVEYSVVQHADGEKSNVLRKLLKRANSYEDAMMPFPGATIISQLLKNNMNKNGGTEPSFQASGLSSTGSEVHQEDICSNSSRDSPPECLSPFGRPTMSQFDMDRLCDEHLRAKRARVENIIRGMSHSPSVALRGNENEREMAPQSVSPRESYRENKRKQKLPQQQQQSFQQLVSARKEQKREERRQLKQQLEDMQKQLRQLQEKFYQIYDSTDSENDEDGNLSEDSMRSEILDARAQDSVGRSDNEMCELDPGQFIDRARALIREQEMAENKPKREGNNKERDHGPNSLQPEGKHLAETLKQELNTAMSQVVDTVVKVFSAKPSRQVPQVFPPLQIPQARFAVNGENHNFHTANQRLQCFGDVIIPNPLDTFGNVQMASSTDQTEALPLVVRKNSSDQSASGPAAGGHHQPLHQSPLSATTGFTTSTFRHPFPLPLMAYPFQSPLGAPSGSFSGKDRASPESLDLTRDTTSLRTKMSSHHLSHHPCSPAHPPSTAEGLSLSLIKSECGDLQDMSEISPYSGSAMQEGLSPNHLKKAKLMFFYTRYPSSNMLKTYFSDVKFNRCITSQLIKWFSNFREFYYIQMEKYARQAINDGVTSTEELSITRDCELYRALNMHYNKANDFE

SEQ ID NO: 298538 - protein, 230 aa, Artificial Sequence
  derived and/or modified sequence
MPDHDSTALLSRQTKRRRVDIGVKRTVGTASAFFAKARATFFSAMNPQGSEQDVEYSVVQHADGEKSNVLRKLLKRANSYEDAMMPFPGATIISQLLKNNMNKNGGTEPSFQASGLSSTGSEVHQEDICSNSSRDSPPECLSPFGRPTMSQFDMDRLCDEHLRAKRARVENIIRGMSHSPSVALRGNENEREMAPQSVSPRESYRENKRKQKLPQQQQQSFQQLVSARKE

SEQ ID NO: 298539 - protein, 737 aa, Artificial Sequence
  derived and/or modified sequence
MPDHDSTALLSRQTKRRRVDIGVKRTVGTASAFFAKARATFFSAMNPQGSEQDVEYSVVQHADGEKSNVLRKLLKRANSYEDAMMPFPGATIISQLLKNNMNKNGGTEPSFQASGLSSTGSEVHQEDICSNSSRDSPPECLSPFGRPTMSQFDMDRLCDEHLRAKRARVENIIRGMSHSPSVALRGNENEREMAPQSVSPRESYRENKRKQKLPQQQQQSFQQLVSARKEQKREERRQLKQQLEDMQKQLRQLQEKFYQIYDSTDSENDEDGNLSEDSMRSEILDARAQDSVGRSDNEMCELDPGQFIDRARALIREQEMAENKPKREGNNKERDHGPNSLQPEGKHLAETLKQELNTAMSQVVDTVVKVFSAKPSRQVPQVFPPLQIPQARFAVNGENHNFHTANQRLQCFGDVIIPNPLDTFGNVQMASSTDQTEALPLVVRKNSSDQSASGPAAGGHHQPLHQSPLSATTGFTTSTFRHPFPLPLMAYPFQSPLGAPSGSFSGKDRASPESLDLTRDTTSLRTKMSSHHLSHHPCSPAHPPSTAEGLSLSLIKSECGDLQDMSEISPYSGSAMQEGLSPNHLKKAKLMFFYTRYPSSNMLKTYFSDVKFNRCITSQLIKWFSNFREFYYIQMEKYARQAINDGVTSTEELSITRDCELYRALNMHYNKANDFEVPERFLEVAQITLREFFNAIIAGKDVDPSWKKAIYKVICKLDSEVPEIFKSPNCLQELLHE

SEQ ID NO: 298540 - protein, 309 aa, Artificial Sequence
  derived and/or modified sequence
MASSTDQTEALPLVVRKNSSDQSASGPAAGGHHQPLHQSPLSATTGFTTSTFRHPFPLPLMAYPFQSPLGAPSGSFSGKDRASPESLDLTRDTTSLRTKMSSHHLSHHPCSPAHPPSTAEGLSLSLIKSECGDLQDMSEISPYSGSAMQEGLSPNHLKKAKLMFFYTRYPSSNMLKTYFSDVKFNRCITSQLIKWFSNFREFYYIQMEKYARQAINDGVTSTEELSITRDCELYRALNMHYNKANDFEVPERFLEVAQITLREFFNAIIAGKDVDPSWKKAIYKVICKLDSEVPEIFKSPNCLQELLHE

SEQ ID NO: 298541 - DNA, 3088 bp, Artificial Sequence
  derived and/or modified sequence
ccccttttccagaatcacttgcactgtcttgttcttgaatgagaaaggaagaaaagagcctcccattactcagacccgtgtaaacattattccccccaggagaaaatggtgttattcaaatgaatcataataaaatagcctctaaacagtttctaagcgggagcctccgtggaactcagcgctccgctcctcccagttcctaagaggtcccgggattcttgagctgtgcccagctgacgagcttttgaagatggcacaataaccgtccagtgatgcctgaccatgacagcacagccctcttaagccggcaaaccaagaggagaagagttgacattggagtgaaaaggacggtagggacagcatctgcattttttgctaaggcaagagcaacgttttttagtgccatgaatccccaaggttctgagcaggatgttgagtattcagtggtgcagcatgcagatggggaaaagtcaaatgtactccgcaagctgctgaagagggcgaactcgtatgaagatgccatgatgccttttccaggagcaaccataatttcccagctgttgaaaaataacatgaacaaaaatggtggcacggagcccagtttccaagccagcggtctctctagtacaggctccgaagtacatcaggaggatatatgcagcaactcttcaagagacagccccccagagtgtctttccccttttggcaggcctactatgagccagtttgatatggatcgcttatgtgatgagcacctgagagcaaagcgcgcccgggttgagaatataattcggggtatgagccattcccccagtgtggcattaaggggcaatgaaaatgaaagagagatggccccgcagtctgtgagtccccgagaaagttacagagaaaacaaacgcaagcaaaagcttccccagcagcagcaacagagtttccagcagctggtttcagcccgaaaagaacagaagcgagaggagcgccgacagctgaaacagcagctggaggacatgcagaaacagctgcgccagctgcaggaaaagttctaccaaatctatgacagcactgattcggaaaatgatgaagatggtaacctgtctgaagacagcatgcgctcggagatcctggatgccagggcccaggactctgtcggaaggtcagataatgagatgtgcgagctagacccaggacagtttattgaccgagctcgagccctgatcagagagcaggaaatggctgaaaacaagccgaagcgagaaggcaacaacaaagaaagagaccatgggccaaactccttacaaccggaaggcaaacatttggctgagaccttgaaacaggaactgaacactgccatgtcgcaagttgtggacactgtggtcaaagtcttttcggccaagccctcccgccaggttcctcaggtcttcccacctctccagatcccccaggccagatttgcagtcaatggggaaaaccacaatttccacaccgccaaccagcgcctgcagtgctttggcgacgtcatcattccgaaccccctggacacctttggcaatgtgcagatggccagttccactgaccagacagaagcactgcccctggttgtccgcaaaaactcctctgaccagtctgcctccggccctgccgctggcggccaccaccagcccctgcaccagtcgcctctctctgccaccacgggcttcaccacgtccaccttccgccaccccttcccccttcccttgatggcctatccatttcagagcccattaggtgctccctccggctccttctctggaaaagacagagcctctcctgaatccttagacttaactagggataccacgagtctgaggaccaagatgtcatctcaccacctgagccaccacccttgttcaccagcacacccgcccagcaccgccgaagggctctccttgtcgctcataaagtccgagtgcggcgatcttcaagatatgtctgaaatatcaccttattcgggaagtgcaatgcaggaaggattgtcacccaatcacttgaaaaaagcaaagctcatgtttttttatacccgttatcccagctccaatatgctgaagacctacttctccgacgtaaagttcaacagatgcattacctctcagctcatcaagtggtttagcaatttccgtgagttttactacattcagatggagaagtacgcacgtcaagccatcaacgatggggtcaccagtactgaagagctgtctataaccagagactgtgagctgtacagggctctgaacatgcactacaataaagcaaatgactttgaggttccagagagattcctggaagttgctcagatcacattacgggagtttttcaatgccattatcgcaggcaaagatgttgatccttcctggaagaaggccatatacaaggtcatctgcaagctggatagtgaagtccctgagattttcaaatccccgaactgcctacaagagctgcttcatgagtagaaatttcaacaactctttttgaatgtatgaagagtagcagtcccctttggatgtccaagttatatgtgtctagattttgatttcatatatatgtgtatgggaggcatggatatgttatgaaatcagctggtaattcctcctcatcacgtttctctcattttcttttgttttccattgcaaggggatggttgttttctttctgcctttagtttgcttttgcccaaggcccttaacatttggacacttaaaatagggttaattttcagggaaaaagaatgttggcgtgtgtaaagtctctattagcaatgaagggaatttgttaacgatgcatccacttgattgatgacttattgcaaatggcggttggctgaggaaaacccatgacacagcacaactctacagacagtgatgtgtctcttgtttctactgctaagaaggtctgaaaatttaatgaaaccacttcatacatttaagtattttgtttggtttgaactcaatcagtagcttttccttacatgtttaaaaataattccaatgacagatgagcagctcacttttccaaagtaccccaaaaggccaaattaaaaaaaaaaaaaaaaaaa

SEQ ID NO: 298542 - DNA, 2214 bp, Artificial Sequence
  derived and/or modified sequence
atgccggatcacgatagtacagcgctgctgtccaggcaaacaaagcgccgaagagtcgatatcggggtgaagcgcaccgtgggaaccgccagcgcattcttcgctaaagctcgcgctacattcttctcagccatgaatccacaaggatccgagcaggacgtggagtactctgttgttcagcatgcagacggcgaaaagagcaacgtactgaggaaattacttaaacgcgcaaactcctatgaggacgctatgatgcctttcccaggcgccactattatttcacagctgctgaagaacaacatgaacaaaaacggcggcaccgagccgagcttccaagcttccggcctgagctccactgggtctgaagtgcaccaggaagacatttgcagcaactcatctagagacagcccccccgagtgtctgtccccctttggacgacccacaatgtcacagttcgacatggatcgattatgtgacgaacatctgcgggctaagcgcgctcgagtggagaacatcatcagagggatgagtcattccccctctgtagccctaagagggaatgaaaatgagagggagatggctccgcagtcagttagcccgcgcgaaagctatcgcgagaataaaagaaagcagaaactacctcagcagcagcagcagtcttttcagcaattggtgtccgctcggaaagaacagaaacgggaggagcgcaggcagctgaaacagcagctcgaggatatgcagaaacaactgcgccaactgcaagaaaagttctaccagatttatgattcaaccgactcagagaatgatgaggatggtaatctaagtgaagatagcatgcggagcgagattttggatgcgcgagcccaggattctgtggggcgatcggacaacgaaatgtgcgaactagatccgggccagtttatcgatagagcccgcgccttaatccgtgagcaggaaatggccgagaacaagccaaaacgggaaggaaataataaggaacgcgaccacggtccaaactcccttcagcccgaaggcaagcacctggctgaaacacttaagcaggaactgaataccgctatgagccaagtggtggacacagtagttaaggttttttccgctaagccgagtaggcaggtccctcaggtgtttccacccctccagataccacaggccagatttgctgtcaatggagaaaaccacaactttcacaccgcaaatcagcgcttacagtgctttggcgatgtgatcattcccaaccctctggatacgtttggcaacgtccagatggcctctagcacagaccagaccgaagccttgcctttggtcgtgcgaaaaaacagcagcgatcagagtgcatcaggcccagccgcaggtggacaccatcagcccttgcatcagtcccccctgtccgctaccaccggtttcaccactagtaccttcagacatccatttccgctcccccttatggcctatccttttcaatctcccctgggagccccaagtggatcgttttccggtaaagatagggccagtcctgagtccctggatcttacccgggacacaaccagtctgcggaccaagatgagctcccatcacttgagccaccatccttgtagcccggcccaccccccatccaccgccgagggattaagtttaagtctaataaaaagcgaatgtggcgacctccaggacatgtctgagatcagcccttacagtgggtcagccatgcaggaaggactctcacctaatcacctgaaaaaggccaagctgatgtttttttacactagatatccatccagcaacatgctcaagacctatttctctgatgtgaaattcaaccgatgtattacctctcagctcatcaagtggttttctaactttagagaattctactacatccaaatggagaaatacgcacggcaggccataaatgacggcgtgacaagcactgaagagctttccatcaccagagactgtgaactgtaccgcgcccttaatatgcactataataaagctaacgatttcgaggtgcctgagcgctttctggaggtcgcacagatcactctgagagagttttttaacgccattattgcaggtaaagatgtggacccctcttggaagaaagccatctataaggtgatttgtaagctcgattccgaggttcctgagatcttcaaatcgccgaattgcttgcaagaattgttgcacgaatag

SEQ ID NO: 298543 - DNA, 2031 bp, Artificial Sequence
  derived and/or modified sequence
atgccagaccacgatagtactgccctgctttcaaggcagaccaaacgtaggcgggttgatatcggagttaaacggaccgtgggcacggccagcgcatttttcgcgaaggcccgggcaacctttttttccgccatgaatcctcaaggcagcgagcaggatgtcgagtacagcgtagtacagcacgctgatggagagaaaagtaacgtgcttaggaagctgctgaagagggcaaacagctacgaggatgcaatgatgccttttccaggggcaactatcattagtcagctgctgaagaacaatatgaataaaaacgggggcaccgagcccagctttcaagcaagcgggctctcgtctaccggctccgaggtccatcaggaagatatttgtagtaattcatcacgcgacagtccacccgaatgcctttctccttttgggaggcccacaatgtcacagtttgacatggaccgtctctgtgacgagcacctgagggcaaagcgcgcaagggtcgaaaacataatcagaggcatgtcccattcacccagtgtggcgcttcggggcaacgagaacgagagagaaatggccccacagagtgtgtctccacgcgagagttaccgggagaataagcgcaaacagaagctgccgcagcagcagcagcagagcttccagcagcttgtgtccgccaggaaggagcagaagcgggaagagaggcgccaattaaagcagcagcttgaagatatgcagaaacagctaagacaactccaggagaagttctatcaaatctacgactcgaccgacagcgagaatgatgaagatggaaatttatccgaagattccatgcggagcgaaattttggacgcaagggcacaggactcggtcgggcggtccgacaatgagatgtgtgagctggacccaggtcaattcatagaccgagcccgcgcgctgatccgggagcaggagatggccgagaacaagccaaaacgagagggaaacaacaaagagcgcgaccacggtcctaacagtttgcagccagagggaaaacacttggccgaaacactgaagcaggagctgaataccgccatgtcacaggtcgtggacactgttgtcaaggtgttcagcgccaagcccagccgccaggtccctcaggtctttccccctttgcagatccctcaggctcgatttgcagtcaatggagagaatcataacttccataccgccaatcagagactgcagtgctttggcgatgttatcatcccaaatccactagataccttcggaaacgttcaaatggcatcttccacggaccagacagaggcactgcccctggtggtacggaaaaacagtagcgatcagagcgctagcggtcccgcagcaggggggcatcatcaaccgttgcatcagtcaccacttagtgccacgactggttttactacctccacatttagacacccctttccgctgccactgatggcctaccctttccagtctccccttggcgctccctctggctcctttagtgggaaggaccgggccagcccggaaagcctggacctgacacgtgatacgacaagcctaagaacaaagatgagttcccaccatctttcacaccatccatgttctccagcgcacccgccttccacggccgagggcctttctctctctttaattaaatcagaatgtggagatttacaggacatgagcgagatctcaccatattcaggctctgctatgcaggaggggctgtcccccaatcatctgaaaaaggccaaacttatgtttttctatactaggtatccaagcagcaatatgctgaagacttacttctcggatgtaaaatttaaccggtgcatcacatctcagctgatcaagtggttcagtaatttcagagagttttattatatccagatggagaaatatgcccgccaggctattaatgacggagtgaccagcactgaggagttgtctattacgcgcgactgtgaattgtaccgtgctttaaacatgcattataacaaggctaacgacttcgagtag

SEQ ID NO: 298544 - DNA, 2214 bp, Artificial Sequence
  derived and/or modified sequence
atgcccgatcacgactccacagcactgctgtcccgacaaacaaaaagacggcgagtggacattggagtgaagaggactgtcggaacagcttcagctttctttgcgaaggcgcgagctacgttcttctcagccatgaacccccagggcagcgaacaggacgtcgagtactctgtggtgcagcacgccgatggcgaaaagagcaatgttctgagaaagctgttgaaaagagcaaactcatacgaggacgcaatgatgccatttccaggggccaccataatatcacagctgctgaaaaataatatgaacaaaaatggcggcactgaaccgagcttccaggcaagtggtttaagctccaccggaagcgaggtccatcaggaggacatctgctctaattctagtagagattccccacctgagtgtctgagtccattcggtagacccaccatgtcgcagtttgacatggacagattgtgtgatgagcatcttagggctaaacgagctcgcgttgagaatatcatcagagggatgtctcactcaccctccgtggcgctcagggggaacgagaacgagcgcgaaatggcacctcagagtgtctccccccgtgagagctatcgcgaaaataagagaaaacagaagctccctcaacagcagcagcaatcttttcagcagctggtgtccgctcggaaagaacagaagagggaagagagacgtcagctcaagcagcagctggaagacatgcagaagcagctgaggcaattgcaagaaaaattctaccagatatacgatagtaccgattctgaaaatgatgaggacggaaatctttcagaagatagtatgagaagcgaaatcctcgacgctagagctcaggacagtgttggcaggagcgacaacgaaatgtgcgaattagatcctggccaattcatagatagagccagggcgctgatcagagagcaagagatggctgagaacaaacccaagagagagggcaataataaggagcgagaccacggacccaacagcttgcagccagagggcaagcacttagctgagaccctgaagcaggaactgaacacagccatgagccaagtcgtagatacggtggtcaaagtcttctcggcaaagcccagccggcaggtgccgcaggtgttccctccactccagataccacaagcccgcttcgccgtgaatggcgagaaccacaatttccataccgctaaccagaggctccaatgcttcggggatgtgatcattcctaatcctcttgatacattcggtaacgtgcagatggcatcttctaccgaccagaccgaggctctgcccctggtcgtccgcaagaatagttctgaccagagtgcctcggggcccgctgcgggaggtcaccaccagcccctccaccagagtcctctgtcagcgacgaccgggtttaccacatcaacgttccgacatccctttccactgccattaatggcctaccccttccagtcaccgcttggcgccccatctggttctttttctggtaaggatagggcctcacctgaaagtctggatttgacacgcgatacaacctccctgagaactaaaatgagctctcaccaccttagtcatcacccttgcagtccagcacatcctccgtctacagcagagggactgtcactttctctgatcaagtctgaatgtggggacctccaggatatgagtgaaatcagcccctatagcgggtccgcaatgcaggaaggactgtcacctaatcatttgaagaaggccaagctgatgttcttctatactcggtacccttcctccaacatgttaaagacttatttctccgatgtaaagttcaaccgctgtattacctcgcagctcattaagtggttttcaaacttccgcgaattctactatatacagatggaaaaatatgcccggcaggcgatcaatgacggggttacctctacagaggagttaagtattacccgcgattgtgagctgtatcgcgctctcaatatgcattataataaagcaaacgattttgaagtccctgaaaggttcctggaggtagcacagataactctgcgagagttttttaatgccattatcgcagggaaggatgtcgatccgagctggaaaaaggccatttataaagtgatctgtaaactggacagcgaagtgcccgaaatttttaaatcaccaaattgcctgcaggaacttctgcacgagtag

SEQ ID NO: 298545 - DNA, 693 bp, Artificial Sequence
  derived and/or modified sequence
atgcccgaccacgattcaaccgcattactgagccgccagactaagcgcagacgggtagacatcggtgtgaaacgcaccgtcggcaccgctagcgctttttttgccaaggcccgtgccacattcttctcagcgatgaacccacaaggctcagagcaagacgttgaatatagtgtggttcagcacgctgatggagaaaagtccaacgtgctccgcaagctgttgaaacgcgcaaattcatatgaggatgcaatgatgccctttcccggagcaaccatcatctcccagctgctgaaaaacaatatgaacaaaaacggaggaactgagccttccttccaggcaagcgggctctcttcgacagggtccgaagtgcatcaggaggatatctgtagtaatagctcgagagattctccaccagagtgcctgtctccattcggacggcccaccatgtcgcagttcgacatggacaggctctgtgatgagcatctaagggcgaagagagcccgggtcgagaacatcattcggggcatgtctcattcaccttcggtcgccctcaggggcaacgagaacgagcgagaaatggcaccacagtcagtgtccccaagggaatcttaccgggagaataagaggaaacagaaacttcctcagcagcagcagcagtccttccagcagttggtgtcagccaggaaggaatag

SEQ ID NO: 298546 - DNA, 2214 bp, Artificial Sequence
  derived and/or modified sequence
atgcccgatcacgacagcactgcattgctgtctcggcagactaaacggcgcagggttgatatcggagtgaaacgaactgtcggaactgcctctgcattttttgccaaagctagggccacattcttcagcgccatgaacccccagggatctgagcaagacgtggagtattcagtggttcagcatgcggacggtgagaagtcaaatgtgcttagaaagttactcaaaagggcgaattcgtacgaagatgctatgatgccattccccggcgctactatcatcagccagctgctcaagaacaatatgaataaaaatggcggtaccgagccttcctttcaggcttcaggactgtctagcacaggaagcgaggtccatcaggaagatatctgctctaattcctctcgggacagcccaccagaatgtctttctccctttgggcgccctaccatgagccagttcgacatggacagactttgcgatgaacacctgcgggccaaacgagctcgggtggagaacattatcagggggatgtcacactcacctagcgtcgccctgcgcggaaatgaaaacgagagagagatggcaccacagtccgtgtccccacgagagagttatcgcgaaaacaaacggaaacagaagttaccccaacagcagcagcagtccttccaacaattagtttccgctagaaaagagcaaaagagagaagagcgccgtcagctcaagcagcagttggaggacatgcagaagcagcttcgacagttgcaggaaaagttttaccaaatctatgactctaccgactccgaaaatgatgaggacggcaatctgtcggaggattcaatgagaagtgaaatcctagacgctagagcccaggattccgttggaaggtcagataacgagatgtgtgaactggaccctgggcagttcatcgaccgtgcgagagcgctcattagggaacaggagatggccgagaacaagccaaaacgtgagggaaataataaggaacgcgaccatgggcccaattctttgcagccagaggggaagcatcttgccgagacactgaaacaggaactgaacacagcgatgtcccaggttgtggatactgtggttaaagtgttttcagcaaagccgagccgacaggtgcctcaggtgttccccccgctgcaaattccccaggctcgattcgccgtgaacggagaaaatcacaattttcacacagctaatcaaaggctgcaatgctttggcgacgtgatcattcccaatccactggatacctttggaaacgtgcagatggcgtccagcaccgatcagacagaagcccttcctttagtggtgagaaagaatagttcagatcagagcgcatcgggacctgccgcaggtgggcaccaccagccacttcaccagagcccactaagcgccaccaccggtttcacaacttccacgtttaggcacccctttcccctccccctgatggcctacccattccaatcccctctcggcgcaccatccgggtccttctccggcaaggatagggcttcccctgaatcactggatttgacacgggacacgacctctttaaggaccaagatgagctcacatcacctcagccatcacccttgtagcccagcccatccaccgagcaccgcagaagggctgagtctcagcctcattaaatcagagtgtggcgatttgcaagacatgagtgagatctctccgtactctggttctgccatgcaggagggcctatcaccaaatcacctgaaaaaagccaaactcatgtttttttacacaaggtacccctcatctaatatgctgaaaacatacttctccgacgtcaaattcaatcgttgtatcaccagtcagctcatcaaatggtttagcaatttcagggagttctactacatacagatggagaagtacgcccgccaggccattaacgatggcgtgacctcaactgaagaactctccatcaccagggattgcgagctgtacagggctctgaacatgcattacaataaagcaaatgacttcgaagtgccggaaagatttctcgaagtcgcccagatcaccctgagagagttctttaacgccattattgcaggcaaggacgtcgacccctcctggaaaaaagctatttacaaggtgatctgcaaactcgattcagaggttcccgaaatattcaagagccctaactgcctccaggagctgttacacgagtag

SEQ ID NO: 298547 - DNA, 930 bp, Artificial Sequence
  derived and/or modified sequence
atggccagctctacagaccaaacagaggctcttccacttgttgtgcgaaaaaacagtagtgaccagtctgcctccggtccagccgccgggggacatcatcagcccctccaccagagccctctatccgcaacgaccggttttactacaagtacctttagacaccccttccctctaccgctaatggcatacccatttcagagtccgctgggtgccccatctggatctttctctggaaaggatagagcctcacccgaatccctagaccttacccgagacaccacttctctccgcacaaaaatgagttcacaccatttatcccatcacccttgttcacccgctcacccccctagtacagccgaaggactttccctaagtctgattaaatcggagtgcggcgacctccaggacatgtctgaaatctccccttattcaggctctgctatgcaagagggcttatcccccaatcacctcaaaaaggccaagctgatgttcttctacactcgatatccctcctctaatatgctgaaaacctatttctcggacgtgaagttcaatcgctgtattacaagccaactgattaagtggttttccaactttagggagttctattatatccaaatggaaaagtatgcaagacaggccatcaacgatggcgttactagtactgaagaactaagcattaccagggactgcgaactttatagagccttaaatatgcattataataaggccaacgacttcgaggtaccagaacggttcctcgaagtggcacagatcacattacgggagttttttaacgcgataattgctggtaaagatgtcgatccttcatggaagaaagcaatttacaaggtgatctgtaagcttgacagcgaagtgcctgaaattttcaagtcacccaattgtttgcaggaactgttgcacgaatag

SEQ ID NO: 298548 - DNA, 2214 bp, Artificial Sequence
  derived and/or modified sequence
atgccagaccatgacagcacagccctgctgagccggcagaccaagagaagaagagtggacattggagtgaagaggacagtgggcacagccagcgccttctttgccaaggcccgggccaccttcttcagcgccatgaacccccagggcagcgagcaggatgtggagtacagcgtggtgcagcacgcagatggagagaagagcaatgtgctgaggaagctgctgaagagggccaacagctatgaagatgccatgatgcccttccctggggccaccatcatcagccagctgctgaagaacaacatgaacaagaatggaggaacagagcccagcttccaggccagcggcctgagcagcactggaagtgaggtgcaccaggaggacatctgcagcaacagcagccgggacagccccccagaatgtctgagccccttcggccggcccaccatgagccagtttgacatggaccggctgtgtgatgagcacctgcgggccaagagggcccgggtggagaacatcatccggggcatgagccacagccccagcgtggccctgcggggaaatgaaaatgaaagagagatggccccccagagcgtgagcccccgggagagctaccgggagaacaagaggaagcagaagctgccccagcagcagcagcagagcttccagcagctggtgtctgccaggaaggagcagaagcgggaggagcggcggcagctgaagcagcagctggaggacatgcagaagcagctgcggcagctgcaggagaagttctaccagatctatgacagcacagacagtgaaaatgatgaagatggcaacctgtctgaggacagcatgaggtctgagatcctggatgcccgggcccaggacagcgtgggccgcagtgacaatgagatgtgtgagctggaccccggccagttcatcgaccgggcccgggccctgatccgggagcaggagatggccgagaacaagcccaagcgggagggcaacaacaaggagcgggaccacggccccaacagcctgcagcctgagggcaagcacctggccgagaccctgaagcaggagctgaacacagccatgagccaggtggtggacacagtggtgaaggtgttcagcgccaagcccagccggcaggtgccccaggtgttcccccccctgcagatcccccaggccaggtttgctgtgaatggagagaaccacaacttccacacagccaaccagaggctgcagtgctttggagatgtgatcatccccaaccccctggacacctttggaaatgtgcagatggccagcagcacagaccagacagaggccctgcccctggtggtgaggaagaacagcagtgaccagagcgccagcggccctgctgctgggggccaccaccagcccctgcaccagagccccctgagcgccaccaccggcttcaccaccagcaccttccgccaccccttccccctgcccctgatggcctaccccttccagagccccctgggcgcccccagcggcagcttcagcggcaaggaccgggccagccctgagagcctggacctgacccgggacaccaccagcctgcggaccaagatgagcagccaccacctgagccaccacccctgcagccctgcccacccccccagcacagctgagggcctgagcctgagcctcatcaagtcagaatgtggggacctgcaggacatgtctgagatcagcccctacagcggcagcgccatgcaggagggcctgagccccaaccacctgaagaaggccaagctgatgttcttctacacccgctaccccagcagcaacatgctgaagacctacttcagtgatgtgaagttcaaccgctgcatcaccagccagctgatcaagtggttcagcaacttccgggagttctactacatccagatggagaagtatgcccggcaggccatcaatgatggagtgaccagcacagaggagctgagcatcacccgggactgtgagctgtaccgggccctgaacatgcactacaacaaggccaatgactttgaggtgcctgagcgcttcctggaggtggcccagatcaccctgcgggagttcttcaatgccatcatcgccggcaaggatgtggaccccagctggaagaaggccatctacaaggtgatctgcaagctggacagcgaggtgcctgagatcttcaagagccccaactgcctgcaggagctgctgcacgagtag

SEQ ID NO: 298549 - DNA, 2031 bp, Artificial Sequence
  derived and/or modified sequence
atgccagaccatgacagcacagccctgctgagccggcagaccaagagaagaagagtggacattggagtgaagaggacagtgggcacagccagcgccttctttgccaaggcccgggccaccttcttcagcgccatgaacccccagggcagcgagcaggatgtggagtacagcgtggtgcagcacgcagatggagagaagagcaatgtgctgaggaagctgctgaagagggccaacagctatgaagatgccatgatgcccttccctggggccaccatcatcagccagctgctgaagaacaacatgaacaagaatggaggaacagagcccagcttccaggccagcggcctgagcagcactggaagtgaggtgcaccaggaggacatctgcagcaacagcagccgggacagccccccagaatgtctgagccccttcggccggcccaccatgagccagtttgacatggaccggctgtgtgatgagcacctgcgggccaagagggcccgggtggagaacatcatccggggcatgagccacagccccagcgtggccctgcggggaaatgaaaatgaaagagagatggccccccagagcgtgagcccccgggagagctaccgggagaacaagaggaagcagaagctgccccagcagcagcagcagagcttccagcagctggtgtctgccaggaaggagcagaagcgggaggagcggcggcagctgaagcagcagctggaggacatgcagaagcagctgcggcagctgcaggagaagttctaccagatctatgacagcacagacagtgaaaatgatgaagatggcaacctgtctgaggacagcatgaggtctgagatcctggatgcccgggcccaggacagcgtgggccgcagtgacaatgagatgtgtgagctggaccccggccagttcatcgaccgggcccgggccctgatccgggagcaggagatggccgagaacaagcccaagcgggagggcaacaacaaggagcgggaccacggccccaacagcctgcagcctgagggcaagcacctggccgagaccctgaagcaggagctgaacacagccatgagccaggtggtggacacagtggtgaaggtgttcagcgccaagcccagccggcaggtgccccaggtgttcccccccctgcagatcccccaggccaggtttgctgtgaatggagagaaccacaacttccacacagccaaccagaggctgcagtgctttggagatgtgatcatccccaaccccctggacacctttggaaatgtgcagatggccagcagcacagaccagacagaggccctgcccctggtggtgaggaagaacagcagtgaccagagcgccagcggccctgctgctgggggccaccaccagcccctgcaccagagccccctgagcgccaccaccggcttcaccaccagcaccttccgccaccccttccccctgcccctgatggcctaccccttccagagccccctgggcgcccccagcggcagcttcagcggcaaggaccgggccagccctgagagcctggacctgacccgggacaccaccagcctgcggaccaagatgagcagccaccacctgagccaccacccctgcagccctgcccacccccccagcacagctgagggcctgagcctgagcctcatcaagtcagaatgtggggacctgcaggacatgtctgagatcagcccctacagcggcagcgccatgcaggagggcctgagccccaaccacctgaagaaggccaagctgatgttcttctacacccgctaccccagcagcaacatgctgaagacctacttcagtgatgtgaagttcaaccgctgcatcaccagccagctgatcaagtggttcagcaacttccgggagttctactacatccagatggagaagtatgcccggcaggccatcaatgatggagtgaccagcacagaggagctgagcatcacccgggactgtgagctgtaccgggccctgaacatgcactacaacaaggccaatgactttgaatag

SEQ ID NO: 298550 - DNA, 693 bp, Artificial Sequence
  derived and/or modified sequence
atgccagaccatgacagcacagccctgctgagccggcagaccaagagaagaagagtggacattggagtgaagaggacagtgggcacagccagcgccttctttgccaaggcccgggccaccttcttcagcgccatgaacccccagggcagcgagcaggatgtggagtacagcgtggtgcagcacgcagatggagagaagagcaatgtgctgaggaagctgctgaagagggccaacagctatgaagatgccatgatgcccttccctggggccaccatcatcagccagctgctgaagaacaacatgaacaagaatggaggaacagagcccagcttccaggccagcggcctgagcagcactggaagtgaggtgcaccaggaggacatctgcagcaacagcagccgggacagccccccagaatgtctgagccccttcggccggcccaccatgagccagtttgacatggaccggctgtgtgatgagcacctgcgggccaagagggcccgggtggagaacatcatccggggcatgagccacagccccagcgtggccctgcggggaaatgaaaatgaaagagagatggccccccagagcgtgagcccccgggagagctaccgggagaacaagaggaagcagaagctgccccagcagcagcagcagagcttccagcagctggtgtctgccaggaaggagtag

SEQ ID NO: 298551 - DNA, 930 bp, Artificial Sequence
  derived and/or modified sequence
atggccagcagcacagaccagacagaggccctgcccctggtggtgaggaagaacagcagtgaccagagcgccagcggccctgctgctgggggccaccaccagcccctgcaccagagccccctgagcgccaccaccggcttcaccaccagcaccttccgccaccccttccccctgcccctgatggcctaccccttccagagccccctgggcgcccccagcggcagcttcagcggcaaggaccgggccagccctgagagcctggacctgacccgggacaccaccagcctgcggaccaagatgagcagccaccacctgagccaccacccctgcagccctgcccacccccccagcacagctgagggcctgagcctgagcctcatcaagtcagaatgtggggacctgcaggacatgtctgagatcagcccctacagcggcagcgccatgcaggagggcctgagccccaaccacctgaagaaggccaagctgatgttcttctacacccgctaccccagcagcaacatgctgaagacctacttcagtgatgtgaagttcaaccgctgcatcaccagccagctgatcaagtggttcagcaacttccgggagttctactacatccagatggagaagtatgcccggcaggccatcaatgatggagtgaccagcacagaggagctgagcatcacccgggactgtgagctgtaccgggccctgaacatgcactacaacaaggccaatgactttgaggtgcctgagcgcttcctggaggtggcccagatcaccctgcgggagttcttcaatgccatcatcgccggcaaggatgtggaccccagctggaagaaggccatctacaaggtgatctgcaagctggacagcgaggtgcctgagatcttcaagagccccaactgcctgcaggagctgctgcacgagtag

SEQ ID NO: 298552 - DNA, 2214 bp, Artificial Sequence
  derived and/or modified sequence
atgcccgaccacgacagcaccgccctgctgagccggcagaccaagcggcggcgagtggacatcggtgtgaaaaggacagtcggaacagcctcggccttcttcgccaaagcccgggcgacatttttctcagcaatgaacccccagggatccgagcaggatgtagaatactccgttgtacagcacgccgatggcgagaagtctaacgtacttcggaagttgcttaaaagagctaactcctacgaggatgcaatgatgccatttccaggagcaactatcatcagccagttgttaaagaataatatgaacaagaacggaggaacagagccatccttccaggcctcagggctaagcagcaccggaagcgaagtgcaccaggaggacatatgtagcaacagctccagggactctccaccagagtgtctgagtcctttcggacggccaactatgagccagtttgatatggaccggttatgcgatgagcatcttcgtgcaaaacgcgcacgagtagaaaatattatccgcgggatgagtcactccccatcagtggccctgagggggaatgagaatgaacgcgagatggctccccaatccgtcagtcctcgagagtcttacagagagaataaacggaaacagaaactacctcagcagcaacaacagtcctttcagcagttggtttccgcgcggaaagagcagaaacgtgaggagcgtcgccagttgaagcagcagctagaagacatgcaaaaacaactaaggcagctccaggaaaagttttatcagatttacgactccacagacagcgaaaatgatgaggacgggaatttatcagaagactctatgcggtcagagattctggatgcccgagcccaggacagcgtgggcaggtccgataacgaaatgtgcgagttggacccagggcagtttatcgatcgggcccgtgccctaatccgggagcaggaaatggctgaaaataaacccaagagggaaggaaataataaagaacgggaccatggcccaaactccctgcagccagagggaaagcatcttgctgagaccctgaagcaagaattaaacacggccatgtctcaggtggtggacactgtggtgaaggtattttcagcgaagccatctcggcaggttccccaggtgttccctcccctgcagattccccaagcgcgcttcgccgtgaacggtgaaaatcataacttccataccgccaaccaacgtctgcagtgtttcggtgacgtcatcatacctaatccgctcgacaccttcggaaacgtgcagatggccagctcaaccgatcagacagaggctctgcccttagtcgtgaggaagaatagtagcgaccagtctgctagcggcccggctgcaggggggcaccatcagcctcttcaccagtctcctctgtctgcaaccacaggttttacaacaagcacatttaggcatccatttccgctgccactgatggcatatcccttccagtctcccctcggagccccttccggctcattcagcggaaaagaccgtgcatcccctgagagtctggacttaacacgagataccacatcactgagaaccaagatgtctagccatcacctgtctcaccatccctgttcacccgcacacccacccagcacagctgaaggactgtctctaagcctcataaagtccgagtgtggtgacctacaggatatgagcgaaatttcaccttattcgggcagcgcaatgcaggagggactgagtccaaaccacttgaaaaaagcaaaactgatgtttttttatacgcgctacccctctagcaacatgctgaagacatatttcagtgacgtcaaattcaatcgctgcatcacatcccagctgatcaaatggtttagtaacttccgtgaattttattatatccagatggagaagtacgcccgccaggccatcaatgacggggtgactagcactgaggaactgtctatcacaagggactgcgaactctatcgcgccctgaatatgcactacaacaaagcgaatgattttgaagtcccagagcgctttcttgaggttgctcagattaccctgagggaattcttcaacgcgatcattgcgggaaaggatgtggatccatcctggaagaaagcaatctacaaagtcatttgtaaactggattctgaagtgcccgagatattcaagagccctaactgtctgcaggagcttctgcatgagtag

SEQ ID NO: 298553 - DNA, 2031 bp, Artificial Sequence
  derived and/or modified sequence
atgcccgaccacgacagcaccgccctgctgagccggcagaccaagcggagacgggtcgatatcggagttaagcgcacagtcggaaccgctagcgccttttttgcaaaagcaagggctacctttttcagtgccatgaatccacaggggtctgagcaggacgtggagtacagcgtggtccaacatgccgacggcgaaaagtccaatgtactgagaaagctgctcaaacgggctaactcatacgaggatgcaatgatgcctttccccggggcaactatcattagtcagctcctgaagaataacatgaataagaacggaggaaccgagcccagttttcaggcgtctggcctctctagcacaggatccgaagtccatcaggaggacatctgttccaattcctctagggattctcctccagagtgcttaagtcctttcgggagaccaacaatgagtcagttcgatatggataggctgtgcgatgagcatctacgagccaagcgggcacgcgtcgagaacatcataagggggatgtctcacagcccttctgttgctctaagaggcaatgaaaacgagagagagatggccccacaatccgtgagtccccgggagtcctaccgcgagaataaacgtaagcagaaactgccccagcagcagcaacagagttttcagcagctggtttccgccaggaaggagcagaaacgcgaggaaaggaggcagctgaagcagcagctggaggacatgcagaagcagcttcgacaactccaggaaaagttctatcagatttacgactctactgactctgaaaacgatgaagacggcaatctgagcgaagatagtatgaggtcggaaattttggacgccagggcgcaagacagtgtgggcaggtcggataacgagatgtgtgagctagatcctggacagttcattgatagagccagggctctgattagagagcaggaaatggctgagaacaaacctaagcgggaaggaaacaacaaagagcgggaccacggcccgaacagcctgcagcccgaggggaaacatttagctgagacgcttaagcaggagttgaacaccgcaatgtcccaggtggtggatacagtggtcaaagtattctcggctaaaccttcacggcaggtcccacaggtgtttcctcctctccaaattcctcaggcgaggtttgcagtgaacggagaaaatcacaattttcacaccgccaaccagaggttgcaatgcttcggggacgtgattatccccaaccctctggacacttttggtaatgtccagatggcgtccagcactgatcaaactgaggcacttccattagtagtccgtaagaacagcagcgatcagtccgcttctggacctgcggcaggaggtcaccaccagccgcttcatcaatcccctctgtctgccaccacagggttcaccacatcgacgttccgtcatccatttcccctgcctcttatggcctatccgttccagtctcctttaggagccccctctggctcattcagtggcaaggatagagcgtcccctgagagtttggatttgactcgagacacaacctcactgaggactaagatgtctagccaccatttgagccaccacccctgttctcccgcacatccaccttctaccgcagaagggctcagcctgtctcttatcaaatcagaatgtggggacctacaggacatgtccgaaattagcccatattcagggtccgcgatgcaggagggcctgagccccaaccaccttaaaaaggcaaagttaatgtttttttatacccggtacccaagttccaatatgctgaagacctattttagcgatgtgaaatttaatagatgcataaccagccagctgatcaagtggtttagcaacttccgggaattctattatatccaaatggagaagtatgcccgccaagcgatcaacgatggggtgacaagcactgaagaactctcaattacacgcgattgtgagctctaccgggccctaaatatgcactacaataaagcaaacgacttcgagtag

SEQ ID NO: 298554 - DNA, 2214 bp, Artificial Sequence
  derived and/or modified sequence
atgcccgaccacgacagcaccgccctgctgagccggcagaccaagcgtaggagagtggacatcggtgtgaaaaggactgtcggtaccgccagtgcgttttttgctaaggccagggctacgttcttctctgctatgaaccctcagggaagtgagcaggatgttgaatactctgtggttcagcacgcagacggagaaaagtcaaacgtgttacgcaaactgctgaaaagggccaatagctacgaagatgctatgatgcctttccctggtgctaccatcatctcccagctgctgaagaacaacatgaataagaatggagggaccgagcccagtttccaagctagtggcctgtcatcaaccgggtcagaggtgcatcaagaggacatttgttccaatagttcacgcgactctcctcccgagtgtctgtcacctttcgggcggcctacaatgtctcaatttgacatggacagattatgtgatgagcatctccgcgctaaacgtgccagggttgagaatattattagaggaatgagtcattctccatcggtggccctgaggggaaacgaaaatgaaagggagatggctcctcagagtgtttccccacgggagagttaccgggaaaataagcgcaaacagaaactgccacaacagcagcaacagtcttttcaacagttggtttcggctaggaaagagcaaaagcgagaagagagacgacaactgaaacagcagctggaagatatgcagaagcagctgcgccagctccaagagaaattctatcaaatttatgattccacagattccgagaacgatgaagacggcaatctgagcgaagactctatgcgctccgagatactggacgctagagcgcaggacagtgttgggcgctccgacaatgagatgtgcgagctcgaccccggacagtttatcgacagagcacgagccttaatcagggagcaggagatggctgagaataagccaaagagagagggcaataataaagagcgcgaccacggaccaaactccttgcaacctgaaggcaagcatttggctgagacactcaaacaggaactgaataccgccatgagccaggtggtcgacaccgtcgtaaaggtgttttctgctaagcccagccgacaggtgcctcaggtcttcccccccttgcaaatccctcaggcccgatttgccgtcaatggcgaaaaccacaacttccacaccgctaaccagaggctccagtgtttcggcgatgtcatcatccccaacccactcgataccttcgggaatgttcagatggcttccagtactgatcagaccgaggccctgccgctagtggtgcggaaaaacagctccgatcagtcagcttcgggccccgcagcgggagggcatcaccaaccactgcatcagagtcctctaagtgcaacaaccgggttcacaacctctaccttcagacatcccttccccctgccattgatggcttatccttttcagtcaccccttggggcaccttcagggtccttctccggtaaagacagggctagtccagagtccctggatctgacaagagataccacgtcccttcgcacaaaaatgtcttcacaccacctgtcacaccacccctgtagcccagcgcacccaccttcgaccgctgagggcctaagtctttcccttatcaaatctgagtgcggcgacctgcaggatatgtctgagatctccccctactccggctctgctatgcaggagggcctatctcctaatcatttgaaaaaagccaagctgatgttcttttataccaggtacccatcatccaacatgctgaagacctatttctcagacgtaaagttcaacagatgcatcacgtcgcaactgattaagtggttcagtaacttccgggagttttactacatacaaatggaaaagtacgctaggcaggcgattaatgacggcgtgacatctaccgaagagttgtctattactcgggactgcgagctttatcgggctctgaacatgcactacaacaaggccaatgattttgaggtccccgagcgctttctggaggtcgctcaaattacactccgggagttcttcaatgccattatcgctggaaaggatgtggatccttcatggaaaaaagccatatataaagttatatgtaagctcgactctgaagtgcccgagatttttaaatctcctaattgtcttcaggaattactgcacgagtag

SEQ ID NO: 298555 - DNA, 693 bp, Artificial Sequence
  derived and/or modified sequence
atgcccgaccacgacagcaccgccctgctgagccggcagaccaagcgtaggagagtggacatcggcgttaaacgaacagtaggcacggcctctgcattctttgccaaggcaagggctacttttttttccgccatgaatccccagggctctgagcaggacgtcgaatatagtgtggttcagcacgcggatggtgagaagtcaaacgtgctccgtaagcttctgaagagggcaaactcctatgaggatgctatgatgccgtttcctggggccaccatcatctctcagctgctgaagaataacatgaacaagaacgggggaaccgaaccaagttttcaggcatccggactctcctcaaccgggtccgaggtgcaccaggaagacatttgctccaacagtagccgtgacagccccccagaatgcctgagccccttcggacgacccactatgagccaatttgatatggatagactctgtgatgagcacctgagagccaaaagggcacgcgtggagaatatcattcgcggcatgtctcactccccatcggtggctctgcgtggtaatgaaaacgagcgtgagatggccccccaatcagtgagccctcgtgaaagttatcgggaaaacaagaggaagcagaaattaccacagcaacagcagcaatcattccagcaactagtgtccgcacggaaggaatag

SEQ ID NO: 298556 - DNA, 2214 bp, Artificial Sequence
  derived and/or modified sequence
atgcccgaccacgacagcaccgccctgctgagccggcagaccaagcggagacgagtggatattggcgtaaagagaacagtgggtacagcttccgcctttttcgcaaaggcccgggccacctttttctccgccatgaatccgcaggggagtgaacaggacgtcgaatattctgtggtacaacacgccgacggggagaaatcaaacgtgctaagaaaactgctcaagcgggccaacagctacgaggacgccatgatgccgtttcccggtgctactattataagccagctcctgaagaataatatgaataaaaacggagggaccgagccatccttccaagcctcggggttgtcaagtacaggctccgaggtacaccaggaagacatctgcagcaactcttcccgcgactcccctccagaatgcctgtcaccgtttggccgtcctaccatgagccagtttgatatggacagactgtgcgatgagcatctgagagctaaacgcgcccgggttgaaaatattattcgggggatgtcccactcacccagcgtggcactacgcggtaacgaaaacgaaagagagatggctccccagagcgtcagtcctcgggaatcttaccgagagaataagaggaagcagaaactgccccagcagcagcagcagtcattccagcagctggtgtccgcccgcaaagagcaaaagagagaggagaggagacagcttaagcagcagctggaagatatgcagaagcagctgcggcagcttcaggaaaaattctaccaaatttatgattccactgattccgaaaacgatgaggacggaaacctatctgaggacagcatgcgcagtgaaattctcgatgctagagcgcaggattccgtggggcggagtgacaacgaaatgtgtgaactcgaccctggccagtttatcgaccgggcccgggccctgataagagaacaggaaatggctgagaataagccgaaacgagaaggaaacaacaaggagcgggaccacggccctaactcgctccaacccgaagggaagcacctggctgagactctgaagcaggagctaaacaccgctatgtcccaggtcgtggacaccgtggtcaaagtgttctcggccaagccatcccggcaggtaccccaggtgttcccaccattgcagatcccacaagcacgctttgccgtgaatggcgaaaatcacaacttccacacggccaaccagcgtctgcagtgcttcggcgacgtgattatccccaaccccctggacaccttcgggaacgtgcagatggcctcctctacggaccagacggaagcacttcccctggtggtgaggaagaatagtagtgatcaaagcgcttctgggcctgctgcaggtggccatcaccagcccttacaccagtcaccactgtccgccacaactgggttcaccacatcgacttttcgacacccattccccctgccactgatggcttacccattccagtctcctttgggcgcacccagcggcagtttctcgggaaaggatcgcgcgtcacctgagtctctcgacttaacgagggatactacaagcctcagaaccaagatgtccagccatcaccttagccatcatccctgctcccccgcccatccaccctcaactgccgaagggctttctctctcactgatcaagtcagaatgcggtgatctccaggacatgtcagagattagcccttattctggaagcgccatgcaagagggtctcagtccgaaccacttgaaaaaagcaaagctgatgttcttctacacacgctacccaagctctaatatgctcaagacatatttttccgatgttaagttcaaccgatgtataactagccagctgattaagtggttctctaattttcgagagttctactacatccagatggagaaatacgcaaggcaagctatcaacgatggagtgacttctacagaggaactgagcataactcgcgactgtgagctgtatagggctctgaacatgcactacaataaagctaatgattttgaagtacctgagcgtttcctagaggttgcccaaatcacacttagagagttctttaacgccattatagccggaaaggatgtcgacccatcttggaaaaaagcaatttacaaagtgatttgtaagctggactctgaggtgccagagatctttaagtcccctaattgtctgcaggagctgctccatgagtag

SEQ ID NO: 298557 - DNA, 930 bp, Artificial Sequence
  derived and/or modified sequence
atggccagcagcaccgaccagaccgaggccctgcccctggtggtgcggaaaaattcaagcgaccagtctgcgtccggccctgccgccggtggtcaccatcagcccctgcatcagtcccccctttcagccaccacaggcttcactacgtccacatttaggcatcccttccccctgcccctcatggcatatccatttcagagtcctttgggggcaccaagtggatcttttagcggtaaggatcgagcttctcccgagtccctggacctgacccgcgatactactagcctgcggactaagatgtcatctcatcatctgtcccatcatccctgcagcccagcccaccctccatcaactgccgagggattaagcctgagcctcattaagtccgagtgtggcgatctccaagatatgtctgagatctccccgtatagcggaagtgctatgcaggagggtctgtctcccaatcatctgaaaaaggccaagttgatgttcttctacacccgttatccgtcaagtaacatgcttaagacctacttctctgacgtaaaatttaaccgctgcatcacgtctcagttaattaaatggttttcaaacttccgtgaattctactacatacagatggaaaaatatgcaagacaggcgatcaacgacggcgttacttccaccgaggaattgagcatcacacgggactgtgaattgtacagagccctcaacatgcactacaacaaggccaatgatttcgaggtgccagaacggtttctagaggtggcccagataactctgagggagttcttcaacgccattatcgcagggaaggatgttgacccttcctggaagaaggccatctacaaagtgatatgcaaactggacagtgaagtgcctgagatattcaagtcccccaactgtctccaggaactgttgcacgaatag

SEQ ID NO: 298558 - DNA, 2214 bp, Artificial Sequence
  derived and/or modified sequence
atgcccgatcacgactcaaccgcactgctcagccgccagaccaagcgaaggagagtcgacatcggcgtcaagagaacagtgggaacagcgtctgccttcttcgcaaaagccagagcgacattcttctcagctatgaaccctcagggttctgagcaggacgtggaatatagtgttgtccaacacgctgatggggagaaatctaatgtgttgcgcaaactgctcaaaagggcaaatagctacgaggacgcaatgatgccgtttccaggggcaacaattatcagtcagctcctaaagaataatatgaacaagaatggcggaacggagccctctttccaggcatcaggtctcagtagcactggatccgaggttcaccaggaagatatctgcagcaatagctctagggattcccctcctgagtgcctgtcacccttcggtcggccaacaatgtcccagtttgatatggatagactttgtgatgaacacctgagggctaaacgtgccagggtcgagaacatcattcgaggaatgagccatagtccatctgtcgctctgcgcggtaacgaaaacgagagagaaatggcaccacagtccgttagccctcgcgagtcatatcgtgagaacaagcgcaaacagaagttgccccagcagcaacaacagagtttccagcagctcgtctccgccaggaaggaacagaagcgggaagaaagacggcaattaaaacagcagctcgaggatatgcaaaagcagctcagacagcttcaggaaaaattctaccagatatatgattcaaccgattccgagaacgacgaagacgggaacctgtctgaggactctatgcgctctgaaatcctcgacgccagggctcaggatagcgtggggaggagcgacaacgagatgtgcgaactagaccctggtcagttcatagaccgggcaagagcactgattagggaacaagaaatggccgaaaacaaacctaaacgcgaagggaacaacaaggagagggatcatggacctaatagcctgcagccagagggcaagcacctggcagaaacgctcaagcaagagctcaacacagcaatgtcacaggtcgtcgacactgtcgtaaaggtctttagcgccaaacccagtaggcaggtcccgcaggtctttcccccactacagatccctcaggccagatttgcagttaatggagagaatcataatttccacaccgctaaccagcgcctccagtgtttcggtgatgttatcattccaaaccctctggatacattcggaaacgtgcagatggctagctcaaccgatcaaactgaggccctgcctctagtagtaagaaaaaacagctctgaccagtcagcatctgggccagcagctggcggacaccatcagcccctgcaccagtcacccctgtctgccaccaccggattcacaacctctacattccgccacccctttcccctacctctgatggcctatccattccaatccccgcttggagcaccctccgggtcatttagtgggaaggatagagcatcaccagagagcctcgatcttactcgggataccacatcattgcgaactaagatgagctctcaccacctgagtcaccacccctgcagccccgctcatcctccaagtacagctgaagggttaagcttgtcactcatcaagagcgaatgtggagacctgcaggacatgtccgagatttctccctacagtgggtcggccatgcaggaggggctatctcccaaccacttgaaaaaggctaagctcatgttcttttacacacggtacccatcatcaaatatgcttaaaacctactttagcgacgtgaagttcaatcgctgcataaccagtcagcttattaagtggttcagcaacttcagagaattttactatattcagatggagaagtacgctagacaggccataaacgatggggtgacgtctactgaagagctgagcattactagagattgtgagctctaccgtgcactgaacatgcattacaacaaggcaaacgactttgaagtccccgaacgcttcctggaggtagctcaaataactctgcgggagttcttcaatgccatcatagccggtaaggatgttgaccctagttggaagaaggcaatctacaaggtgatctgcaaacttgattcagaggttccagaaatattcaagagcccgaattgcctacaggaattgcttcatgagtag

SEQ ID NO: 298559 - DNA, 2031 bp, Artificial Sequence
  derived and/or modified sequence
atgcctgatcatgattcaaccgctctactgtcccggcagacaaagagaagaagggtagacataggtgtcaagcgcacagttggaacagcttcggcgtttttcgctaaagccagagccaccttcttttcggccatgaacccccaaggttccgagcaggacgtggagtattccgtggtgcagcatgctgatggtgagaaaagtaacgttctgcgtaaactgctaaaaagggccaattcctatgaggatgccatgatgcccttccccggtgcgacaataatttcccagctgttaaaaaacaatatgaacaagaatgggggaactgagccctcctttcaggcttctggcctaagcagcacgggctccgaggtacatcaggaagacatctgtagtaattctagcagggatagcccgcctgagtgtctgagcccatttggcagacctacaatgtctcagttcgacatggaccggctctgcgacgaacatctgagggcgaaacgggctcgggtggagaatattattaggggaatgagccactccccgtccgtggcgctgcgcggaaatgagaacgagagggagatggcgccacagtctgtgtcccccagagaaagttaccgggaaaacaagaggaagcaaaaactgccacagcagcagcagcagagctttcagcagctggtaagtgcacgtaaggaacaaaagcgagaggagagacggcagctcaagcagcagctcgaggacatgcagaagcagttgcggcagctccaggaaaagttttaccagatttacgactctacagatagtgaaaatgacgaggacggcaacctttctgaggattccatgaggagcgagatcctcgatgcgcgtgctcaggattcagtgggtagaagtgataacgagatgtgcgagctggatccaggccagttcattgatcgagcccgtgcccttatccgagaacaggaaatggccgaaaataagccaaaaagggagggcaataacaaagagagggatcatgggcctaattctctgcagcctgaagggaagcacctagctgagaccttgaaacaggagctgaataccgcgatgtcacaggtggtcgacactgtggttaaagttttctcagccaaacctagccggcaggtcccccaggttttcccaccattgcaaattcctcaggctcggtttgcagtcaatggagaaaaccataacttccataccgctaatcaacgtcttcagtgcttcggagatgtcatcatcccgaatcccctcgacacgtttgggaatgtccagatggccagctctacagatcagaccgaagccttaccactggtcgttcgcaaaaattccagtgatcagagcgcctctggccctgctgctggcggacaccatcagcctttacaccagtcacctctgtccgccactaccggtttcaccacgtcaacattcaggcacccttttccactgcccctgatggcatatcccttccagtctccccttggggctccttcgggcagctttagtggaaaagaccgggcttcccccgagagcctggatttgactcgtgatactacatccctgcgcaccaagatgtcatcccaccacctgtctcatcatccgtgctccccagcacaccccccttcaactgccgaaggcctcagtctctctttaatcaagtcggaatgtggggacttgcaggacatgagcgagatttcgccctatagtggaagcgccatgcaggaaggactttccccaaaccatttaaaaaaagcgaaactcatgtttttctacaccagatacccaagttccaacatgctgaagacctatttttccgacgtgaagttcaatcgctgcattacctcccaacttattaaatggttcagtaacttccgggagttttattacatccaaatggagaaatatgccaggcaagcaatcaacgatggggtcacctctaccgaagaactgtccatcacgagggactgcgagctgtatagggccctgaacatgcactacaacaaggccaacgatttcgaatag

SEQ ID NO: 298560 - DNA, 2214 bp, Artificial Sequence
  derived and/or modified sequence
atgccagaccacgattcaaccgccctgctgagtcgacagactaagcgcagacgtgtggacatcggcgttaagcgcactgttggcacagcctcagctttttttgctaaggccagagctacatttttttccgcgatgaacccacaggggtccgaacaggacgtggaatactccgtggtgcagcacgcagacggagaaaagagcaacgtcttgcgcaagctgttaaagagagctaactcgtacgaggatgccatgatgcctttcccgggtgctactatcatttctcagcttttgaaaaacaatatgaacaagaacggagggacggagccctctttccaagccagcggtctttcttccaccgggagcgaagtacaccaggaggacatatgcagcaactctagtcgtgacagccccccagagtgcttgtcacctttcgggaggccaaccatgtcccagtttgacatggaccggctctgtgatgaacatctgcgagctaagagagccagagtcgagaacattatcaggggtatgtcccactcacccagcgttgccctcagaggtaacgagaacgagagggaaatggcccctcagagtgtgtcccccagggagtcgtaccgcgaaaataagcgcaaacagaagctcccacagcagcagcagcagtctttccagcagctcgtttcagccagaaaggagcaaaagagggaggaacgtcgtcaactgaagcaacagctcgaggatatgcaaaaacagctccggcagctgcaggagaagttttaccagatctacgactccacggattcagaaaacgacgaagacggcaatttatctgaagattccatgcgttctgagattctcgatgcaagagctcaggactccgtcgggcgaagtgacaatgagatgtgcgagctggatccaggccaatttattgaccgggcaagagcgctgattcgcgagcaagaaatggcagaaaataagcccaagagagaaggtaacaacaaggagcgggaccacgggcctaactctctgcagcccgaaggtaagcacctggcagagacactaaagcaagaactgaacacagcgatgtctcaggttgtcgacaccgtggtgaaagtattctctgctaagccaagcagacaggttccacaagtctttccccctcttcaaatcccccaggcgagatttgctgtcaacggagagaatcataattttcacaccgctaatcagagattacagtgtttcggagatgttataattcctaatcccctggatacctttgggaacgtgcaaatggcttcttctaccgaccagacggaggccctgcctctggtggtacgcaaaaatagttccgaccagagtgcgtccgggccagcagccggtgggcatcaccagcctctgcatcagtcccctctgtccgctaccaccggttttactaccagcaccttccggcacccctttcccctgcctctgatggcatacccctttcagagcccactgggagcccctagtggttcgttctcgggtaaggacagggctagtcccgaatcgctggatttgacaagagacacaacatccctacgtacaaagatgagcagccatcatttaagtcaccacccttgcagccccgcacacccccctagcactgccgaagggttgtcccttagcctgatcaagagcgaatgcggagacctgcaagacatgtccgagatcagcccgtacagcggaagcgctatgcaggaagggctaagtcctaaccatctcaagaaggccaaactcatgtttttctacacacgctacccctcgtctaacatgctgaagacatactttagtgatgttaaatttaaccgctgtatcacaagtcagttaattaagtggtttagcaacttcagggagttctactatatccaaatggaaaaatacgcacgtcaagctatcaacgacggcgtgacgagcacggaagaactttccatcactcgcgattgcgaattgtatcgagccctcaacatgcattacaataaagccaatgacttcgaggtgcctgagagatttctggaggtggctcagatcacgctccgagagttttttaatgccattattgccggtaaagatgttgacccaagctggaaaaaagctatttataaagtgatctgtaaactagattctgaggtgcctgagatatttaagagcccaaactgcctgcaggaattactgcacgagtag

SEQ ID NO: 298561 - DNA, 693 bp, Artificial Sequence
  derived and/or modified sequence
atgcctgatcatgatagcactgcactcctgtccagacagaccaagagaaggagagttgatatcggagtaaagcgcaccgtgggaacagcttctgccttctttgccaaagccagagcgacattctttagcgccatgaatcctcagggatcggaacaagatgtggagtacagcgtcgtgcagcacgctgacggcgagaagtcaaacgttctgaggaagcttctaaagcgggctaactcttacgaagacgcgatgatgcccttcccaggcgctacaatcattagtcagctgctgaaaaataatatgaacaaaaatggcggaactgagccctccttccaggcttccgggctcagtagtacgggcagcgaggtccaccaagaggacatatgttccaacagcagccgagatagcccaccagaatgtctcagcccctttggcagacccaccatgtctcagtttgatatggaccgtctgtgcgatgagcacctgagagcaaagcgcgcaagggtcgaaaatattattcggggtatgtctcactccccatcagtggccttacgcggaaatgaaaacgagcgagagatggctccccaaagcgtgagccctcgcgagtcttatcgggagaataagcgaaaacagaagctgccgcagcaacagcaacaatccttccagcagctggtttctgccagaaaggagtag

SEQ ID NO: 298562 - DNA, 2214 bp, Artificial Sequence
  derived and/or modified sequence
atgcccgatcatgacagcaccgcactgctctctagacagactaaaagacgacgtgtcgatatcggggtgaaaaggacagtcggcacggcatctgccttcttcgcaaaagcccgagccacattcttttctgccatgaacccccagggatctgaacaggacgtggagtattctgttgtgcaacacgctgacggcgagaagtccaacgttctgcgaaaactgcttaaacgggctaattcatacgaggatgcaatgatgccgttccctggcgctaccattatttcacaactgcttaaaaacaatatgaacaaaaatgggggaactgaaccttcctttcaagctagtggcctgtcctcaacagggagcgaagtgcaccaagaagatatatgttccaatagcagtagagacagcccccctgagtgtctgtcaccatttggtcgcccaacgatgtctcaatttgatatggacagactgtgcgatgagcatcttcgagccaagagagcgagagtggagaacattatccggggtatgagccacagccccagcgtggccctgagagggaatgagaacgagcgggaaatggcccctcagtccgtgtcgccgagagaaagctaccgcgagaacaaacgcaagcagaagctgccgcagcagcagcagcagtcatttcaacagctcgtttcagctcgaaaggagcagaagcgtgaggagaggcgccagcttaagcaacaacttgaagatatgcaaaaacagctgcgtcagttacaagagaagttctaccaaatttatgatagcaccgactcagaaaatgatgaggacggtaacttgagtgaggactcaatgcgcagtgagattctggacgcccgtgcccaggattcagtcggccgttccgataacgagatgtgtgaactagatccgggacagtttattgatagggccagagctctgattcgggagcaagaaatggctgagaacaagccaaaaagggaaggaaacaataaggagagagaccatggaccaaattcattgcagcctgaaggtaagcacctggcagagacgcttaagcaagagctcaacacagccatgagccaggtcgtggatactgtcgtcaaagtcttttccgccaagccatccagacaagtgccccaggtgtttccccctctccagataccccaggctaggttcgctgtcaacggggaaaatcataatttccacaccgctaaccagaggttacagtgttttggggacgttattatccctaaccccctggacacatttggcaacgttcagatggcttcttctactgatcagaccgaggccttacccctggtggttcggaaaaatagcagtgatcagtcagcgtcagggccagccgctggcggacaccatcaacctctccaccagtcacctttaagtgcaacaacagggttcactacaagtacattcagacaccctttccctctccctctgatggcatatccattccagtctccactcggggcaccctcagggagtttttctggaaaagaccgcgcaagtccagaaagtctggatctaacacgagacacgacctccctgagaaccaagatgagtagccaccatctgtctcatcacccctgttctccggcacacccgccttccaccgctgaaggcctttcactgagcctgataaagtctgaatgtggcgaccttcaggacatgagcgagatatctccttactcaggtagtgccatgcaggagggcttatccccaaaccatctgaaaaaggccaagctaatgttcttttatacccgttatcctagttctaacatgctcaagacttacttctccgacgtgaagtttaaccgatgtatcacctcacagctgataaagtggtttagcaatttcagggagttttattacatacagatggagaagtacgcaagacaagctatcaatgacggcgtgacatctactgaagagcttagcattacccgcgattgtgaactgtaccgggctctgaacatgcattacaataaagccaatgactttgaggtcccagaacgattcctcgaggtggctcaaatcacactgcgtgaatttttcaacgccatcattgccggtaaagatgtcgatcccagttggaagaaggctatctataaagtgatttgcaagctggactccgaagtgcccgaaattttcaagagccccaattgcttgcaggaactcctacacgaatag

SEQ ID NO: 298563 - DNA, 930 bp, Artificial Sequence
  derived and/or modified sequence
atggccagttccactgatcagactgaggctctgccgctcgtggtgagaaagaattcgtctgatcagtcagcaagcggacctgctgccggagggcatcaccagcccctgcatcagtccccgctgagcgctacaactggctttactacctccacttttcgccatccatttcccctgcctttaatggcatacccttttcaatcgcctcttggagccccttctggaagcttcagcggcaaagacagagccagtcccgagagtctggaccttacacgtgacaccacgtctttacgtaccaagatgagttcccatcacctgagccaccacccttgttcaccagcacatcccccatccaccgccgaaggtctgtcgctgtcactcataaagtcagagtgtggcgacctgcaggacatgtcggaaatcagcccatacagtgggtccgctatgcaggaaggcctctctccaaatcatctaaagaaagctaagctcatgttcttctacaccaggtacccatcttcaaacatgctgaagacctatttttctgacgtgaagttcaaccgctgcatcaccagccagctgatcaaatggttctcaaactttcgcgaattctattacatccaaatggagaaatatgcccgtcaggctattaatgatggggtcacaagtactgaggagctcagcatcacccgggattgcgagctgtatagagcactcaacatgcactacaataaagccaacgatttcgaagtacctgagaggttcctggaagtggcacaaattactctgagggagttctttaacgcaattatagctggaaaggatgtggatccatcttggaaaaaggccatttataaggtgatctgcaaattggactctgaggttcccgaaatctttaaatccccaaattgtctgcaggagctgttacacgaatag

SEQ ID NO: 298564 - DNA, 2797 bp, Artificial Sequence
  derived and/or modified sequence
atgcctgaccatgacagcacagccctcttaagccggcaaaccaagaggagaagagttgacattggagtgaaaaggacggtagggacagcatctgcattttttgctaaggcaagagcaacgttttttagtgccatgaatccccaaggttctgagcaggatgttgagtattcagtggtgcagcatgcagatggggaaaagtcaaatgtactccgcaagctgctgaagagggcgaactcgtatgaagatgccatgatgccttttccaggagcaaccataatttcccagctgttgaaaaataacatgaacaaaaatggtggcacggagcccagtttccaagccagcggtctctctagtacaggctccgaagtacatcaggaggatatatgcagcaactcttcaagagacagccccccagagtgtctttccccttttggcaggcctactatgagccagtttgatatggatcgcttatgtgatgagcacctgagagcaaagcgcgcccgggttgagaatataattcggggtatgagccattcccccagtgtggcattaaggggcaatgaaaatgaaagagagatggccccgcagtctgtgagtccccgagaaagttacagagaaaacaaacgcaagcaaaagcttccccagcagcagcaacagagtttccagcagctggtttcagcccgaaaagaacagaagcgagaggagcgccgacagctgaaacagcagctggaggacatgcagaaacagctgcgccagctgcaggaaaagttctaccaaatctatgacagcactgattcggaaaatgatgaagatggtaacctgtctgaagacagcatgcgctcggagatcctggatgccagggcccaggactctgtcggaaggtcagataatgagatgtgcgagctagacccaggacagtttattgaccgagctcgagccctgatcagagagcaggaaatggctgaaaacaagccgaagcgagaaggcaacaacaaagaaagagaccatgggccaaactccttacaaccggaaggcaaacatttggctgagaccttgaaacaggaactgaacactgccatgtcgcaagttgtggacactgtggtcaaagtcttttcggccaagccctcccgccaggttcctcaggtcttcccacctctccagatcccccaggccagatttgcagtcaatggggaaaaccacaatttccacaccgccaaccagcgcctgcagtgctttggcgacgtcatcattccgaaccccctggacacctttggcaatgtgcagatggccagttccactgaccagacagaagcactgcccctggttgtccgcaaaaactcctctgaccagtctgcctccggccctgccgctggcggccaccaccagcccctgcaccagtcgcctctctctgccaccacgggcttcaccacgtccaccttccgccaccccttcccccttcccttgatggcctatccatttcagagcccattaggtgctccctccggctccttctctggaaaagacagagcctctcctgaatccttagacttaactagggataccacgagtctgaggaccaagatgtcatctcaccacctgagccaccacccttgttcaccagcacacccgcccagcaccgccgaagggctctccttgtcgctcataaagtccgagtgcggcgatcttcaagatatgtctgaaatatcaccttattcgggaagtgcaatgcaggaaggattgtcacccaatcacttgaaaaaagcaaagctcatgtttttttatacccgttatcccagctccaatatgctgaagacctacttctccgacgtaaagttcaacagatgcattacctctcagctcatcaagtggtttagcaatttccgtgagttttactacattcagatggagaagtacgcacgtcaagccatcaacgatggggtcaccagtactgaagagctgtctataaccagagactgtgagctgtacagggctctgaacatgcactacaataaagcaaatgactttgaggttccagagagattcctggaagttgctcagatcacattacgggagtttttcaatgccattatcgcaggcaaagatgttgatccttcctggaagaaggccatatacaaggtcatctgcaagctggatagtgaagtccctgagattttcaaatccccgaactgcctacaagagctgcttcatgagtagaaatttcaacaactctttttgaatgtatgaagagtagcagtcccctttggatgtccaagttatatgtgtctagattttgatttcatatatatgtgtatgggaggcatggatatgttatgaaatcagctggtaattcctcctcatcacgtttctctcattttcttttgttttccattgcaaggggatggttgttttctttctgcctttagtttgcttttgcccaaggcccttaacatttggacacttaaaatagggttaattttcagggaaaaagaatgttggcgtgtgtaaagtctctattagcaatgaagggaatttgttaacgatgcatccacttgattgatgacttattgcaaatggcggttggctgaggaaaacccatgacacagcacaactctacagacagtgatgtgtctcttgtttctactgctaagaaggtctgaaaatttaatgaaaccacttcatacatttaagtattttgtttggtttgaactcaatcagtagcttttccttacatgtttaaaaataattccaatgacagatgagcagctcacttttccaaagtaccccaaaaggccaaatt

SEQ ID NO: 298565 - DNA, 8498 bp, Artificial Sequence
  derived and/or modified sequence
aagtaaatcttgttgtggagcggagccctcagctgagggagcgctctgaaataatacaccattgcagccggggaaagcagagcggcgcaaaagagctctcgccgggtccgcctgctccctctccgcttcgctcctcttctcttctttacccttctcctctctcctcctctgctgctctctcctctcctcccgctcttctctctcctcctctcctgctctctcctcttcccttagctcctcttcttttcttctcctcttcttccctctcctcgcctctcccctgctcctcttctctcgtctcccctcccctcccgcctctctctcccctctccctctcccactcgccccgctcgctcgctcgctgtcgcacagactcaccgtcccttgtccaattatcatattcatcacccgcaagatatcaccgtgtgtgcactcgcgtgttttcctctctctgccgggggaaaaaaaagagagagagagagatagagagagagagagagagagagagagagaggctcggtcccactgctccctgcaccgcggtcccgggattcttgagctgtgcccagctgacgagcttttgaagatggcacaataaccgtccagtgatgcctgaccatgacagcacagccctcttaagccggcaaaccaagaggagaagagttgacattggagtgaaaaggacggtagggacagcatctgcattttttgctaaggcaagagcaacgttttttagtgccatgaatccccaaggttctgagcaggatgttgagtattcagtggtgcagcatgcagatggggaaaagtcaaatgtactccgcaagctgctgaagagggcgaactcgtatgaagatgccatgatgccttttccaggagcaaccataatttcccagctgttgaaaaataacatgaacaaaaatggtggcacggagcccagtttccaagccagcggtctctctagtacaggctccgaagtacatcaggaggatatatgcagcaactcttcaagagacagccccccagagtgtctttccccttttggcaggcctactatgagccagtttgatatggatcgcttatgtgatgagcacctgagagcaaagcgcgcccgggttgagaatataattcggggtatgagccattcccccagtgtggcattaaggggcaatgaaaatgaaagagagatggccccgcagtctgtgagtccccgagaaagttacagagaaaacaaacgcaagcaaaagcttccccagcagcagcaacagagtttccagcagctggtttcagcccgaaaagaacagaagcgagaggagcgccgacagctgaaacagcagctggaggacatgcagaaacagctgcgccagctgcaggaaaagttctaccaaatctatgacagcactgattcggaaaatgatgaagatggtaacctgtctgaagacagcatgcgctcggagatcctggatgccagggcccaggactctgtcggaaggtcagataatgagatgtgcgagctagacccaggacagtttattgaccgagctcgagccctgatcagagagcaggaaatggctgaaaacaagccgaagcgagaaggcaacaacaaagaaagagaccatgggccaaactccttacaaccggaaggcaaacatttggctgagaccttgaaacaggaactgaacactgccatgtcgcaagttgtggacactgtggtcaaagtcttttcggccaagccctcccgccaggttcctcaggtcttcccacctctccagatcccccaggccagatttgcagtcaatggggaaaaccacaatttccacaccgccaaccagcgcctgcagtgctttggcgacgtcatcattccgaaccccctggacacctttggcaatgtgcagatggccagttccactgaccagacagaagcactgcccctggttgtccgcaaaaactcctctgaccagtctgcctccggccctgccgctggcggccaccaccagcccctgcaccagtcgcctctctctgccaccacgggcttcaccacgtccaccttccgccaccccttcccccttcccttgatggcctatccatttcagagcccattaggtgctccctccggctccttctctggaaaagacagagcctctcctgaatccttagacttaactagggataccacgagtctgaggaccaagatgtcatctcaccacctgagccaccacccttgttcaccagcacacccgcccagcaccgccgaagggctctccttgtcgctcataaagtccgagtgcggcgatcttcaagatatgtctgaaatatcaccttattcgggaagtgcaatgcaggaaggattgtcacccaatcacttgaaaaaagcaaagctcatgtttttttatacccgttatcccagctccaatatgctgaagacctacttctccgacgtaaagttcaacagatgcattacctctcagctcatcaagtggtttagcaatttccgtgagttttactacattcagatggagaagtacgcacgtcaagccatcaacgatggggtcaccagtactgaagagctgtctataaccagagactgtgagctgtacagggctctgaacatgcactacaataaagcaaatgactttgaggttccagagagattcctggaagttgctcagatcacattacgggagtttttcaatgccattatcgcaggcaaagatgttgatccttcctggaagaaggccatatacaaggtcatctgcaagctggatagtgaagtccctgagattttcaaatccccgaactgcctacaagagctgcttcatgagtagaaatttcaacaactctttttgaatgtatgaagagtagcagtcccctttggatgtccaagttatatgtgtctagattttgatttcatatatatgtgtatgggaggcatggatatgttatgaaatcagctggtaattcctcctcatcacgtttctctcattttcttttgttttccattgcaaggggatggttgttttctttctgcctttagtttgcttttgcccaaggcccttaacatttggacacttaaaatagggttaattttcagggaaaaagaatgttggcgtgtgtaaagtctctattagcaatgaagggaatttgttaacgatgcatccacttgattgatgacttattgcaaatggcggttggctgaggaaaacccatgacacagcacaactctacagacagtgatgtgtctcttgtttctactgctaagaaggtctgaaaatttaatgaaaccacttcatacatttaagtattttgtttggtttgaactcaatcagtagcttttccttacatgtttaaaaataattccaatgacagatgagcagctcacttttccaaagtaccccaaaaggccaaattaaaaaagaaaaataatcactctcaagccttgtctaagaaaagaggcaaactctgaaagtcgtaccagtttcttctggaggcaaagcaattttgcacaaaaccagctctctcaagatgagactagaaattcatacctggtcttgtagccacctctctaaacttgaaaataggttcttcttcataagtgagcttacatcattcttcataaagaaaaatcctataacttgttatcatttttgcttcagatactaaaaggcactaagtttccaatttacgctgctcaactttgtttatatgcttaaaaggattctgtttacttaacaattttttcccctaaaatactattttctgaatacttccttccagtaaggaataaaggaaagcccaacttggccataaaattcttgcctacactagaagtttgttgacagccattagctgacttgatcgtcatctcctaagaggaacacatatattttcacaagcaattccacactatcctgatgggtatgcaaagtggtgacagtctaactcagtgtttcttcattttaggtataacattttaaagcaattgataatgcctcttccaattcagaagctagtattgaccaaaatgtgagaagagtgtatagcataggaaaatttggggttaacccaaaagacacaattccagcacacataagaaagctagctgctattttatgctttcttccatggttctcctcttttttcccttttatttttccctgtttttcaatgatgtacagtgttccctacttgcattgaaaaaactcgtatggcattcacactttttttcttaggtgggtttttgtgtccagatgcagtaagaattcattgttcatcctaaaactgttttccagacccttccttccccttaggtaatttgatatacacctcctaaaatgacacagtaacaaatctggtatttagaacatatagaacataaatgccattttttaattcaactttaataagaattacatttgactttggagaatacaggtcttgacccatgtgactgactagctgacccgatcgctgtaatttaacgtcatttataaattctgctgatggacaggaatgtatgaactcaattattgtcagcacaaagccttaaaacctgctgactttaaattaaatggtgcagtcctatgatgccctgcaccatccaggggactaacagggcctcgcagtgtagacagagggtgcagccacacgggcgggggcaccagccacctcactctgcacccgcggcctcacacatctcccagctcacactctactaatgcacagagtcattagatccaatttgttatttttctcacttgctttaaaaaaaagcagtttggataatcatgacattggaataaagtgggaaggaaaaattccatcagcacaaaatagggaagtaatcccaacttgtagtcacagttttctgactggctttgttttaaaagaggatggcagtccttgttcgtgtcagtgtgccactgggtttttgctgttccgtgtaattcatatcaactttgtgttgccatttgcaaggtaaaaggcaaagctgtagtgtattcacctatgtagacagattgctagatatctttttgatctggggcgagttcaatattgattccagacttatttggatttttttagtattattttcccctccctttctaatttaaatagacaaattaagcaaaagtgtgtgttcacaaccaaatgttgatgcccttatctactgataatatcctctcaatgttcactgaggcatagaaattatttcagagtagaaattgcagcatgaggataaactcacctctttgttctgaaaatagaactttatcactatgctttccggtggttttcccttttacaatcgaaatcttgtgcctcccaagtgcattggaaaatgacaaaagcctgtctctccaaattcctatttaacagtttgattttttttttttaatcaccatctttcaaatcttagctcaactctcaccaagtgaaaattggctacttgggagaaagttaactttctatggtgggatggtgaaggatgagggacagtttacataggaaaagaaaaaaaaaagtctaaagtccatgttgaaaaaccacactaccacttattttctgctaaccctaaattatttttgcgtatacgcttgaggttatagtctgtgcctagacctaaaatgcaccagcgggggggattttaaaaaatccttcaaaataccagttttttcccaacaagtacaattgttcttgtgccttctgtggctttcgatttcatctttttgactttatttccaattactacagctgcaataaacactagattttttttctggctgtttgacataacgttgatagctatgcatattttgtgtctttttaaaacaaagcgggagaatacgtttttgaagaagagaatttttagaacagtttgataccgcaaattattttttcctcaattgtttgagcagcattcgagttttgaaaattcttgtagaagccaattttttgtaactgtggtgcaaatcttgtgttttcttagcctaatgaaaagtagtatagaagcaatatttcataccatgtgctatatatgtgtgcgcagatgtgtgaacataaaatcacatacacacatatacacacatgtaaaaatatacatatatatatatgcgtgtgaagtggaaagcttaccttttcctatctagatttaagaacctattttagacatttgttatgttttgtgaaaagaatgttctatttgcaacaaaacatttaattcttactgtatctctggctgtttaatgaggacgtttcacattaaatggtaaaacacatggaagatgttagaatgtagtaattatttaagtaaacgttcacccacatattcctgaagtttgctttgtgcctccgagtattatttaattaaagaagtgttttatgtttgcagaatctttgtcactgtactagggatgtgggtgaatatcatttaaaaaaatttaaaacaacaaaaaaaaagcaaaacagaaacactaaagcaagaggggaacttttataaagcaatgtaaatatttaacctcatggctgtcattatgtaagacatgagattttaataaataactacattctcacgacatctgttgaatttactaggaacactacagtgactgtatagacagttgaaagcattcttgaaaatcctgctctctccttttaaaagttaacaatctcttttatcagatgtcaagggcaagggtaatgcagtttctgtaaatttatgaaatttctttttctatgtacatgaagacatttagtaagtaacacccccccttcccatgcgcacatgtgcgcatacacacacacacacacacacacacacacacaaacacacacactgtcataaagctaatgatttggggactttaaaaaataggatgtcctccaggaacaatcataaatttatgaaagaaagagtagtttacagactcccctgaaagaagcagtgtatatgtgaagacagtgcaaaaatctctttgccatgtatattatagcgtattcattggtgtgaatagtacaaatgtttccttctggtacaaactctgtgtttgcaaatttacaagaagcattgttttcaaaaagctccccttaaaaaatgtaactggtttatatgagtaagcagttaccgtattgcacttaaatgttatgttgaaggaaatgcagttttgttttctgtagatctgttggttgtaaaccatctataaaactaaagctaaaatgctcatattcagagctgggatcaaaactggtatttaacctttgcatcttcttataattatccttctaagaatataacagaatgtggaagtgtctggactttgagtcttttcaactgagccttctctcaaatctgacaccccctcagaatgcacaaacataagcagaaaaggcaaacaagcttaccttcttttgtgaaaacgtattcattctgtatttttttaaatattcaattcccctaaaaatggggagaaaatattttaaaattgtatattacgacttcaaatttagaactaagaaaaaaatgtatttgggattggtctcagcgctacctagaagaatcaaaggtcatggcttccctcaatattgtcccagccatttctcatatgtatatagtataaaccgtgacaaaacactgcctttatattatttagcaatatgttgtaaatagcattattaagctcttttttgtaataaagaccctttgatttgaatatagtacaataactgaactgataaagtcaatttttgatttttgtttgttttttttagctagaggcaatttcaattgtgaatttttgttgttgtctattgttctgaagactttgcataatttattggtttaatttatcctaatttatttgatgaaggtgtacaattttgtattaccaaggatgtactgtaatattaattgatatgataaacacaatgagactccctgtccatattaaaaagaaaataaaaaggtgcagtagacaattgattttaaaggaaaagttaaaaaaattagtttggcagctactaaattttaaaacaggaaaaaaaaaagttgttgtggggagggtgggaaaggggttttactttgtgtgttttaagcttttgtatactctccaaacttttaccttttgctttgtaccacttaaaggatacagtagtccaattgccttgtgtgccttccatctcctcttaaactgaatgtatgtgcagtatatatgcaagcttgtgcaaaataaaatatacattacaagctcagtgccgtttgattttcttaaagaaagagtgacttttaatttttggacctgtatccaattgtaggacagtaggctagttgtgccagtaatgtcaagtatggagattttctttcactacaattcttcattctgttagcctaacgtgcagctcctagaaacaacctcttttactttagatgcttggaataattgcttggatttctctctctgaaacatctttcaggcttaactttatttagccctgaaacttaaaaaaaa

SEQ ID NO: 298566 - DNA, 3069 bp, Artificial Sequence
  derived and/or modified sequence
ccccttttccagaatcacttgcactgtcttgttcttgaatgagaaaggaagaaaagagcctcccattactcagacccgtgtaaacattattccccccaggagaaaatggtgttattcaaatgaatcataataaaatagcctctaaacagtttctaagcgggagcctccgtggaactcagcgctccgctcctcccagttcctaagaggtcccgggattcttgagctgtgcccagctgacgagcttttgaagatggcacaataaccgtccagtgatgcctgaccatgacagcacagccctcttaagccggcaaaccaagaggagaagagttgacattggagtgaaaaggacggtagggacagcatctgcattttttgctaaggcaagagcaacgttttttagtgccatgaatccccaaggttctgagcaggatgttgagtattcagtggtgcagcatgcagatggggaaaagtcaaatgtactccgcaagctgctgaagagggcgaactcgtatgaagatgccatgatgccttttccaggagcaaccataatttcccagctgttgaaaaataacatgaacaaaaatggtggcacggagcccagtttccaagccagcggtctctctagtacaggctccgaagtacatcaggaggatatatgcagcaactcttcaagagacagccccccagagtgtctttccccttttggcaggcctactatgagccagtttgatatggatcgcttatgtgatgagcacctgagagcaaagcgcgcccgggttgagaatataattcggggtatgagccattcccccagtgtggcattaaggggcaatgaaaatgaaagagagatggccccgcagtctgtgagtccccgagaaagttacagagaaaacaaacgcaagcaaaagcttccccagcagcagcaacagagtttccagcagctggtttcagcccgaaaagaacagaagcgagaggagcgccgacagctgaaacagcagctggaggacatgcagaaacagctgcgccagctgcaggaaaagttctaccaaatctatgacagcactgattcggaaaatgatgaagatggtaacctgtctgaagacagcatgcgctcggagatcctggatgccagggcccaggactctgtcggaaggtcagataatgagatgtgcgagctagacccaggacagtttattgaccgagctcgagccctgatcagagagcaggaaatggctgaaaacaagccgaagcgagaaggcaacaacaaagaaagagaccatgggccaaactccttacaaccggaaggcaaacatttggctgagaccttgaaacaggaactgaacactgccatgtcgcaagttgtggacactgtggtcaaagtcttttcggccaagccctcccgccaggttcctcaggtcttcccacctctccagatcccccaggccagatttgcagtcaatggggaaaaccacaatttccacaccgccaaccagcgcctgcagtgctttggcgacgtcatcattccgaaccccctggacacctttggcaatgtgcagatggccagttccactgaccagacagaagcactgcccctggttgtccgcaaaaactcctctgaccagtctgcctccggccctgccgctggcggccaccaccagcccctgcaccagtcgcctctctctgccaccacgggcttcaccacgtccaccttccgccaccccttcccccttcccttgatggcctatccatttcagagcccattaggtgctccctccggctccttctctggaaaagacagagcctctcctgaatccttagacttaactagggataccacgagtctgaggaccaagatgtcatctcaccacctgagccaccacccttgttcaccagcacacccgcccagcaccgccgaagggctctccttgtcgctcataaagtccgagtgcggcgatcttcaagatatgtctgaaatatcaccttattcgggaagtgcaatgcaggaaggattgtcacccaatcacttgaaaaaagcaaagctcatgtttttttatacccgttatcccagctccaatatgctgaagacctacttctccgacgtaaagttcaacagatgcattacctctcagctcatcaagtggtttagcaatttccgtgagttttactacattcagatggagaagtacgcacgtcaagccatcaacgatggggtcaccagtactgaagagctgtctataaccagagactgtgagctgtacagggctctgaacatgcactacaataaagcaaatgactttgaggttccagagagattcctggaagttgctcagatcacattacgggagtttttcaatgccattatcgcaggcaaagatgttgatccttcctggaagaaggccatatacaaggtcatctgcaagctggatagtgaagtccctgagattttcaaatccccgaactgcctacaagagctgcttcatgagtagaaatttcaacaactctttttgaatgtatgaagagtagcagtcccctttggatgtccaagttatatgtgtctagattttgatttcatatatatgtgtatgggaggcatggatatgttatgaaatcagctggtaattcctcctcatcacgtttctctcattttcttttgttttccattgcaaggggatggttgttttctttctgcctttagtttgcttttgcccaaggcccttaacatttggacacttaaaatagggttaattttcagggaaaaagaatgttggcgtgtgtaaagtctctattagcaatgaagggaatttgttaacgatgcatccacttgattgatgacttattgcaaatggcggttggctgaggaaaacccatgacacagcacaactctacagacagtgatgtgtctcttgtttctactgctaagaaggtctgaaaatttaatgaaaccacttcatacatttaagtattttgtttggtttgaactcaatcagtagcttttccttacatgtttaaaaataattccaatgacagatgagcagctcacttttccaaagtaccccaaaaggccaaatt

SEQ ID NO: 298567 - DNA, 900 bp, Artificial Sequence
  derived and/or modified sequence
ctggagaggagattcccagccttcctgcccaacccgaaacttttccaacacacgcaggcgtattcctcgcaggattcggcggtcccgagtcgcagtcagggaggaggctcgggaagcacacgtgccctggcacactggaggagggtcccgggattcttgagctgtgcccagctgacgagcttttgaagatggcacaataaccgtccagtgatgcctgaccatgacagcacagccctcttaagccggcaaaccaagaggagaagagttgacattggagtgaaaaggacggtagggacagcatctgcattttttgctaaggcaagagcaacgttttttagtgccatgaatccccaaggttctgagcaggatgttgagtattcagtggtgcagcatgcagatggggaaaagtcaaatgtactccgcaagctgctgaagagggcgaactcgtatgaagatgccatgatgccttttccaggagcaaccataatttcccagctgttgaaaaataacatgaacaaaaatggtggcacggagcccagtttccaagccagcggtctctctagtacaggctccgaagtacatcaggaggatatatgcagcaactcttcaagagacagccccccagagtgtctttccccttttggcaggcctactatgagccagtttgatatggatcgcttatgtgatgagcacctgagagcaaagcgcgcccgggttgagaatataattcggggtatgagccattcccccagtgtggcattaaggggcaatgaaaatgaaagagagatggccccgcagtctgtgagtccccgagaaagttacagagaaaacaaacgcaagcaaaagcttccccagcagcagcaacagagtttccagcagctggtttcagcccgaaaagaa

SEQ ID NO: 298568 - DNA, 3670 bp, Artificial Sequence
  derived and/or modified sequence
agctgtgtcttaaagtaaatcttgttgtggagcggagccctcagctgagggagcgctctgaaataatacaccattgcagccggggaaagcagagcggcgcaaaagagctctcgccgggtccgcctgctccctctccgcttcgctcctcttctcttctttacccttctcctctctcctcctctgctgctctctcctctcctcccgctcttctctctcctcctctcctgctctctcctcttcccttagctcctcttcttttcttctcctcttcttccctctcctcgcctctcccctgctcctcttctctcgtctcccctcccctcccgcctctctctcccctctccctctcccactcgccccgctcgctcgctcgctgtcgcacagactcaccgtcccttgtccaattatcatattcatcacccgcaagatatcaccgtgtgtgcactcgcgtgttttcctctctctgccgggggaaaaaaaagagagagagagagatagagagagagagagagagagagagagagaggctcggtcccactgctccctgcaccgcgtaagtatcttcttcttcccctcgtgagtccctccccttttccagaatcacttgcactgtcttgttcttgaatgagaaaggaagaaaagagcctcccattactcagacccgtgtaaacattattccccccaggagaaaatggtgttattcaaatgaatcataataaaatagcctctaaacagtttctaagcgggagcctccgtggaactcagcgctccgctcctcccagttcctaagaggtcccgggattcttgagctgtgcccagctgacgagcttttgaagatggcacaataaccgtccagtgatgcctgaccatgacagcacagccctcttaagccggcaaaccaagaggagaagagttgacattggagtgaaaaggacggtagggacagcatctgcattttttgctaaggcaagagcaacgttttttagtgccatgaatccccaaggttctgagcaggatgttgagtattcagtggtgcagcatgcagatggggaaaagtcaaatgtactccgcaagctgctgaagagggcgaactcgtatgaagatgccatgatgccttttccaggagcaaccataatttcccagctgttgaaaaataacatgaacaaaaatggtggcacggagcccagtttccaagccagcggtctctctagtacaggctccgaagtacatcaggaggatatatgcagcaactcttcaagagacagccccccagagtgtctttccccttttggcaggcctactatgagccagtttgatatggatcgcttatgtgatgagcacctgagagcaaagcgcgcccgggttgagaatataattcggggtatgagccattcccccagtgtggcattaaggggcaatgaaaatgaaagagagatggccccgcagtctgtgagtccccgagaaagttacagagaaaacaaacgcaagcaaaagcttccccagcagcagcaacagagtttccagcagctggtttcagcccgaaaagaacagaagcgagaggagcgccgacagctgaaacagcagctggaggacatgcagaaacagctgcgccagctgcaggaaaagttctaccaaatctatgacagcactgattcggaaaatgatgaagatggtaacctgtctgaagacagcatgcgctcggagatcctggatgccagggcccaggactctgtcggaaggtcagataatgagatgtgcgagctagacccaggacagtttattgaccgagctcgagccctgatcagagagcaggaaatggctgaaaacaagccgaagcgagaaggcaacaacaaagaaagagaccatgggccaaactccttacaaccggaaggcaaacatttggctgagaccttgaaacaggaactgaacactgccatgtcgcaagttgtggacactgtggtcaaagtcttttcggccaagccctcccgccaggttcctcaggtcttcccacctctccagatcccccaggccagatttgcagtcaatggggaaaaccacaatttccacaccgccaaccagcgcctgcagtgctttggcgacgtcatcattccgaaccccctggacacctttggcaatgtgcagatggccagttccactgaccagacagaagcactgcccctggttgtccgcaaaaactcctctgaccagtctgcctccggccctgccgctggcggccaccaccagcccctgcaccagtcgcctctctctgccaccacgggcttcaccacgtccaccttccgccaccccttcccccttcccttgatggcctatccatttcagagcccattaggtgctccctccggctccttctctggaaaagacagagcctctcctgaatccttagacttaactagggataccacgagtctgaggaccaagatgtcatctcaccacctgagccaccacccttgttcaccagcacacccgcccagcaccgccgaagggctctccttgtcgctcataaagtccgagtgcggcgatcttcaagatatgtctgaaatatcaccttattcgggaagtgcaatgcaggaaggattgtcacccaatcacttgaaaaaagcaaagctcatgtttttttatacccgttatcccagctccaatatgctgaagacctacttctccgacgtaaagttcaacagatgcattacctctcagctcatcaagtggtttagcaatttccgtgagttttactacattcagatggagaagtacgcacgtcaagccatcaacgatggggtcaccagtactgaagagctgtctataaccagagactgtgagctgtacagggctctgaacatgcactacaataaagcaaatgactttgaggttccagagagattcctggaagttgctcagatcacattacgggagtttttcaatgccattatcgcaggcaaagatgttgatccttcctggaagaaggccatatacaaggtcatctgcaagctggatagtgaagtccctgagattttcaaatccccgaactgcctacaagagctgcttcatgagtagaaatttcaacaactctttttgaatgtatgaagagtagcagtcccctttggatgtccaagttatatgtgtctagattttgatttcatatatatgtgtatgggaggcatggatatgttatgaaatcagctggtaattcctcctcatcacgtttctctcattttcttttgttttccattgcaaggggatggttgttttctttctgcctttagtttgcttttgcccaaggcccttaacatttggacacttaaaatagggttaattttcagggaaaaagaatgttggcgtgtgtaaagtctctattagcaatgaagggaatttgttaacgatgcatccacttgattgatgacttattgcaaatggcggttggctgaggaaaacccatgacacagcacaactctacagacagtgatgtgtctcttgtttctactgctaagaaggtctgaaaatttaatgaaaccacttcatacatttaagtattttgtttggtttgaactcaatcagtagcttttccttacatgtttaaaaataattccaatgacagatgagcagctcacttttccaaagtaccccaaaaggccaaattaaaaaagaaaaataa

SEQ ID NO: 298569 - DNA, 1640 bp, Artificial Sequence
  derived and/or modified sequence
gtcttaaagtaaatcttgttgtggagcggagccctcagctgagggagcgctctgaaataatacaccattgcagtgctttggcgacgtcatcattccgaaccccctggacacctttggcaatgtgcagatggccagttccactgaccagacagaagcactgcccctggttgtccgcaaaaactcctctgaccagtctgcctccggccctgccgctggcggccaccaccagcccctgcaccagtcgcctctctctgccaccacgggcttcaccacgtccaccttccgccaccccttcccccttcccttgatggcctatccatttcagagcccattaggtgctccctccggctccttctctggaaaagacagagcctctcctgaatccttagacttaactagggataccacgagtctgaggaccaagatgtcatctcaccacctgagccaccacccttgttcaccagcacacccgcccagcaccgccgaagggctctccttgtcgctcataaagtccgagtgcggcgatcttcaagatatgtctgaaatatcaccttattcgggaagtgcaatgcaggaaggattgtcacccaatcacttgaaaaaagcaaagctcatgtttttttatacccgttatcccagctccaatatgctgaagacctacttctccgacgtaaagttcaacagatgcattacctctcagctcatcaagtggtttagcaatttccgtgagttttactacattcagatggagaagtacgcacgtcaagccatcaacgatggggtcaccagtactgaagagctgtctataaccagagactgtgagctgtacagggctctgaacatgcactacaataaagcaaatgactttgaggttccagagagattcctggaagttgctcagatcacattacgggagtttttcaatgccattatcgcaggcaaagatgttgatccttcctggaagaaggccatatacaaggtcatctgcaagctggatagtgaagtccctgagattttcaaatccccgaactgcctacaagagctgcttcatgagtagaaatttcaacaactctttttgaatgtatgaagagtagcagtcccctttggatgtccaagttatatgtgtctagattttgatttcatatatatgtgtatgggaggcatggatatgttatgaaatcagctggtaattcctcctcatcacgtttctctcattttcttttgttttccattgcaaggggatggttgttttctttctgcctttagtttgcttttgcccaaggcccttaacatttggacacttaaaatagggttaattttcagggaaaaagaatgttggcgtgtgtaaagtctctattagcaatgaagggaatttgttaacgatgcatccacttgattgatgacttattgcaaatggcggttggctgaggaaaacccatgacacagcacaactctacagacagtgatgtgtctcttgtttctactgctaagaaggtctgaaaatttaatgaaaccacttcatacatttaagtattttgtttggtttgaactcaatcagtagcttttccttacatgtttaaaaataattccaatgacagatgagcagctcacttttccaaagtaccccaaaaggccaaatt

SEQ ID NO: 298570 - DNA, 2214 bp, Artificial Sequence
  derived and/or modified sequence
atgcccgaccacgacagcaccgccctgctgagcagacagaccaagagaagaagagtggacatcggcgtgaagagaaccgtgggcaccgccagcgccttcttcgccaaggccagagccaccttcttcagcgccatgaacccccagggcagcgagcaggacgtggagtacagcgtggtgcagcacgccgacggcgagaagagcaacgtgctgagaaagctgctgaagagagccaacagctacgaggacgccatgatgcccttccccggcgccaccatcatcagccagctgctgaagaacaacatgaacaagaacggcggcaccgagcccagcttccaggccagcggcctgagcagcaccggcagcgaggtgcaccaggaggacatctgcagcaacagcagcagagacagcccccccgagtgcctgagccccttcggcagacccaccatgagccagttcgacatggacagactgtgcgacgagcacctgagagccaagagagccagagtggagaacatcatcagaggcatgagccacagccccagcgtggccctgagaggcaacgagaacgagagagagatggccccccagagcgtgagccccagagagagctacagagagaacaagagaaagcagaagctgccccagcagcagcagcagagcttccagcagctggtgagcgccagaaaggagcagaagagagaggagagaagacagctgaagcagcagctggaggacatgcagaagcagctgagacagctgcaggagaagttctaccagatctacgacagcaccgacagcgagaacgacgaggacggcaacctgagcgaggacagcatgagaagcgagatcctggacgccagagcccaggacagcgtgggcagaagcgacaacgagatgtgcgagctggaccccggccagttcatcgacagagccagagccctgatcagagagcaggagatggccgagaacaagcccaagagagagggcaacaacaaggagagagaccacggccccaacagcctgcagcccgagggcaagcacctggccgagaccctgaagcaggagctgaacaccgccatgagccaggtggtggacaccgtggtgaaggtgttcagcgccaagcccagcagacaggtgccccaggtgttcccccccctgcagatcccccaggccagattcgccgtgaacggcgagaaccacaacttccacaccgccaaccagagactgcagtgcttcggcgacgtgatcatccccaaccccctggacaccttcggcaacgtgcagatggccagcagcaccgaccagaccgaggccctgcccctggtggtgagaaagaacagcagcgaccagagcgccagcggccccgccgccggcggccaccaccagcccctgcaccagagccccctgagcgccaccaccggcttcaccaccagcaccttcagacaccccttccccctgcccctgatggcctaccccttccagagccccctgggcgcccccagcggcagcttcagcggcaaggacagagccagccccgagagcctggacctgaccagagacaccaccagcctgagaaccaagatgagcagccaccacctgagccaccacccctgcagccccgcccacccccccagcaccgccgagggcctgagcctgagcctgatcaagagcgagtgcggcgacctgcaggacatgagcgagatcagcccctacagcggcagcgccatgcaggagggcctgagccccaaccacctgaagaaggccaagctgatgttcttctacaccagataccccagcagcaacatgctgaagacctacttcagcgacgtgaagttcaacagatgcatcaccagccagctgatcaagtggttcagcaacttcagagagttctactacatccagatggagaagtacgccagacaggccatcaacgacggcgtgaccagcaccgaggagctgagcatcaccagagactgcgagctgtacagagccctgaacatgcactacaacaaggccaacgacttcgaggtgcccgagagattcctggaggtggcccagatcaccctgagagagttcttcaacgccatcatcgccggcaaggacgtggaccccagctggaagaaggccatctacaaggtgatctgcaagctggacagcgaggtgcccgagatcttcaagagccccaactgcctgcaggagctgctgcacgagtag

SEQ ID NO: 298571 - DNA, 2031 bp, Artificial Sequence
  derived and/or modified sequence
atgcccgaccacgacagcaccgccctgctgagcagacagaccaagagaagaagagtggacatcggcgtgaagagaaccgtgggcaccgccagcgccttcttcgccaaggccagagccaccttcttcagcgccatgaacccccagggcagcgagcaggacgtggagtacagcgtggtgcagcacgccgacggcgagaagagcaacgtgctgagaaagctgctgaagagagccaacagctacgaggacgccatgatgcccttccccggcgccaccatcatcagccagctgctgaagaacaacatgaacaagaacggcggcaccgagcccagcttccaggccagcggcctgagcagcaccggcagcgaggtgcaccaggaggacatctgcagcaacagcagcagagacagcccccccgagtgcctgagccccttcggcagacccaccatgagccagttcgacatggacagactgtgcgacgagcacctgagagccaagagagccagagtggagaacatcatcagaggcatgagccacagccccagcgtggccctgagaggcaacgagaacgagagagagatggccccccagagcgtgagccccagagagagctacagagagaacaagagaaagcagaagctgccccagcagcagcagcagagcttccagcagctggtgagcgccagaaaggagcagaagagagaggagagaagacagctgaagcagcagctggaggacatgcagaagcagctgagacagctgcaggagaagttctaccagatctacgacagcaccgacagcgagaacgacgaggacggcaacctgagcgaggacagcatgagaagcgagatcctggacgccagagcccaggacagcgtgggcagaagcgacaacgagatgtgcgagctggaccccggccagttcatcgacagagccagagccctgatcagagagcaggagatggccgagaacaagcccaagagagagggcaacaacaaggagagagaccacggccccaacagcctgcagcccgagggcaagcacctggccgagaccctgaagcaggagctgaacaccgccatgagccaggtggtggacaccgtggtgaaggtgttcagcgccaagcccagcagacaggtgccccaggtgttcccccccctgcagatcccccaggccagattcgccgtgaacggcgagaaccacaacttccacaccgccaaccagagactgcagtgcttcggcgacgtgatcatccccaaccccctggacaccttcggcaacgtgcagatggccagcagcaccgaccagaccgaggccctgcccctggtggtgagaaagaacagcagcgaccagagcgccagcggccccgccgccggcggccaccaccagcccctgcaccagagccccctgagcgccaccaccggcttcaccaccagcaccttcagacaccccttccccctgcccctgatggcctaccccttccagagccccctgggcgcccccagcggcagcttcagcggcaaggacagagccagccccgagagcctggacctgaccagagacaccaccagcctgagaaccaagatgagcagccaccacctgagccaccacccctgcagccccgcccacccccccagcaccgccgagggcctgagcctgagcctgatcaagagcgagtgcggcgacctgcaggacatgagcgagatcagcccctacagcggcagcgccatgcaggagggcctgagccccaaccacctgaagaaggccaagctgatgttcttctacaccagataccccagcagcaacatgctgaagacctacttcagcgacgtgaagttcaacagatgcatcaccagccagctgatcaagtggttcagcaacttcagagagttctactacatccagatggagaagtacgccagacaggccatcaacgacggcgtgaccagcaccgaggagctgagcatcaccagagactgcgagctgtacagagccctgaacatgcactacaacaaggccaacgacttcgagtag

SEQ ID NO: 298572 - DNA, 693 bp, Artificial Sequence
  derived and/or modified sequence
atgcccgaccacgacagcaccgccctgctgagcagacagaccaagagaagaagagtggacatcggcgtgaagagaaccgtgggcaccgccagcgccttcttcgccaaggccagagccaccttcttcagcgccatgaacccccagggcagcgagcaggacgtggagtacagcgtggtgcagcacgccgacggcgagaagagcaacgtgctgagaaagctgctgaagagagccaacagctacgaggacgccatgatgcccttccccggcgccaccatcatcagccagctgctgaagaacaacatgaacaagaacggcggcaccgagcccagcttccaggccagcggcctgagcagcaccggcagcgaggtgcaccaggaggacatctgcagcaacagcagcagagacagcccccccgagtgcctgagccccttcggcagacccaccatgagccagttcgacatggacagactgtgcgacgagcacctgagagccaagagagccagagtggagaacatcatcagaggcatgagccacagccccagcgtggccctgagaggcaacgagaacgagagagagatggccccccagagcgtgagccccagagagagctacagagagaacaagagaaagcagaagctgccccagcagcagcagcagagcttccagcagctggtgagcgccagaaaggagtag

SEQ ID NO: 298573 - DNA, 930 bp, Artificial Sequence
  derived and/or modified sequence
atggccagcagcaccgaccagaccgaggccctgcccctggtggtgagaaagaacagcagcgaccagagcgccagcggccccgccgccggcggccaccaccagcccctgcaccagagccccctgagcgccaccaccggcttcaccaccagcaccttcagacaccccttccccctgcccctgatggcctaccccttccagagccccctgggcgcccccagcggcagcttcagcggcaaggacagagccagccccgagagcctggacctgaccagagacaccaccagcctgagaaccaagatgagcagccaccacctgagccaccacccctgcagccccgcccacccccccagcaccgccgagggcctgagcctgagcctgatcaagagcgagtgcggcgacctgcaggacatgagcgagatcagcccctacagcggcagcgccatgcaggagggcctgagccccaaccacctgaagaaggccaagctgatgttcttctacaccagataccccagcagcaacatgctgaagacctacttcagcgacgtgaagttcaacagatgcatcaccagccagctgatcaagtggttcagcaacttcagagagttctactacatccagatggagaagtacgccagacaggccatcaacgacggcgtgaccagcaccgaggagctgagcatcaccagagactgcgagctgtacagagccctgaacatgcactacaacaaggccaacgacttcgaggtgcccgagagattcctggaggtggcccagatcaccctgagagagttcttcaacgccatcatcgccggcaaggacgtggaccccagctggaagaaggccatctacaaggtgatctgcaagctggacagcgaggtgcccgagatcttcaagagccccaactgcctgcaggagctgctgcacgagtag

SEQ ID NO: 298574 - protein, 176 aa, Artificial Sequence
  derived and/or modified sequence
MVMRPLWSLLLWEDAVPRPVVQVFIAVERDAQPSKTCQVFLSCWAPNISEITYSWRRETTMDFGMEPHSLFTDGQVLSISLGPGDRDVAYSCIVSNPVSWDLATVTPWDSCHHEAAPGKASYKDVLLVVVPVSLLLMLVTLFSAWHWCPCSGKKKKDVHADRVGPETENPLVQDLP

SEQ ID NO: 298575 - DNA, 1038 bp, Artificial Sequence
  derived and/or modified sequence
ggaccacagctcctcccgtgcatccactcggcctgggaggttctggattttggctgtcgagggagtttgcctgcctctccagagaaagatggtcatgaggcccctgtggagtctgcttctctgggaagatgcagtgcccaggcccgtggtacaagtgttcattgctgtagaaagggatgctcagccctccaagacctgccaggttttcttgtcctgttgggcccccaacatcagcgaaataacctatagctggcgacgggagacaaccatggactttggtatggaaccacacagcctcttcacagacggacaggtgctgagcatttccctgggaccaggagacagagatgtggcctattcctgcattgtctccaaccctgtcagctgggacttggccacagtcacgccctgggatagctgtcatcatgaggcagcaccagggaaggcctcctacaaagatgtgctgctggtggtggtgcctgtctcgctgctcctgatgctggttactctcttctctgcctggcactggtgcccctgctcagggaaaaagaaaaaggatgtccatgctgacagagtgggtccagagacagagaacccccttgtgcaggatctgccataaaggacaatatgaactgatgcctggactatcagtaaccccactgcacaggcacacgatgctctgggacataactggtgcctggaaatcaccatggtcctcatatctcccatgggaatcctgtcctgcctcgaaggagcagcctgggcagccatcacaccacgaggacaggaagcaccagcacgtttcacacctcccccttccctctcccatcttctcatatcctggctcttctctgggcaagatgagccaagcagaacattccatccaggacactggaagttctccaggatccagatccatggggacattaatagtccaaggcattccctcccccaccactattcataaagtattaaccaactggcaccaaggaattgcctccagcctgagtcctaggctctaaaagatattacatattt

SEQ ID NO: 298576 - protein, 427 aa, Artificial Sequence
  derived and/or modified sequence
MTLDMDAVLSDFVRSTGAEPGLARDLLEGKNWDVNAALSDFEQLRQVHAGNLPPSFSEGSGGSRTPEKGFSDREPTRPPRPILQRQDDIVQEKRLSRGISHASSSIVSLARSHVSSNGGGGGSNEHPLEMPICAFQLPDLTVYNEDFRSFIERDLIEQSMLVALEQAGRLNWWVSVDPTSQRLLPLATTGDGNCLLHAASLGMWGFHDRDLMLRKALYALMEKGVEKEALKRRWRWQQTQQNKESGLVYTEDEWQKEWNELIKLASSEPRMHLGTNGANCGGVESSEEPVYESLEEFHVFVLAHVLRRPIVVVADTMLRDSGGEAFAPIPFGGIYLPLEVPASQCHRSPLVLAYDQAHFSALVSMEQKENTKEQAVIPLTDSEYKLLPLHFAVDPGKGWEWGKDDSDNVRLASVILSLEVKLHLLHS

SEQ ID NO: 298577 - DNA, 132 bp, Artificial Sequence
  derived and/or modified sequence
tgaagccggaacgacgacatctgcatctacggcggcctgggcctgggcggactgctgctgctcgcagtggtgctgcttagcgcttgtctgtgttggctgcatagacgagaagccgccagcgctcaacagtag

SEQ ID NO: 298578 - protein, 369 aa, Artificial Sequence
  derived and/or modified sequence
MLPWLLVFSALGIQAWGDSSWNKTQAKQVSEGLQYLFENISQLTEKDVSTTVSRKAWGAEAVGCSIQLTTPVNVLVIHHVPGLECHDQTVCSQRLRELQAHHVHNNSGCDVAYNFLVGDDGRVYEGVGWNIQGVHTQGYNNISLGFAFFGTKKGHSPSPAALSAMENLITYAVQKGHLSSSYVQPLLGKGENCLAPRQKTSLKKACPGVVPRSVWGARETHCPRMTLPAKYGIIIHTAGRTCNISDECRLLVRDIQSFYIDRLKSCDIGYNFLVGQDGAIYEGVGWNVQGSSTPGYDDIALGITFMGTFTGIPPNAAALEAAQDLIQCAMVKGYLTPNYLLVGHSDVARTLSPGQALYNIISTWPHFKH

SEQ ID NO: 298579 - DNA, 1110 bp, Artificial Sequence
  derived and/or modified sequence
atgcttccatggctgttggtcttttcggctttggggattcaagcctggggcgattcaagctggaacaaaactcaggccaaacaagtgagcgaagggctgcagtacctcttcgaaaacatttcacaattgacggaaaaggacgtcagtacaacggtttcacggaaggcatggggggctgaggccgtggggtgctctatccaattgaccaccccagtcaacgttcttgtgattcatcacgtacctgggctggagtgtcacgaccaaaccgtgtgcagccagcggctgagggagctgcaggcccaccatgtgcacaacaactctgggtgtgacgtggcctataacttcctggttggagacgatggcagagtgtacgagggggtgggctggaatattcagggggttcacacccagggctataataatatcagcttgggtttcgcctttttcggaacaaagaaagggcacagccccagcccagccgctctcagcgcaatggaaaatctgatcacttacgcagtgcagaaaggccatttgtcttcatcctacgtgcagcctctgctaggcaaaggggagaactgtctggccccacgacagaagactagcctcaaaaaagcctgtcctggggtcgttccgaggagcgtgtggggcgctcgggagacccactgtcctaggatgactctcccagccaagtatggaattataatccatacagccggtaggacctgtaatatctcagacgaatgtcgccttttagtgagagatatacaaagtttctacatcgaccgcctgaagtcttgcgatatcggatacaatttcctagtcggtcaagatggcgctatctatgagggagtcgggtggaatgtgcagggatcaagcacacctgggtacgacgacattgctctgggaattacatttatgggtaccttcactgggatccctccaaatgcagcagctctggaggcagcccaagatctcatccagtgcgccatggttaaaggctaccttaccccaaattaccttctcgtgggacattcagatgtggcacgtacattatcgcctggccaggctctttacaatattatctctacctggccccatttcaagcattag

SEQ ID NO: 298580 - DNA, 1110 bp, Artificial Sequence
  derived and/or modified sequence
atgttaccatggctcctggtttttagcgcactgggaattcaggcctggggggactcctcttggaataagactcaggcaaagcaggtgtcagagggtttgcagtacttatttgagaatattagtcagctgaccgaaaaggacgtgagcacaacagtgagccgtaaggcctggggggcggaggctgtggggtgctcaattcagctcaccacccccgttaacgttttggtgattcaccatgttccgggccttgaatgtcacgaccagacggtttgctcccagaggcttcgtgagctgcaagcacatcatgttcataacaattcaggctgcgacgttgcctataattttctcgtgggggacgacggacgggtttatgaaggagttggctggaacatccaaggcgtgcacacccagggctataacaatatctcattaggctttgccttcttcggaacgaaaaagggacattctccctctcctgccgcgttgtctgccatggaaaacctgattacttacgctgtccagaagggacaccttagttccagctacgtgcaacccctactaggaaaaggagaaaattgtctggccccacgtcaaaagacgtctcttaaaaaggcatgccccggagtcgttcccagaagtgtgtggggtgctagagaaacacactgtccccgcatgacactcccggctaaatatggaattatcatacataccgcaggccggacttgtaacataagcgatgaatgcagactcctggtgagggacattcaatctttctacatagaccggctcaagtcttgtgatattggatacaactttctggttggccaagatggtgccatttacgagggagtaggatggaatgttcagggttcttctactcccggctacgacgacatcgccttagggataacttttatgggtacatttaccggcattccgcctaatgccgctgctctggaggccgctcaggatttaatacaatgtgctatggttaagggttacttaactcctaactaccttctggtgggacactcagacgtggctagaacactcagtcctggacaggccctgtacaacataatttcaacttggccgcacttcaagcactag

SEQ ID NO: 298581 - DNA, 1110 bp, Artificial Sequence
  derived and/or modified sequence
atgctgccatggctcctcgttttctcagcactcgggatacaggcctggggtgacagtagctggaataagacacaggcaaaacaggtatccgaaggcctgcagtacctgttcgaaaatatctctcagttaaccgagaaggacgtatcaaccactgtcagtagaaaggcctggggtgccgaggccgtgggatgctctatacagttaacaaccccagtcaacgtattagtaattcatcacgtacccggattagaatgccatgaccaaacagtgtgttcccagagactcagggaactgcaggcccatcacgtgcacaacaactccggatgcgatgttgcttataatttcctcgtgggagacgacggcagagtttatgagggcgtaggatggaatattcagggcgtgcacacacagggctacaacaacatttcactggggttcgcattctttggaactaaaaaggggcatagccctagtcccgccgcattaagcgccatggaaaacctgataacctatgctgtacagaagggacatctttcctcttcctacgttcagccgctcctgggcaaaggagaaaactgtctagcccccagacaaaaaacttcactcaagaaagcctgtcctggtgtggtgccacgctcggtttggggagcaagagagacacactgcccgcggatgacactccccgcaaaatatggcattataattcacacagcggggcgaacctgtaatatctctgatgagtgtcgcctgcttgtccgtgacattcaaagtttttacatagaccgactgaaatcctgcgatattggctataattttctggtgggacaggatggtgccatttacgaaggagtgggctggaacgtccaaggctctagtacacccggctacgacgatatagcacttgggataaccttcatgggaaccttcacaggaatccctcccaacgccgctgcactggaagctgctcaagatctgattcagtgcgccatggttaagggctatctgaccccgaattatttactggtcggccactccgatgtcgcccggactctgtcacccggccaggccttgtataacataatctccacctggccccatttcaaacattag

SEQ ID NO: 298582 - DNA, 1110 bp, Artificial Sequence
  derived and/or modified sequence
atgctgccctggctgctggtgttcagcgccctgggcatccaggcctggggcgacagcagctggaacaagacccaggccaagcaggtgagcgagggcctgcagtacctgttcgagaacatcagccagctgaccgagaaggacgtgagcaccaccgtgagcagaaaggcctggggcgccgaggccgtgggctgcagcatccagctgaccacccccgtgaacgtgctggtgatccaccacgtgcccggcctggagtgccacgaccagaccgtgtgcagccagagactgagagagctgcaggcccaccacgtgcacaacaacagcggctgcgacgtggcctacaacttcctggtgggcgacgacggcagagtgtacgagggcgtgggctggaacatccagggcgtgcacacccagggctacaacaacatcagcctgggcttcgccttcttcggcaccaagaagggccacagccccagccccgccgccctgagcgccatggagaacctgatcacctacgccgtgcagaagggccacctgagcagcagctacgtgcagcccctgctgggcaagggcgagaactgcctggcccccagacagaagaccagcctgaagaaggcctgccccggcgtggtgcccagaagcgtgtggggcgccagagagacccactgccccagaatgaccctgcccgccaagtacggcatcatcatccacaccgccggcagaacctgcaacatcagcgacgagtgcagactgctggtgagagacatccagagcttctacatcgacagactgaagagctgcgacatcggctacaacttcctggtgggccaggacggcgccatctacgagggcgtgggctggaacgtgcagggcagcagcacccccggctacgacgacatcgccctgggcatcaccttcatgggcaccttcaccggcatcccccccaacgccgccgccctggaggccgcccaggacctgatccagtgcgccatggtgaagggctacctgacccccaactacctgctggtgggccacagcgacgtggccagaaccctgagccccggccaggccctgtacaacatcatcagcacctggccccacttcaagcactag

SEQ ID NO: 298583 - DNA, 1110 bp, Artificial Sequence
  derived and/or modified sequence
atgctgccctggcttcttgtattcagtgcactcggcatccaggcctggggggattcaagctggaataagacacaggcaaagcaggttagtgagggcctccaatacttgtttgagaatatttcgcagttgaccgagaaagatgtatctaccaccgtgtctcgaaaggcctggggcgccgaggccgtcggctgtagcattcagctgacaactccagttaatgtgctcgtcatccatcacgtccccggattggaatgccatgaccagacagtgtgtagccagcgcctccgagaattgcaggctcatcacgtacataataattcgggttgcgatgtggcatacaactttctggtcggtgacgacggacgggtgtacgaaggggtgggttggaatatccagggcgtccacactcaagggtacaacaacatttctctgggtttcgctttcttcggcaccaagaaggggcacagtccctcgccggcggctctgagtgccatggagaacctcatcacctacgccgtccagaaagggcacctgagtagctcatatgtccagcctctgctggggaaaggcgagaattgtctggcgcccagacagaaaacatcactcaagaaagcctgtccgggtgtggtgcccaggagtgtctggggggctagggaaacccactgtcctaggatgacacttccagcaaaatacggcatcataatacacacagctggacgcacttgtaacattagcgacgagtgtcggttactggtgagagacattcaatctttctacattgatcggctcaagtcctgcgacatcggctataatttcctcgtgggtcaggacggagcaatttacgagggcgtgggctggaacgtacagggctcttctacgcctgggtacgatgacattgcgctaggtattactttcatggggactttcaccggtatcccgcctaacgcagctgccctggaagccgcacaggatctgattcagtgtgccatggtcaagggatatttaaccccaaactacctgctggtgggccacagtgatgttgctcgcactctgtcacccgggcaggcactgtataacattatcagcacatggccccactttaaacattag

SEQ ID NO: 298584 - DNA, 2116 bp, Artificial Sequence
  derived and/or modified sequence
cttgcatttctccaggtgctgtgaaaggagctggctcagagccttgccctctgtcttcccttctccccatcttttgttagggatcctgggctctcttctctctgggaagctagagcccgagtgctccattcccagggagggagtgccctctagggctagggagagtgaaggctggaggagaaggcgccagttggtgaagaagggcagggcctggaggccaagtctggaagggaaggagctgctggccaatcaggggcaagctgactgcaccctgacctgctgggctgggacagcacaggacccacagatatctgctgccatccacactctccagattggtgtcctgggaccacgtggggatgctgccgtggcttcttgtcttctctgctctgggtatccaggcctggggtgattcctcctggaacaaaacacaagctaaacaggtatcagaggggctccagtacctatttgagaacatctcccagctcactgaaaaagatgtctccaccacggtctctcgcaaggcatggggggcagaagctgttggctgcagtattcagctgaccacgccagtgaatgtccttgttatacaccatgtccctggactggagtgtcacgaccagacagtctgcagccagagactgcgggaactgcaggcccatcatgtccacaacaacagtgggtgtgatgtggcctacaacttcctggttggggatgatggcagggtgtatgaaggtgttggctggaatatccaaggagtgcacacccaaggctacaacaacatctccctgggctttgccttctttggcactaagaaaggccacagtcccagccctgctgccctgtcggccatggaaaacctaatcacctatgctgtccagaagggccacctgtcatccagttatgttcagccacttcttgggaaaggcgagaactgcctggcccctcggcagaagacaagcctgaagaaggcttgccccggcgttgtcccacggtctgtgtggggagccagggagacccactgtcccaggatgactctcccagcgaagtatggcatcattatccacactgccgggaggacctgcaacatttctgatgagtgccgcctgctggtccgggacatccagtctttctacatagacaggctcaagtcatgcgacattggttataacttcctggtgggccaggatggcgccatttatgaaggggtgggctggaatgtccaaggctcctccacccctggctacgatgacattgccctgggcattaccttcatgggcaccttcacaggtataccacccaatgctgcagcactagaggcagcccaagacctgatccagtgtgccatggtcaaagggtacctgactcccaactacctgctggtgggccacagtgatgtggcccgaaccttgtctcctgggcaggctttgtacaacatcatcagcacctggcctcatttcaaacactgagagaagccccaggtccttctgagactgctttccctcccctgtcaggtctctcctgtcctaaccatccagcttggctcaacaccttttgccctcctcccctgccacacagtcctgtgcctcctttttcaggttgggatgatcatgccctctcctgccaacatcctccaagggcctccaaacctcatagctggacattcacagccctctgagtctgagtccagatttcttctctccttaccttcctctcccttggaaacccaactcctcagccaggtgagacaatgggctggttcttgtttcatttctctctctctctccattcccctctgcctggtgagccttcccctggtgtctgcctggcagcccccacctcccacctatcacccctcacccataactcaggtcaacgtgaccaaccttccttgcttacacataaacttgtatatatttggatgtagcccttatttaatggctgtcattatttatagatatgtctatccttgctacttggttgtgagtttctccaggggaggaactgtgttttattcatctctatgtcctctgtttctcagcagtgtctgaaatttaatgggttctactgatgtttattagagaaatggatgaataaatgaatgaagagatccaaa

SEQ ID NO: 298585 - DNA, 1110 bp, Artificial Sequence
  derived and/or modified sequence
atgctgccctggctgctggtgttttctgccctgggcatccaggcctggggagacagctcctggaacaagacccaggccaagcaggtgtctgagggcctgcagtacctgtttgagaacatcagccagctgacagagaaggatgtgtccaccaccgtgtccaggaaggcctggggcgctgaggccgtgggctgcagcatccagctgaccacccctgtgaatgtgctggtgatccaccacgtgcccggcctggagtgccacgaccagacagtgtgcagccagaggctgcgggagctgcaggcccaccacgtgcacaacaacagcggctgtgatgtggcctacaacttcctggtgggagatgatggccgggtgtatgagggcgtgggctggaacatccagggcgtgcacacccagggctacaacaacatcagcctgggctttgccttcttcggcaccaagaagggccacagccccagccctgctgccctgagcgccatggagaacctgatcacctatgctgtgcagaagggccacctgagcagcagctatgtgcagcccctgctgggcaaaggagagaactgcctggccccccggcagaagaccagcctgaagaaggcctgccctggggtggtgcccaggtctgtgtggggcgcccgggagacccactgccccaggatgaccctgcctgccaagtatggcatcatcatccacacagctggccgcacctgcaacatcagtgatgaatgtcggctgctggtgcgggacatccagagcttctacatcgaccggctgaagagctgtgacatcggctacaacttcctggtgggccaggatggagccatctatgaaggagtgggctggaatgtgcagggcagcagcaccccaggctatgatgacatcgccctgggcatcaccttcatgggcaccttcaccggcatccccccaaatgctgctgccctggaggccgcccaggacctgatccagtgtgccatggtgaagggctacctgacccccaactacctgctggtgggccacagtgatgtggcccggaccctgagccctggccaggccctgtacaacatcatcagcacctggccccacttcaagcactag

SEQ ID NO: 298586 - DNA, 1110 bp, Artificial Sequence
  derived and/or modified sequence
atgctgccctggctgctggtgttcagcgccctgggcatccaggcctggggcgacagcagctggaacaagactcaagcaaaacaggtcagcgaaggattacagtatttgtttgagaacatcagccagctcaccgagaaagacgtctcaaccacggtgtcaaggaaggcgtggggtgctgaagcagtcggctgcagtattcaattgacaacacctgtgaacgtgctggtgatccaccatgtacctggactggaatgccatgaccagaccgtttgctcacagaggctccgcgagcttcaggctcatcatgtccacaataactccggctgtgacgtcgcatataacttcctggttggcgacgatggtcgcgtgtacgagggagttggatggaacatccagggcgtgcatacccagggctataacaatatctcactgggattcgcattttttggtactaaaaaggggcatagtccttctcctgcagcattaagcgcaatggagaacttaattacatacgccgtccaaaaaggccatctgtccagcagttatgtacagcccctgctgggaaaaggcgaaaattgcctggcaccgcggcagaagacctcccttaagaaggcgtgcccaggggtcgtaccacgaagcgtctggggtgcgcgcgagactcactgtcccagaatgacattgccagccaaatatggcattatcatccatacagccggacgcacctgcaacatctcagatgaatgtcggctgctggtgcgcgatattcagtccttctacattgaccgcttgaaaagttgtgatattggatataacttcctggtgggccaagacggcgccatctacgaaggtgttggttggaacgtccaagggagcagcacacccggctacgacgacatcgcactcggaatcacgtttatggggacgttcactggaattcctccgaacgccgcggctctggaggcggcccaggatctgatccagtgtgcaatggttaaagggtacttgacaccgaactatctcctggtgggccactccgacgtcgctcgcacactgtctccaggtcaggccctgtacaatataatttccacatggccccactttaagcactag

SEQ ID NO: 298587 - RNA, 1110 nt, Artificial Sequence
  derived and/or modified sequence
auguuaccauggcuccugguuuuuagcgcacugggaauucaggccuggggggacuccucuuggaauaagacucaggcaaagcaggugucagaggguuugcaguacuuauuugagaauauuagucagcugaccgaaaaggacgugagcacaacagugagccguaaggccuggggggcggaggcuguggggugcucaauucagcucaccacccccguuaacguuuuggugauucaccauguuccgggccuugaaugucacgaccagacgguuugcucccagaggcuucgugagcugcaagcacaucauguucauaacaauucaggcugcgacguugccuauaauuuucucgugggggacgacggacggguuuaugaaggaguuggcuggaacauccaaggcgugcacacccagggcuauaacaauaucucauuaggcuuugccuucuucggaacgaaaaagggacauucucccucuccugccgcguugucugccauggaaaaccugauuacuuacgcuguccagaagggacaccuuaguuccagcuacgugcaaccccuacuaggaaaaggagaaaauugucuggccccacgucaaaagacgucucuuaaaaaggcaugccccggagucguucccagaaguguguggggugcuagagaaacacacuguccccgcaugacacucccggcuaaauauggaauuaucauacauaccgcaggccggacuuguaacauaagcgaugaaugcagacuccuggugagggacauucaaucuuucuacauagaccggcucaagucuugugauauuggauacaacuuucugguuggccaagauggugccauuuacgagggaguaggauggaauguucaggguucuucuacucccggcuacgacgacaucgccuuagggauaacuuuuauggguacauuuaccggcauuccgccuaaugccgcugcucuggaggccgcucaggauuuaauacaaugugcuaugguuaaggguuacuuaacuccuaacuaccuucuggugggacacucagacguggcuagaacacucaguccuggacaggcccuguacaacauaauuucaacuuggccgcacuucaagcacuag

SEQ ID NO: 298588 - RNA, 1110 nt, Artificial Sequence
  derived and/or modified sequence
augcugccauggcuccucguuuucucagcacucgggauacaggccuggggugacaguagcuggaauaagacacaggcaaaacagguauccgaaggccugcaguaccuguucgaaaauaucucucaguuaaccgagaaggacguaucaaccacugucaguagaaaggccuggggugccgaggccgugggaugcucuauacaguuaacaaccccagucaacguauuaguaauucaucacguacccggauuagaaugccaugaccaaacaguguguucccagagacucagggaacugcaggcccaucacgugcacaacaacuccggaugcgauguugcuuauaauuuccucgugggagacgacggcagaguuuaugagggcguaggauggaauauucagggcgugcacacacagggcuacaacaacauuucacugggguucgcauucuuuggaacuaaaaaggggcauagcccuagucccgccgcauuaagcgccauggaaaaccugauaaccuaugcuguacagaagggacaucuuuccucuuccuacguucagccgcuccugggcaaaggagaaaacugucuagcccccagacaaaaaacuucacucaagaaagccuguccugguguggugccacgcucgguuuggggagcaagagagacacacugcccgcggaugacacuccccgcaaaauauggcauuauaauucacacagcggggcgaaccuguaauaucucugaugagugucgccugcuuguccgugacauucaaaguuuuuacauagaccgacugaaauccugcgauauuggcuauaauuuucuggugggacaggauggugccauuuacgaaggagugggcuggaacguccaaggcucuaguacacccggcuacgacgauauagcacuugggauaaccuucaugggaaccuucacaggaaucccucccaacgccgcugcacuggaagcugcucaagaucugauucagugcgccaugguuaagggcuaucugaccccgaauuauuuacuggucggccacuccgaugucgcccggacucugucacccggccaggccuuguauaacauaaucuccaccuggccccauuucaaacauuag

SEQ ID NO: 298589 - protein, 116 aa, Artificial Sequence
  derived and/or modified sequence
MSFSEQQCKQPCVPPPCLPKTQEQCQAKAEEVCLPTCQHPCQDKCLVQAQEVCLSQCQESSQEKCPQQGQEPYLPPCQDQCPPQCAEPCQELFQTKCVEVCPQKVQEKCSSPGKGK

SEQ ID NO: 298590 - DNA, 1229 bp, Artificial Sequence
  derived and/or modified sequence
agtccacagcctttgttgagtcttgttgaagatcaggctctgcaaatcaccctaggatgtccttcagtgagcagcagtgcaagcagccatgtgtgccccctccatgcctcccaaagacccaggagcagtgccaagcaaaggctgaggaggtgtgcctccccacatgccagcacccctgccaagataagtgtctagtgcaggcccaggaggtatgtctttctcagtgccaggaatcaagtcaagaaaaatgcccacagcaaggccaagagccatacctacctccatgccaagaccagtgtccacctcagtgtgcagagccatgccaggagctattccagacaaaatgtgtggaggtttgcccacagaaagtccaggagaagtgctcatcccctggcaagggaaagtagctgctcatatgtcatctgggttcaagaagatggccagcagatgaaaccctgaccccagcccacgctctggtgaccttcttctgtgggtacctctgtgtgcaatgtaccttcttgcctcctggcttccttagcattccaggacttggtctgtgtctctgaagacagttctttctgtatttcatcaccctctgtgaataagcattgttctcagcagtctgatggaaggtctcaaatgtaggaatggtgtggttgtcagggaagaccacagaagcctagcacagcttccttggtgcaaaaattcacccagctctgggtgtgtaacagccaaggataccttcattcatctttcagagtttcaggctctcaaataagcctcaaaacaaactgaattctgatggactttccacttatcaccaccaccaccacctccaccaccaccaccaccacaggtgttgagacaaagcggcttgcggtgtttcaaaaatcaaaaatttggtgattttgtctctgtacactaaaaagaacagcaaattattgaactttgaaatgttggttgtgcttttttaaaatgaaccgaaagtatgtaaacgattgaatccaaacaaccagaagggaaagataagatggatgtttggtgcccttgtcaatctctgtgcttcatagctggtctaatgtgggcccttagttctcaccatgtacactctttagagatgtgatttgtgtctgtgtgatgcaggctggtctgttctccagcttccttgccttcttctccctggtgaaggtaaaatacataataaagctgatcctaaggctgatatctga

SEQ ID NO: 298591 - DNA, 351 bp, Artificial Sequence
  derived and/or modified sequence
atgagcttcagcgagcagcagtgcaagcagccctgcgtgccccccccctgcctgcccaagacccaggagcagtgccaggccaaggccgaggaggtgtgcctgcccacctgccagcacccctgccaggacaagtgcctggtgcaggcccaggaggtgtgcctgagccagtgccaggagagcagccaggagaagtgcccccagcagggccaggagccctacctgcccccctgccaggaccagtgccccccccagtgcgccgagccctgccaggagctgttccagaccaagtgcgtggaggtgtgcccccagaaggtgcaggagaagtgcagcagccccggcaagggcaagtag

SEQ ID NO: 298592 - DNA, 351 bp, Artificial Sequence
  derived and/or modified sequence
atgtccttcagtgagcagcagtgtaagcagccttgcgtaccacccccctgtctccctaaaacacaggaacagtgtcaggcaaaagccgaggaagtgtgtttacccacttgccaacacccatgccaagataaatgtctggtccaggcccaggaagtctgcctgtcacagtgtcaagagagctcccaggagaagtgcccacagcagggccaagaaccttatcttccgccatgccaggatcaatgccctccccagtgcgctgaaccatgtcaagagctgtttcaaaccaagtgcgttgaggtctgccctcagaaggtacaggaaaaatgttccagtccaggcaaggggaagtag

SEQ ID NO: 298593 - DNA, 351 bp, Artificial Sequence
  derived and/or modified sequence
atgtccttcagcgagcagcagtgcaagcagccctgtgtgcccccaccctgcctgcccaagacccaggagcagtgccaggccaaggccgaggaggtgtgcctgcccacctgccagcacccctgccaggacaagtgcctggtgcaggcccaggaggtgtgcctgagccagtgccaggagagcagccaggagaagtgcccccagcagggccaggagccctacctgcccccctgccaggaccagtgccccccccagtgtgccgagccctgccaggagctgttccagaccaagtgtgtggaggtgtgcccccagaaggtgcaggagaagtgcagcagccctgggaagggcaagtag

SEQ ID NO: 298594 - DNA, 351 bp, Artificial Sequence
  derived and/or modified sequence
atgagcttcagcgagcagcagtgcaagcagccctgcgtgccccccccttgcctgcccaaaacccaagaacagtgccaagccaaggccgaggaagtgtgcctgcccacctgtcagcatccctgtcaggacaagtgcttggtgcaggcacaggaagtgtgcctgtcacagtgtcaggagtcaagccaagagaagtgtccacagcagggccaagagccgtatcttcctccctgccaggatcagtgcccaccccagtgtgcggagccctgccaagaactgtttcagaccaagtgtgtcgaagtgtgcccccagaaagtgcaggaaaagtgttcgtcccccggaaaaggtaagtag

SEQ ID NO: 298595 - DNA, 351 bp, Artificial Sequence
  derived and/or modified sequence
atgagcttctctgagcagcaatgcaaacagccttgcgtcccaccgccttgccttcccaagacacaggaacagtgtcaggctaaggcagaagaagtctgcctgcccacgtgtcagcatccctgccaggacaaatgccttgtccaggcacaggaggtctgcttgtcacagtgtcaggaaagttcccaggagaaatgcccacagcaaggacaggagccctacctgcccccttgtcaggatcaatgtccccctcagtgtgctgagccatgccaagaactgtttcagaccaagtgtgtcgaggtctgcccacagaaggtgcaagagaagtgttcttccccaggaaaggggaagtag

SEQ ID NO: 298596 - DNA, 630 bp, Artificial Sequence
  derived and/or modified sequence
atggagtccacggcatacccgttaaacctgagtctaaaagaggaagaggaagaagaggagattcaaagtagggaactggaggacggacctgccgacatgcagaaggtccgcatttgttcagagggtgggtgggttccagccctctttgatgaggtggcaatttatttcagcgacgaagaatgggaggtgctgacagagcagcaaaaagctctgtatagagaggtgatgagaatgaattacgagaccgtgctgtctttagagttccccttcccgaagccagatatgatcaccagactggagggggaagaggagtctcagaacagcgacgagtggcagcttcagggtggaacatcggctgaaaacgaggaatccgacgtcaaacctcccgactggccaaaccctatgaatgctacaagtcaattccctcagccgcaacactttgattcattcggtctgcgcctcccacgagacataactgagttacccgagtggagcgaggggtatcccttttacatggccatggggttccccggatacgacctgagtgctgatgatatcgctggtaaattccagttttcccgaggtatgaggaggtcttacgacgcgggttttaaactcatggtcgtctag

SEQ ID NO: 298597 - DNA, 954 bp, Artificial Sequence
  derived and/or modified sequence
tccgggccggaccctccctcctcccaccacgtgtcctccccgctccctcccgaggggccgcgcgcacgggaggacggagaggcggaaaggatggcgctgtgacagccgggccggagccctcgcgtccccaccccgcgccctggccgctgggcccggcggtgagtgcgcgcgggcgggggcggcggcggcgcggcccctcccccgggtcccgggcggctgggccgcggcagaggcgggggcgccgaggctgcgccgccgccgccgccgcctttgttgcgggcccgccggggaggcgggcggcgccggctctcgccgcccggcagagatggagtccacagcctaccctctcaatttgagcctgaaagaagaggaagaggaagaagagattcagagccgggaactagaggacggcccggcagacatgcagaaagtacgaatctgctctgagggcggatgggtaccggccctatttgatgaggtggccatatatttttccgatgaggaatgggaagttttgacggagcaacaaaaggccctctaccgggaagtcatgaggatgaattatgaaactgtcctgtccctggaattcccattccctaagccagacatgatcacccgtttggaaggggaggaggagtctcagaattctgacgagtggcagctccaaggaggcacctctgcagaaaatgaagaatctgacgtaaagcctccagactggccaaacccaatgaatgctacctcccagtttcctcagcctcagcactttgacagctttggcctccgtctgcctcgggatatcacagagctgcccgagtggagtgaggggtaccccttctacatggccatgggcttcccagggtatgacctctcggctgatgacatagctgggaagtttcagttcagccggggcatgcgccgcagttacgacgcagggttcaagctgatggtagtgga

SEQ ID NO: 298598 - DNA, 630 bp, Artificial Sequence
  derived and/or modified sequence
atggagagcacagcctaccccctgaacctgagcctgaaggaggaggaggaggaggaggagatccagagccgggagctggaggatggccctgctgacatgcagaaggtgcgcatctgcagcgagggcggctgggtgcctgccctgtttgatgaggtggccatctacttcagtgatgaggagtgggaggtgctgacagagcagcagaaggccctgtaccgggaggtgatgaggatgaactatgagaccgtgctgagcctggagttccccttccccaagccagacatgatcacccggctggagggggaggaggagagccagaacagtgatgagtggcagctgcagggcggcaccagcgcagaaaatgaggagagtgatgtgaagcccccagactggcccaaccccatgaatgccaccagccagttcccccagccccagcactttgacagctttggcctgcggctgccccgggacatcacagagctgcctgagtggagcgagggctaccccttctacatggccatgggcttccctggctatgacctgtctgcagatgacattgctgggaagttccagttcagccggggcatgagaagaagctatgatgctggcttcaagctgatggtggtgtag

SEQ ID NO: 298599 - DNA, 630 bp, Artificial Sequence
  derived and/or modified sequence
atggagagcaccgcctaccccctgaacctgagcctgaaggaggaggaggaagaggaagagatccaaagccgggaactggaagatggcccggccgacatgcagaaggtgcggatctgcagcgagggcgggtgggtccctgcactgtttgacgaagtggccatttatttctcagacgaagagtgggaagtgttaaccgagcagcagaaagccttgtacagagaggtgatgagaatgaattatgaaaccgtgctttccctcgaattcccgttccccaagcctgacatgatcacccgtctggagggggaggaggagtcacagaacagtgatgagtggcagctgcagggaggcaccagcgctgagaacgaggagtccgatgtgaaaccaccagattggccaaatcccatgaatgctacatcccagtttccacagcctcagcacttcgactcattcggcctccgtcttcctcgggatatcaccgagctgcctgaatggtcagagggttacccattctacatggctatgggatttcctgggtacgacctaagtgccgacgatatcgcaggaaagtttcagttttcccgaggaatgaggagatcatacgacgctggctttaaacttatggtcgtttag

SEQ ID NO: 298600 - DNA, 630 bp, Artificial Sequence
  derived and/or modified sequence
atggagagcaccgcctatcctttgaacctgtctttaaaggaggaggaggaggaggaggaaattcagagtagagagctcgaggacgggccagcagacatgcagaaggtcaggatttgttcagaaggcggttgggttccagctctgttcgatgaagtggctatttactttagcgacgaggagtgggaagtgctaactgagcaacagaaagcactctacagagaggtgatgcgaatgaactatgagactgtgctttctctcgagttcccattcccgaagcccgatatgattactcgactggaaggagaggaggaatcacaaaactcagatgaatggcagctgcagggcggaacctccgctgagaacgaggaaagtgatgttaaaccgcctgactggcccaaccctatgaatgccacgagccaattcccccagcctcagcatttcgatagctttggtcttcgtctcccaagggatattactgagctgcccgagtggtccgaaggctacccattttatatggccatgggattcccgggatacgatctgagcgctgacgacattgcagggaagttccagttctctaggggcatgagaagatcatacgatgccggattcaagctgatggtggtttag

SEQ ID NO: 298601 - DNA, 630 bp, Artificial Sequence
  derived and/or modified sequence
atggagagcaccgcctaccccctgaacctgagcctgaaggaggaggaggaggaggaggagatccagagcagagagctggaggacggccccgccgacatgcagaaggtgagaatctgcagcgagggcggctgggtgcccgccctgttcgacgaggtggccatctacttcagcgacgaggagtgggaggtgctgaccgagcagcagaaggccctgtacagagaggtgatgagaatgaactacgagaccgtgctgagcctggagttccccttccccaagcccgacatgatcaccagactggagggcgaggaggagagccagaacagcgacgagtggcagctgcagggcggcaccagcgccgagaacgaggagagcgacgtgaagccccccgactggcccaaccccatgaacgccaccagccagttcccccagccccagcacttcgacagcttcggcctgagactgcccagagacatcaccgagctgcccgagtggagcgagggctaccccttctacatggccatgggcttccccggctacgacctgagcgccgacgacatcgccggcaagttccagttcagcagaggcatgagaagaagctacgacgccggcttcaagctgatggtggtgtag

SEQ ID NO: 298602 - protein, 154 aa, Artificial Sequence
  derived and/or modified sequence
MVQAHGGRSRAQPLTLSLGAAMTQPPPEKTPAKKHVRLQERRGSNVALMLDVRSLGAVEPICSVNTPREVTLHFLRTAGHPLTRWALQRQPPSPKQLEEEFLKIPSNFVSPEDLDIPGHASKDRYKTILPNPQSRVCLGRAQSQEDGDYINANY

SEQ ID NO: 298603 - protein, 140 aa, Artificial Sequence
  derived and/or modified sequence
MVQAHGGRSRAQPLTLSLGAAMTQPPPEKTPAKKHVRLQERRGSNVALMLDVRSLGAVEPICSVNTPREVTLHFLRTAGHPLTRWALQRQPPSPKQLEEEFLKIPSNFVSPEDLDIPGHASKDRYKTILPNPQSRVCLGR

SEQ ID NO: 298604 - DNA, 465 bp, Artificial Sequence
  derived and/or modified sequence
atggtgcaggctcatggggggcgcagcagagcacagcccttaaccctgagcctaggtgctgccatgacccagccgccaccagaaaaaactccggcaaaaaagcatgtcagactgcaagagaggagaggctcaaacgtagccttgatgctggatgtgaggagcttgggcgctgtggaacccatttgttctgtgaatacgcctagggaggtgaccttgcattttctgcgcacagcagggcatcccctgacccgttgggctctgcaaagacaacccccaagtcctaaacaacttgaggaagaattcctgaaaatcccttcaaactttgtaagccccgaagacctggacataccaggtcacgcctccaaagatcggtacaagaccattttacccaatccccagtccagagtgtgtctaggtcgggcccagtcacaagaggacggagattacatcaacgccaattattag

SEQ ID NO: 298605 - DNA, 423 bp, Artificial Sequence
  derived and/or modified sequence
atggtgcaagctcacggagggcggagtagggcacagccattaaccctgtctctcggagccgcgatgacacagcctccacccgagaagacccctgcaaagaagcacgtgagactccaggaaagaagggggagtaacgtggccctcatgcttgatgtccgcagtttgggtgccgttgagccgatctgctctgtgaacacccctcgggaggtgacactccactttctgcggacagctggccaccccctgacacgatgggccttgcagcggcagccccccagcccaaaacaactggaggaggagttcctgaagatccctagtaacttcgtttcacctgaagatctggacattccaggccatgcctcaaaagaccggtacaaaactattctgcccaacccccaatcgcgagtctgtctgggccggtag

SEQ ID NO: 298606 - DNA, 465 bp, Artificial Sequence
  derived and/or modified sequence
atggtgcaggcccatggaggccgcagccgggcccagcccctgaccctgagcctgggcgccgccatgacccagcccccacctgagaagaccccagccaagaagcacgtgcggctgcaggagcggcggggcagcaatgtggccctgatgctggatgtgcgcagcctgggcgctgtggagcccatctgcagcgtgaacaccccccgggaggtgaccctgcacttcctgaggacagctggccaccccctgacccgctgggccctgcagaggcagccccccagccccaagcagctggaggaggagttcctgaagatccccagcaactttgtgtccccagaggacctggacatccctggccacgccagcaaggaccgctacaagaccatcctgcccaacccccagagccgggtgtgcctgggccgggcccagagccaggaggatggagactacatcaatgccaactactag

SEQ ID NO: 298607 - DNA, 423 bp, Artificial Sequence
  derived and/or modified sequence
atggtgcaggcccatggaggccgcagccgggcccagcccctgaccctgagcctgggcgccgccatgacccagcccccacctgagaagaccccagccaagaagcacgtgcggctgcaggagcggcggggcagcaatgtggccctgatgctggatgtgcgcagcctgggcgctgtggagcccatctgcagcgtgaacaccccccgggaggtgaccctgcacttcctgaggacagctggccaccccctgacccgctgggccctgcagaggcagccccccagccccaagcagctggaggaggagttcctgaagatccccagcaactttgtgtccccagaggacctggacatccctggccacgccagcaaggaccgctacaagaccatcctgcccaacccccagagccgggtgtgcctgggccgctag

SEQ ID NO: 298608 - DNA, 465 bp, Artificial Sequence
  derived and/or modified sequence
atggtgcaggcccacggcggccggagccgggcccagcccctgaccctctcactcggtgccgccatgacccagccaccacctgaaaagacacccgctaaaaaacatgtgaggctacaggaaagacgaggcagtaacgtggctctgatgctggatgtgcggagcctcggtgcggtagaacctatatgcagcgtgaacacacccagggaagtgacactccattttcttagaacagccggccaccccctgactaggtgggctctacagaggcagcccccatctcctaagcagcttgaggaggagttcttgaagatcccttctaatttcgtgtcacccgaggacctagatattccgggtcacgctagtaaagaccgctacaagacaatcctgccaaacccccagtccagggtgtgtctggggagggcccagtcccaggaggacggtgactacatcaatgctaactactag

SEQ ID NO: 298609 - DNA, 423 bp, Artificial Sequence
  derived and/or modified sequence
atggtgcaggcccacggcggccggagccgggcccagcccctgaccttgtcactgggagcagcgatgacccagcctccgcccgaaaaaacgcccgccaagaagcatgtcagactgcaagagcgccgtgggtctaacgtagctttaatgctggatgtacgctccctgggggcagtcgaaccaatctgcagtgtgaacacgcctcgcgaagtcacactccacttcctgcgtaccgctggccaccccctaacaaggtgggccctacaacgacaacccccttccccaaagcagctggaggaggagtttctcaagataccctccaatttcgtaagtccggaagacctcgatatccctggccacgcctctaaagatcgatacaagactatcctgccaaatccccagtcacgggtctgtctggggcgatag

SEQ ID NO: 298610 - DNA, 465 bp, Artificial Sequence
  derived and/or modified sequence
atggtccaagcacatgggggaagaagccgagcccagcccttgactctgagcctaggcgctgctatgactcagccccctccagaaaagacccccgctaagaagcatgtgagactccaggaacgcagaggcagcaacgtcgccctgatgctcgacgtgagatcgctaggagccgtggaacctatatgctcagtgaatacgcctcgggaagtgactctgcatttcctgagaaccgcgggacaccctctgactcggtgggcactgcagcgccagcccccttcacccaaacagctggaggaagaattcctgaagatcccatctaattttgtatccccagaggatcttgacattcccggtcatgcctctaaggacagatataagacaatccttccaaaccctcagagtcgcgtctgtttagggcgtgctcagagccaagaggatggagattacattaacgctaactattag

SEQ ID NO: 298611 - DNA, 423 bp, Artificial Sequence
  derived and/or modified sequence
atggtacaggcccacggtgggagatcacgagctcagccccttactctctcactgggcgcagccatgacccagccaccccctgagaagacccccgcaaagaagcacgttcgcctgcaggagcggagaggaagtaatgtagcactgatgttagacgtgaggtccttgggggctgtcgaacccatctgttctgtgaacacgcctcgtgaggtaaccttacattttctgcgtactgccggacacccactcacccgctgggctttacagaggcaaccccctagtccaaaacaacttgaggaggagtttctgaagataccatctaacttcgtgagccccgaggatctcgacatccccggacatgcaagtaaggatcgttacaaaaccatcctgccaaatcctcagagtagagtctgcctcggacgatag

SEQ ID NO: 298612 - DNA, 542 bp, Artificial Sequence
  derived and/or modified sequence
aaagacagaccgacagacagacagacagctggcaagaggcagcctgggggccacagctgcttcacaccccacctcagcatggtccaagcccatggggggcgctccagagcacagccgttgaccttgtctttgggggcagccatgacccagcctccgcctgaaaaaacgccagccaagaagcatgtgcgactgcaggagaggcggggctccaatgtggctctgatgctggacgttcggtccctgggggccgtagaacccatctgctctgtgaacacaccccgggaggtcaccctacactttctgcgcactgctggacacccccttacccgctgggcccttcagcgccagccacccagccccaagcaactggaagaagaattcttgaagatcccttcaaactttgtcagccccgaagacctggacatccctggccacgcctccaaggaccgatacaagaccatcttgccaaatccccagagccgtgtctgtctaggccgggcacagagccaggaggacggagattacatcaatgccaactacat

SEQ ID NO: 298613 - DNA, 551 bp, Artificial Sequence
  derived and/or modified sequence
aaagacagaccgacagacagacagacagctggcaagaggcagcctgggggccacagctgcttcaggccctgtctttcaggcagacctcatggctgagtgagcctcccctgggcccagcaccccacctcagcatggtccaagcccatggggggcgctccagagcacagccgttgaccttgtctttgggggcagccatgacccagcctccgcctgaaaaaacgccagccaagaagcatgtgcgactgcaggagaggcggggctccaatgtggctctgatgctggacgttcggtccctgggggccgtagaacccatctgctctgtgaacacaccccgggaggtcaccctacactttctgcgcactgctggacacccccttacccgctgggcccttcagcgccagccacccagccccaagcaactggaagaagaattcttgaagatcccttcaaactttgtcagccccgaagacctggacatccctggccacgcctccaaggaccgatacaagaccatcttgccaaatccccagagccgtgtctgtctaggccgg

SEQ ID NO: 298614 - DNA, 465 bp, Artificial Sequence
  derived and/or modified sequence
atggtgcaggcccacggcggcagaagcagagcccagcccctgaccctgagcctgggcgccgccatgacccagcccccccccgagaagacccccgccaagaagcacgtgagactgcaggagagaagaggcagcaacgtggccctgatgctggacgtgagaagcctgggcgccgtggagcccatctgcagcgtgaacacccccagagaggtgaccctgcacttcctgagaaccgccggccaccccctgaccagatgggccctgcagagacagccccccagccccaagcagctggaggaggagttcctgaagatccccagcaacttcgtgagccccgaggacctggacatccccggccacgccagcaaggacagatacaagaccatcctgcccaacccccagagcagagtgtgcctgggcagagcccagagccaggaggacggcgactacatcaacgccaactactag

SEQ ID NO: 298615 - DNA, 423 bp, Artificial Sequence
  derived and/or modified sequence
atggtgcaggcccacggcggcagaagcagagcccagcccctgaccctgagcctgggcgccgccatgacccagcccccccccgagaagacccccgccaagaagcacgtgagactgcaggagagaagaggcagcaacgtggccctgatgctggacgtgagaagcctgggcgccgtggagcccatctgcagcgtgaacacccccagagaggtgaccctgcacttcctgagaaccgccggccaccccctgaccagatgggccctgcagagacagccccccagccccaagcagctggaggaggagttcctgaagatccccagcaacttcgtgagccccgaggacctggacatccccggccacgccagcaaggacagatacaagaccatcctgcccaacccccagagcagagtgtgcctgggcagatag

SEQ ID NO: 298616 - protein, 509 aa, Artificial Sequence
  derived and/or modified sequence
MNENKDTDSKKSEEYEDDFEKDLEWLINENEKSDASIIEMACEKEENINQDLKENETVMEHTKRHSDPDKSLQDEVSPRRNDIISVPGIQPLDPISDSDSENSFQESKLESQKDLEEEEDEEVRRYIMEKIVQANKLLQNQEPVNDKRERKLKFKDQLVDLEVPPLEDTTTFKNYFENERNMFGKLSQLCISNDFGQEDVLLSLTNGSCEENKDRTILVERDGKFELLNLQDIASQGFLPPINNANSTENDPQQLLPRSSNSSVSGTKKEDSTAKIHAVTHSSTGEPLAYIAQPPLNRKTCPSSAVNSDRSKGNGKSNHRTQSAHISPVTSTYCLSPRQKELQKQLEEKREKLKREEERRKIEEEKEKKRENDIVFKAWLQKKREQVLEMRRIQRAKEIEDMNSRQENRDPQQAFRLWLKKKHEEQMKERQTEELRKQEECLFFLKGTEGRERAFKQWLRRKRMEKMAEQQAVRERTRQLRLEAKRSKQLQHHLYMSEAKPFRFTDHYN

SEQ ID NO: 298617 - protein, 356 aa, Artificial Sequence
  derived and/or modified sequence
MNENKDTDSKKSEEYEDDFEKDLEWLINENEKSDASIIEMACEKEENINQDLKENETVMEHTKRHSDPDKSLQDEVSPRRNDIISVPGIQPLDPISDSDSENSFQESKLESQKDLEEEEDEEVRRYIMEKIVQANKLLQNQEPVNDKRERKLKFKDQLVDLEVPPLEDTTTFKNYFENERNMFGKLSQLCISNDFGQEDVLLSLTNGSCEENKDRTILVERDGKFELLNLQDIASQGFLPPINNANSTENDPQQLLPRSSNSSVSGTKKEDSTAKIHAVTHSSTGEPLAYIAQPPLNRKTCPSSAVNSDRSKGNGKSNHRTQSAHISPVTSTYCLSPRQKELQKQLEEKREKLKRE

SEQ ID NO: 298618 - DNA, 1530 bp, Artificial Sequence
  derived and/or modified sequence
atgaacgagaacaaggacaccgacagcaagaagagcgaggagtacgaggacgacttcgagaaggacctggagtggctgatcaacgagaacgagaagagcgacgccagcatcatcgagatggcctgcgagaaggaggagaacatcaaccaggacctgaaggagaacgagaccgtgatggagcacaccaagagacacagcgaccccgacaagagcctgcaggacgaggtgagccccagaagaaacgacatcatcagcgtgcccggcatccagcccctggaccccatcagcgacagcgacagcgagaacagcttccaggagagcaagctggagagccagaaggacctggaggaggaggaggacgaggaggtgagaagatacatcatggagaagatcgtgcaggccaacaagctgctgcagaaccaggagcccgtgaacgacaagagagagagaaagctgaagttcaaggaccagctggtggacctggaggtgccccccctggaggacaccaccaccttcaagaactacttcgagaacgagagaaacatgttcggcaagctgagccagctgtgcatcagcaacgacttcggccaggaggacgtgctgctgagcctgaccaacggcagctgcgaggagaacaaggacagaaccatcctggtggagagagacggcaagttcgagctgctgaacctgcaggacatcgccagccagggcttcctgccccccatcaacaacgccaacagcaccgagaacgacccccagcagctgctgcccagaagcagcaacagcagcgtgagcggcaccaagaaggaggacagcaccgccaagatccacgccgtgacccacagcagcaccggcgagcccctggcctacatcgcccagccccccctgaacagaaagacctgccccagcagcgccgtgaacagcgacagaagcaagggcaacggcaagagcaaccacagaacccagagcgcccacatcagccccgtgaccagcacctactgcctgagccccagacagaaggagctgcagaagcagctggaggagaagagagagaagctgaagagagaggaggagagaagaaagatcgaggaggagaaggagaagaagagagagaacgacatcgtgttcaaggcctggctgcagaagaagagagagcaggtgctggagatgagaagaatccagagagccaaggagatcgaggacatgaacagcagacaggagaacagagacccccagcaggccttcagactgtggctgaagaagaagcacgaggagcagatgaaggagagacagaccgaggagctgagaaagcaggaggagtgcctgttcttcctgaagggcaccgagggcagagagagagccttcaagcagtggctgagaagaaagagaatggagaagatggccgagcagcaggccgtgagagagagaaccagacagctgagactggaggccaagagaagcaagcagctgcagcaccacctgtacatgagcgaggccaagcccttcagattcaccgaccactacaactag

SEQ ID NO: 298619 - DNA, 1530 bp, Artificial Sequence
  derived and/or modified sequence
atgaacgagaataaggacactgacagcaaaaagtctgaggagtatgaggatgattttgaaaaagatttagagtggctcattaacgaaaacgagaaatctgacgccagtatcattgaaatggcttgtgagaaagaggagaatatcaaccaggatctcaaagaaaatgaaaccgttatggaacataccaagaggcactcagaccctgacaagtctctccaggacgaagtgtctccacggagaaatgacatcatatccgtgcctggaattcaacccctcgatcccatctctgatagcgactcagaaaattcattccaggaaagtaaactggaatctcagaaagacctggaggaggaagaagacgaggaagtgcgacgctatatcatggaaaaaatcgttcaggccaataagctactccagaaccaggagccagtgaatgataagcgcgaacgcaaattgaaatttaaggatcagctagtcgatttggaggtgcctcccctggaagataccacaaccttcaagaactatttcgaaaacgaaagaaacatgttcggcaaattatctcagctctgtatttcaaacgattttggccaggaagacgtgttgctgagcctcactaacggctcgtgtgaagaaaataaggacagaacaatcttagttgaaagagatggaaagttcgaattgctgaacctgcaggatatcgcgtcgcagggtttcctgccacctatcaataacgcgaatagtaccgagaacgatccgcagcagctgttgccaagaagttcaaattctagcgtttcaggaaccaagaaagaggattccacggccaagatccatgccgtaacgcatagtagtactggagagcctctggcttacatagcacaaccacccctgaacagaaaaacttgcccatccagcgccgtgaacagcgatagaagcaaaggcaacggcaagagcaaccatcgaactcagtcagctcacatttcccctgtcactagtacatattgtttgtcccctcggcagaaggagctgcaaaagcaactggaagagaagcgtgagaagctcaaacgagaggaagaacggagaaaaatcgaagaggagaaagaaaaaaaacgcgaaaatgatattgtcttcaaagcctggttgcagaagaagagagagcaagtcctggagatgcgtcggatccagagagcaaaagagatcgaggatatgaattctcgacaggaaaacagagaccctcagcaggccttcaggctgtggctgaagaagaagcacgaagaacaaatgaaggaaagacagaccgaggaactgcgtaaacaggaggagtgtctgttctttctaaaagggactgaaggtagagaacgcgcctttaaacagtggcttagacggaagcggatggaaaaaatggctgagcaacaggcagtgcgagaaaggacccggcagttacggctggaggccaaacggtctaaacagctccagcatcatctgtacatgagcgaagcaaaaccattccgctttaccgaccactacaactag

SEQ ID NO: 298620 - DNA, 1530 bp, Artificial Sequence
  derived and/or modified sequence
atgaatgaaaacaaggacacagacagcaagaagtctgaggagtatgaagatgactttgagaaggacctggagtggctgatcaatgaaaatgagaagagtgatgccagcatcatcgagatggcctgtgagaaggaggagaacatcaaccaggacctgaaggaaaatgaaacagtgatggagcacaccaagaggcacagcgaccctgacaagagcctgcaggatgaggtgagccccaggagaaatgacatcatctctgtgcccggcatccagcccctggaccccatcagtgacagcgacagtgaaaattccttccaggagagcaagctggagagccagaaggacctggaggaggaggaggatgaggaggtgcggcgctacatcatggagaagatcgtgcaggccaacaagctgctgcagaaccaggagcctgtgaatgacaagcgggagaggaagctgaagttcaaggaccagctggtggacctggaggtgccccccctggaggacaccaccaccttcaagaactactttgaaaatgaaagaaacatgtttgggaagctgagccagctgtgcatcagcaatgactttggccaggaggatgtgctgctgagcctgaccaacggcagctgtgaggagaacaaggacaggaccatcctggtggagagagatggcaagtttgagctgctgaacctgcaggacatcgccagccagggcttcctgccccccatcaacaatgccaacagcacagaaaatgacccccagcagctgctgcccaggagcagcaacagctctgtgtctggcaccaagaaggaggacagcacagccaagatccatgctgtgacccacagcagcactggagagcccctggcctacatcgcccagccccccctgaacaggaagacctgccccagcagcgctgtgaacagcgacaggagcaaaggaaatggcaagagcaaccacaggacccagagcgcccacatcagccctgtgaccagcacctactgcctgagcccccggcagaaggagctgcagaagcagctggaggagaagcgggagaagctgaagcgggaggaggagaggaggaagattgaggaggagaaggagaagaagagagaaaatgacatcgtgttcaaggcctggctgcagaagaagcgggagcaggtgctggagatgaggcgcatccagagggccaaggagattgaggacatgaacagccggcaggagaacagagacccccagcaggccttccggctgtggctgaagaagaagcatgaggagcagatgaaggagcggcagacagaggagctgaggaagcaggaggagtgcctcttcttcctgaagggcacagagggccgggagcgggccttcaagcagtggctgcggaggaagaggatggagaagatggccgagcagcaggccgtgcgggagaggacccggcagctgcggctggaggccaagaggagcaagcagctgcagcaccacctgtacatgtctgaggccaagcccttccgcttcacagaccactacaactag

SEQ ID NO: 298621 - DNA, 1530 bp, Artificial Sequence
  derived and/or modified sequence
atgaacgagaacaaggacaccgacagcaagaagagcgaggagtacgaggacgattttgaaaaggatcttgagtggctgataaatgagaacgaaaaatccgatgctagtatcatagaaatggcctgcgagaaggaggagaatataaatcaggacctcaaggaaaacgaaactgttatggaacataccaagagacacagtgacccagataaatcccttcaggacgaagtgtctccaaggcgcaacgatattatctccgtgccaggaatccaaccccttgaccctattagcgattctgatagcgaaaactcattccaggaaagcaagctggagtctcagaaggacctggaagaagaggaagacgaggaggtgcgaaggtatatcatggagaagattgtgcaggcgaacaagctcctccagaatcaggagccagttaatgataagcgggaacgtaagctcaaattcaaggatcagctagtcgatctggaggtccccccactcgaggacactacaacatttaagaactactttgagaacgaaagaaacatgtttggcaagctgtcacagctgtgtatcagtaacgatttcggacaggaggatgtgctgcttagcctgactaatgggtcatgtgaggaaaataaagatcggactattcttgtggagcgagacggaaagttcgagctgctgaacctccaggatattgcatcccaggggttcctaccaccaattaataatgccaattccactgagaatgatccccagcagctgctgcctaggtcatctaatagttctgtgtccggcacaaagaaggaggatagcactgcaaaaattcacgccgtgacacactcgagtaccggagagcccctagcttacattgcacagccacctctaaatcgcaaaacttgtcctagcagtgccgtgaactctgacagaagtaaggggaatgggaagagcaaccacaggacacagagcgctcatattagtccagtgacctcaacttactgtctgagccccaggcagaaggagctgcagaaacagttggaggaaaaaagagagaagttgaagcgagaagaggagcgcaggaagattgaagaagagaaagagaagaagcgcgagaacgacatcgtatttaaagcgtggttacaaaagaaaagggaacaggttcttgaaatgagacgcatccagagggccaaagagatcgaggacatgaattcaaggcaagaaaatcgtgaccctcagcaggctttcaggctttggctgaagaaaaaacacgaagaacaaatgaaggagaggcagaccgaggagctgcgcaagcaggaggagtgtctgtttttcctcaagggcactgagggcagagagagggctttcaagcaatggctgcgccggaaacgcatggagaaaatggcagaacaacaggctgttcgcgaacgcacacggcagctgagactggaagcgaaacggagcaaacaattgcagcatcatctatacatgtccgaagccaaaccttttcggtttacagaccactataattag

SEQ ID NO: 298622 - DNA, 1530 bp, Artificial Sequence
  derived and/or modified sequence
atgaacgaaaacaaagatacagactccaagaaatcagaggaatacgaggatgatttcgagaaggacctcgagtggctgattaatgagaatgagaagtctgatgcatccatcatagagatggcttgtgagaaggaggagaatataaatcaagatcttaaggagaacgaaaccgttatggagcacaccaaacgccactctgacccggacaagtccctccaggacgaggtaagtcctcggaggaatgatatcattagtgtcccgggaattcaaccactggatccaatctccgacagcgactcagaaaactcttttcaggagtccaaattggagtctcagaaggacctcgaggaggaggaagacgaggaggtgcgcagatacattatggaaaaaatagtgcaggctaacaaactgctgcaaaaccaggagcctgtgaatgataagagggagcgtaaattaaaattcaaggaccaacttgtagatctggaggttccccctcttgaggatactaccacctttaagaattatttcgagaacgagcgcaatatgttcggaaagctgagccagttatgcatcagtaatgactttggacaggaagatgtcctgctttctttgacaaacggatcttgcgaagaaaataaagataggacaatcctagtggagcgggacggcaagttcgagctgctcaatctgcaagatattgccagccaggggttcttgccaccaatcaataacgccaattccacagaaaacgacccccagcagttgctaccacggagcagcaacagcagcgtttctggcacaaagaaggaagattcaaccgccaaaatccatgcagtgactcattcatctacaggagagcctctcgcttacatagcccaaccaccgctaaacagaaaaacctgcccatcgtctgcagtgaatagtgaccgtagcaaggggaatggtaagtctaaccataggacacagtccgcgcacattagcccagtgacctctacctactgcctttccccacgacagaaagaactgcaaaagcagcttgaggaaaagcgagagaagctcaagcgtgaagaagagagaaggaagattgaggaggagaaggagaaaaagcgggagaacgacattgtatttaaagcttggctccagaaaaaaagagaacaggtgcttgagatgaggcggatacagcgagcaaaagaaatcgaggacatgaacagtcgccaggaaaatagggatccgcagcaggctttcaggctctggctaaagaagaaacatgaagagcagatgaaggaacgtcagacagaagaactgaggaagcaggaagagtgcctattcttcctgaaggggaccgagggacgagagcgcgcattcaagcagtggctgaggagaaaacgtatggaaaagatggccgaacagcaggcagttagagagagaacccggcaactgagactcgaagctaagcggtcaaagcagctccagcatcacctctatatgtccgaggccaagccattcagattcactgaccactataactag

SEQ ID NO: 298623 - DNA, 1860 bp, Artificial Sequence
  derived and/or modified sequence
agtgtggtcctggctgccgcggaggcaggtgccggggtctcctttgcctcaatgtgaagagcttagaaagaggaggagaggagaactcccccggccatctctgtgatcccagccgccgcattttacacagcatatttccttcacaaacagaaaatgaatgaaaataaagatactgattcaaagaaaagtgaagaatacgaagatgactttgaaaaggacctggagtggttaattaatgaaaatgaaaaaagtgatgccagcataatagagatggcttgtgagaaggaagagaatattaaccaagacttaaaagagaatgagacagtaatggagcacaccaaacggcattctgatcctgacaaatctttgcaggatgaggtctcaccaagaagaaatgacatcatttctgtaccaggtattcaacctttggatcccatatcagattcagatagtgaaaactctttccaggaatccaaactagaaagccagaaagacttggaggaggaagaggatgaggaagtaaggagatatattatggagaaaattgtacaagctaacaagcttctacagaatcaagaaccggtgaatgataaaagggagcgaaaacttaagttcaaggaccagttagttgatttggaagttcctccactagaagacactactacttttaaaaattattttgaaaacgaaaggaatatgtttgggaaactgtcacaattatgtatttccaatgattttggacaagaagatgtgctcctgtcacttactaatggaagctgtgaagaaaacaaggataggacaatactggtagagagagatggaaaatttgaacttctgaatttacaagacattgccagtcaggggtttttgcctcccattaataatgcaaatagtacagaaaatgaccctcagcagttgttacccagatcttccaactcctctgtcagtggcaccaagaaagaagattctacagcaaagattcatgctgtcactcactcatcaacaggagagccgctggcttatatcgctcagccaccactcaaccgcaagacttgtccaagctctgctgtcaactcagatcgaagtaaagggaatgggaaatctaatcacaggacacagtctgcacatatctcaccagtgacttcaacatactgtctttcccctcgacagaaagaactacaaaaacaactagaagaaaagagagaaaaactgaaaagagaggaagagcgacgaaaaatagaagaagagaaagaaaaaaagagagagaatgacatagtatttaaagcgtggttgcaaaagaaaagagagcaggtcttagaaatgaggagaattcagcgagcaaaggaaattgaagacatgaacagtagacaggaaaacagagatccacaacaagcttttcgattatggcttaaaaaaaagcacgaagagcagatgaaagaaagacagacagaagaactaagaaagcaagaggaatgtttattcttccttaaaggaacagaaggccgggaaagggcctttaaacaatggttaagaaggaaacggatggaaaaaatggcagagcaacaagctgtcagagagagaactagacagctccgactagaagctaagcgttctaaacagttacagcaccacctatatatgtcagaagccaaaccttttcgttttactgatcattataactgaaagtttctattaaatatttcagtgggcagctgctatcaaaattttggatatgatttcttagggtctgtgtactttggttgtattctaaattatggaaatggtatttatcttttattgacagtgaatttgtttttttaatactagaacaaaataaatttttttctcacagtgttgtaa

SEQ ID NO: 298624 - DNA, 3338 bp, Artificial Sequence
  derived and/or modified sequence
gcaggggccagacccggacggctccagagcctccagagcctccgggtctgggcggcgcttcggctcctcccgagccgcctgctagccccgcgccgcactccatccccacaggctggggacgggcccggtgcggctgtgtgggttcgggagcggagttgcagaatccaaggacccattttgttctttctccgcactgctttatgggaggcattatggcccccaaagacataatgacaaatactcatgctaaatccatcctcaattcaatgaactccctcaggaagagcaataccctctgtgatgtgacattgagagtagagcagaaagacttccctgcccatcggattgtgctggctgcctgtagtgattacttctgtgccatgttcactagtgagctctcagagaaggggaaaccttatgttgacatccaaggtttgactgcctctaccatggaaattttattggactttgtgtacacagaaacggtacatgtgacagtggagaatgtacaagaactgcttcctgcagcctgtctgcttcagttgaaaggtgtgaaacaagcctgctgtgagttcttagaaagtcagttggacccttctaattgcctgggtattagggattttgctgaaacccacaattgtgttgacctgatgcaagcagctgaggtttttagccagaagcattttcctgaagtggtacagcatgaagagttcattcttctgagtcaaggagaggtggaaaagctaatcaagtgcgacgaaattcaggtggattctgaagagccagtctttgaggctgtcatcaactgggtgaagcatgccaagaaagagcgggaagaatccttgcctaacctgctacagtatgtgcggatgcccctactaacccccaggtatatcacagatgtaatagatgctgagcctttcatccgctgtagtttacaatgcagggatctggttgatgaagcaaagaagtttcatctgaggcctgaacttcggagtcagatgcagggacccaggacaagggctcgcctaggagccaatgaagtgcttttggtggttgggggctttggaagccagcagtctcccattgatgtggtagagaaatatgaccccaagactcaggagtggagctttttgccaagcatcactcgtaagagacgttatgtggcctcagtgtcccttcatgaccggatctacgtcattggtggctatgatggccgttcccgccttagttcagtggaatgtctagactacacagcagatgaggatggggtctggtattctgtggcccctatgaatgtccgacgaggtcttgctggagccaccaccctgggagatatgatctatgtctctggaggctttgatggaagcaggcgtcacaccagtatggagcgctatgatccaaacattgaccagtggagcatgctgggggatatgcagacagcccgggaaggtgccggactcgtagtggccagtggagtgatctactgtctaggaggatatgacggcttgaatatcttaaattcagttgagaaatacgaccctcatacaggacattggactaatgttacaccaatggccaccaagcgttctggtgcaggagtagccctgctgaatgaccatatttatgtggtggggggatttgatggtacagcccacctttcttccgttgaagcatacaacattcgcactgattcctggacaactgtcaccagtatgaccactccacgatgctatgtaggggccacagtgcttcgggggagactctatgcaattgcaggatatgatggtaattccctgctaagtagcattgaatgttatgaccctatcatcgacagctgggaagtcgtgacatccatgggaacccagcgctgtgatgctggtgtttgtgttctccgcgagaagtgaccattgttggagcaccatccagagctagtgaccagtccagtggacagttagtgggagtatcaaaaatcctttccagaatgtctgtttctcactatgtgcaccgggtgattacaggcaccagtgcagtgatgattgtacttatttgacacatactccccgtcgtcctggttcttgttcctgagaagggtgggtaacagatattccaggaaaaagaatgcacattgaatggatgtgagagaccacattgcctctcccactgctttggggagcactttcctgtcatttctaacttaccacatgcttggtgtactatatgtacgttgtgcctcatatgttgcaaagaactaaggtgagtatagcctactagatatgggcaatatccagcctagatgattggaaagataccagtttaagtaaacttggtaaaatccaagtctttttttttttttccaggaacaactacattttctcatatacaggtagctaggggcaacacagttccattctagagggaaacaaaagggagagccccacaaaactttggggacaagggagagagagactcatctgacacttcttttggaggtcaggatttgtatatcagaattgaagttagaattaagtgaattaaactgaatttgattgtgagtgaacctagaacagcactgaagtattacataacctggaagactgagaagggtatattatttgaaggatctttttatttccccgaggtctttcgcactggagacagcataaaagagtgaacaaatgttgggatgagagaagatgacatcaatgtgggagttcagtataactggggataaactagaagaacctgtgattttacagtcatcttattacctgccagggctcatctagccatggcaatgtttgccttgaatgggggtgaaagcctttctttgttggatcaaatactactacactattacacttccacactatttatttggggatgggctgggagtgacagtagcctagtagttcagctacctgattactgccccattcttttagaagcacatgtctgccaaggagtggtttgtactgctgtgtttggtacatctagtcttttttctgctataagttttccttacctgtcctttagtgtagattttattcatcacaggacagaataatcaaggacaaccaaaatccttttgttagtttcagtacctcagctatcaacatttctgagctaccattcaatgttcctctgtgtcatggagtgaaattcttgttttgtgggtattaggagtgtgggaatgtgataacctaaacaacctttgctctgaaattccatttttccctctttccctgagttgtattgacctacagagttaatttcctttgtatttttttaagaaaatattaaaaatcaacggtctcaaatgccgagagtttgtggct

SEQ ID NO: 298625 - DNA, 3359 bp, Artificial Sequence
  derived and/or modified sequence
gtcatcacgtcgcgcggccgcaggggccagacccggacggctccagagcctccagagcctccgggtctgggcggcgcttcggctcctcccgagccgcctgctagccccgcgccgcactccatccccacaggctggggacgggcccggtgcggctgtgtgggttcgggagcggagttgcagaatccaaggacccattttgttctttctccgcactgctttatgggaggcattatggcccccaaagacataatgacaaatactcatgctaaatccatcctcaattcaatgaactccctcaggaagagcaataccctctgtgatgtgacattgagagtagagcagaaagacttccctgcccatcggattgtgctggctgcctgtagtgattacttctgtgccatgttcactagtgagctctcagagaaggggaaaccttatgttgacatccaaggtttgactgcctctaccatggaaattttattggactttgtgtacacagaaacagtacatgtgacagtggagaatgtacaagaactgcttcctgcagcctgtctgcttcagttgaaaggtgtgaaacaagcctgctgtgagttcttagaaagtcagttggacccttctaattgcctgggtattagggattttgctgaaacccacaattgtgttgacctgatgcaagcagctgaggtttttagccagaagcattttcctgaagtggtacagcatgaagagttcattcttctgagtcaaggagaggtggaaaagctaatcaagtgcgacgaaattcaggtggattctgaagagccagtctttgaggctgtcatcaactgggtgaagcatgccaagaaagagcgggaagaatccttgcctaacctgctacagtatgtgcggatgcccctactaacccccaggtatatcacagatgtaatagatgctgagcctttcatccgctgtagtttacaatgcagggatctggttgatgaagcaaagaagtttcatctgaggcctgaacttcggagtcagatgcagggacccaggacaagggctcgcctaggagccaatgaagtgcttttggtggttgggggctttggaagccagcagtctcccattgatgtggtagagaaatatgaccccaagactcaggagtggagctttttgccaagcatcactcgtaagagacgttatgtggcctcagtgtcccttcatgaccggatctacgtcattggtggctatgatggccgttcccgccttagttcagtggaatgtctagactacacagcagatgaggatggggtctggtattctgtggcccctatgaatgtccgacgaggtcttgctggagccaccaccctgggagatatgatctatgtctctggaggctttgatggaagcaggcgtcacaccagtatggagcgctatgatccaaacattgaccagtggagcatgctgggagatatgcagacagcccgggaaggtgccggactcgtagtggccagtggagtgatctactgtctaggaggatatgacggcttgaatatcttaaattcagttgagaaatacgaccctcatacaggacattggactaatgttacaccaatggccaccaagcgttctggtgcaggagtagccctgctgaatgaccatatttatgtggtggggggatttgatggtacagcccacctttcttccgttgaagcatacaacattcgcactgattcctggacaactgtcaccagtatgaccactccacgatgctatgtaggggccacagtgcttcgggggagactctatgcaattgcaggatatgatggtaattccctgctaagtagcattgaatgttatgaccctatcatcgacagctgggaagtcgtgacatccatgggaacccagcgctgtgatgctggtgtttgtgttctccgcgagaagtgaccattgttggagcaccatccagagctagtgaccagtccagtggacagttagtgggagaatcaaaaatcctttccagaatgtctgtttctcactatgtgcaccgggtgattacaggcaccagtgcagtgatgattgtacttatttgacacatactccccgtcgtcctggttcttgttcctgagaagggtgggtaacagatattccaggaaaaagaatgcacattgaatggatgtgagagaccacattgcctctcccactgctttggggagcactttcctgtcatttctaacttaccacatgcttggtgtactatatgtatgttgtgcctcatatgttgcaaagaactaaggtgagtatagcctactagatatgggcaatatccagcctagatgattggaaagataccagtttaagtaaacttggtaaaatccaagtctttttttttttttccaggaacaactacattttctcatatacaggtagctaggggcaacacagttccattctagagggaaacaaaagggagagccccacaaaactttggggacaagggagagagagactcatctgacacttcttttggaggtcaggatttgtatatcagaattgaagttagaattaagtgaattaaactgaatttgattgtgagtgaacctagaacagcactgaagtattacataacctggaagactgagaagggtatattatttgaaggatctttttatttccccgaggtctttcgcactggagacagcataaaagagtgaacaaatgttgggatgagagaagatgacatcaatgtgggagttcagtataactggggataaactagaagaacctgtgattttacagtcatcttattacctgccagggctcatctagccatggcaatgtttgccttgaatgggggtgaaagcctttctttgttggatcaaatactactacactattacacttccacactatttatttggggatgggctgggagtgacagtagcctagtagttcagctacctgattactgccccattcttttagaagcacatgtctgccaaggagtggtttgtactgctgtgtttggtacatctagtcttttttctgctataagttttccttacctgtcctttagtgtagattttattcatcacaggacagaataatcaaggacaaccaaaatccttttgttagtttcagtacctcagctatcaacatttctgagctaccattcaatgttcctctgtgtcatggagtgaaattcttgttttgtgggtattaggagtgtgggaatgtgataacctaaacaacctttgctctgaaattccatttttccctctttccctgagttgtattgacctacagagttaatttcctttgtatttttttaagaaaatattaaaaatcaacggtctcaaatgccgagagtttgtggctaa

SEQ ID NO: 298626 - protein, 204 aa, Artificial Sequence
  derived and/or modified sequence
MQGPRTRARLGANEVLLVVGGFGSQQSPIDVVEKYDPKTQEWSFLPSITRKRRYVASVSLHDRIYVIGGYDGRSRLSSVECLDYTADEDGVWYSVAPMNVRRGLAGATTLGDMIYVSGGFDGSRRHTSMERYDPNIDQWSMLGDMQTAREGAGLVVASGVIYCLGGYDGLNILNSVEKYDPHTGHWTNVTPMATKRSDMMVIPC

SEQ ID NO: 298627 - DNA, 615 bp, Artificial Sequence
  derived and/or modified sequence
atgcagggccccagaaccagagccagactgggcgccaacgaggtgctgctggtggtgggcggcttcggcagccagcagagccccatcgacgtggtggagaagtacgaccccaagacccaggagtggagcttcctgcccagcatcaccagaaagagaagatacgtggccagcgtgagcctgcacgacagaatctacgtgatcggcggctacgacggcagaagcagactgagcagcgtggagtgcctggactacaccgccgacgaggacggcgtgtggtacagcgtggcccccatgaacgtgagaagaggcctggccggcgccaccaccctgggcgacatgatctacgtgagcggcggcttcgacggcagcagaagacacaccagcatggagagatacgaccccaacatcgaccagtggagcatgctgggcgacatgcagaccgccagagagggcgccggcctggtggtggccagcggcgtgatctactgcctgggcggctacgacggcctgaacatcctgaacagcgtggagaagtacgacccccacaccggccactggaccaacgtgacccccatggccaccaagagaagcgacatgatggtgatcccctgctag

SEQ ID NO: 298628 - DNA, 615 bp, Artificial Sequence
  derived and/or modified sequence
atgcaaggcccaagaacgagggccaggctcggggcaaatgaagttcttctagtcgtgggaggcttcggtagccagcagtcgcctatcgatgtcgtcgaaaagtatgaccctaaaacgcaagagtggagctttttgccatcaatcacccgcaaacgacgatacgtcgctagcgtgtccctccacgacaggatttacgtgatcggtgggtatgatggccggtccagactatcgagcgtcgaatgccttgactacactgctgacgaagacggggtttggtactccgtagcacctatgaacgtgcgccgagggctggcgggagccaccaccttaggggatatgatatatgtgtcgggggggttcgacggatcccgtagacataccagtatggagcggtacgaccctaacattgaccaatggtccatgttgggagatatgcaaacagcacgagagggggcaggactggttgtcgccagcggcgtgatctactgtcttggaggatatgacggattaaacatcctcaacagcgtggagaaatacgatcctcacacaggacattggaccaacgtaacacctatggcgacaaagcggtctgacatgatggtgatcccttgctag

SEQ ID NO: 298629 - DNA, 615 bp, Artificial Sequence
  derived and/or modified sequence
atgcagggccccaggacccgggcccggctgggcgccaatgaggtgctgctggtggtgggcggcttcggcagccagcagagccccattgatgtggtggagaagtatgaccccaagacccaggagtggagcttcctgcccagcatcaccaggaagaggcgctacgtggcctctgtgtccctgcatgaccgcatctacgtgattggaggctatgatggccgcagccggctgagctctgtggagtgcctggactacacagcagatgaagatggagtgtggtacagcgtggcccccatgaatgtgagaagaggcctggccggggccaccaccctgggggacatgatctacgtgtctgggggctttgatggcagccgccgccacacctccatggagagatatgaccccaacatcgaccagtggagcatgctgggggacatgcagacagcccgggagggcgccggcctggtggtggccagcggggtcatctactgcctgggcggctatgatggcctgaacatcctgaacagcgtggagaagtatgacccccacacaggccactggaccaacgtgacccccatggccaccaagagaagtgacatgatggtgatcccctgctag

SEQ ID NO: 298630 - DNA, 2257 bp, Artificial Sequence
  derived and/or modified sequence
tccccagtgcctaactctgctgtctgctatatttcagcctttcatccgctgtagtttacaatgcagggatctggttgatgaagcaaagaagtttcatctgaggcctgaacttcggagtcagatgcagggacccaggacaagggctcgcctaggagccaatgaagtgcttttggtggttgggggctttggaagccagcagtctcccattgatgtggtagagaaatatgaccccaagactcaggagtggagctttttgccaagcatcactcgtaagagacgttatgtggcctcagtgtcccttcatgaccggatctacgtcattggtggctatgatggccgttcccgccttagttcagtggaatgtctagactacacagcagatgaggatggggtctggtattctgtggcccctatgaatgtccgacgaggtcttgctggagccaccaccctgggagatatgatctatgtctctggaggctttgatggaagcaggcgtcacaccagtatggagcgctatgatccaaacattgaccagtggagcatgctgggagatatgcagacagcccgggaaggtgccggactcgtagtggccagtggagtgatctactgtctaggaggatatgacggcttgaatatcttaaattcagttgagaaatacgaccctcatacaggacattggactaatgttacaccaatggccaccaagcgttctgatatgatggtaattccctgctaagtagcattgaatgttatgaccctatcatcgacagctgggaagtcgtgacatccatgggaacccagcgctgtgatgctggtgtttgtgttctccgcgagaagtgaccattgttggagcaccatccagagctagtgaccagtccagtggacagttagtgggagaatcaaaaatcctttccagaatgtctgtttctcactatgtgcaccgggtgattacaggcaccagtgcagtgatgattgtacttatttgacacatactccccgtcgtcctggttcttgttcctgagaagggtgggtaacagatattccaggaaaaagaatgcacattgaatggatgtgagagaccacattgcctctcccactgctttggggagcactttcctgtcatttctaacttaccacatgcttggtgtactatatgtatgttgtgcctcatatgttgcaaagaactaaggtgagtatagcctactagatatgggcaatatccagcctagatgattggaaagataccagtttaagtaaacttggtaaaatccaagtctttttttttttttccaggaacaactacattttctcatatacaggtagctaggggcaacacagttccattctagagggaaacaaaagggagagccccacaaaactttggggacaagggagagagagactcatctgacacttcttttggaggtcaggatttgtatatcagaattgaagttagaattaagtgaattaaactgaatttgattgtgagtgaacctagaacagcactgaagtattacataacctggaagactgagaagggtatattatttgaaggatctttttatttccccgaggtctttcgcactggagacagcataaaagagtgaacaaatgttgggatgagagaagatgacatcaatgtgggagttcagtataactggggataaactagaagaacctgtgattttacagtcatcttattacctgccagggctcatctagccatggcaatgtttgccttgaatgggggtgaaagcctttctttgttggatcaaatactactacactattacacttccacactatttatttggggatgggctgggagtgacagtagcctagtagttcagctacctgattactgccccattcttttagaagcacatgtctgccaaggagtggtttgtactgctgtgtttggtacatctagtcttttttctgctataagttttccttacctgtcctttagtgtagattttattcatcacaggacagaataatcaaggacaaccaaaatccttttgttagtttcagtacctcagctatcaacatttctgagctaccattcaatgttcctctgtgtcatggagtgaaattcttgttttgtgggtattaggagtgtgggaatgtgataacctaaacaacctttgctctgaaattccatttttccctctttccctgagttgtattgacctacagagttaatttcctttgtatttttttaagaaaatattaaaaatcaacggtctcaaatgcc

SEQ ID NO: 298631 - DNA, 615 bp, Artificial Sequence
  derived and/or modified sequence
atgcagggcccccggacccgggcccggctgggcgccaacgaggtgctgcttgtggtaggaggattcgggtctcagcagtctcccatcgatgttgtggagaaatatgaccccaaaacccaggaatggtcattccttccctcgatcactcgcaagcgccgctacgtcgcctccgttagcctgcacgaccgaatatacgtgattggaggatacgacggtaggtctcggctgtcaagcgtggagtgcttggactatacagcggacgaggatggggtctggtattctgtggctcccatgaatgttagaagaggactggctggtgcaactacactcggagatatgatctacgtctccggcggcttcgacggatccaggcgacacacttccatggaacggtacgaccccaacattgaccagtggtcaatgctcggagatatgcagacggctcgggaaggcgctggactggttgtggccagcggggtgatctactgcttgggaggatacgacgggctgaatatactgaacagtgttgaaaagtatgaccctcacaccggacactggaccaacgtcactcctatggccaccaagcgcagcgatatgatggttatcccctgttag

SEQ ID NO: 298632 - DNA, 615 bp, Artificial Sequence
  derived and/or modified sequence
atgcagggaccacggacgcgggctcggctcggcgcaaatgaggttctgttggtagtcggtggctttggcagccagcaatcaccgatcgatgtcgtggaaaaatacgatcctaagactcaggaatggtccttcctgccatcaattaccaggaagaggagatacgtcgcctctgtgagccttcacgatcggatttacgtgattgggggttacgacggacgctcaagattgtcatcagtcgagtgtctggattacacggccgatgaggatggggtctggtacagcgtggcacccatgaatgtacggaggggactggccggagccactaccctgggggatatgatatatgtctcagggggattcgatggaagtcgaaggcatacttccatggagagatacgaccccaacatcgatcagtggagtatgttgggcgacatgcagactgcccgagagggggcaggcttggtggttgcctcgggggtcatctactgtcttgggggatacgatggactcaatatcctgaactccgtggagaaatatgatcctcacactggtcactggacaaacgtcacacccatggccacaaaaaggagtgatatgatggtgataccatgctag

SEQ ID NO: 298633 - protein, 232 aa, Artificial Sequence
  derived and/or modified sequence
MNNLTELQPGLFHHLRFLEELRLSGNHLSHIPGQAFSGLYSLKILMLQNNQLGGIPAEALWELPSLQSLRLDANLISLVPERSFEGLSSLRHLWLDDNALTEIPVRALNNLPALQAMTLALNRISHIPDYAFQNLTSLVVLDLNYNKLQEFPVAIRTLGRLQELSLNGAMDIQEFPDLKGTTSLEILTLTRAGIRLLPSGMCQQLPRLRVLELSHNQIEELPSLHRCQKLEE

SEQ ID NO: 298634 - DNA, 699 bp, Artificial Sequence
  derived and/or modified sequence
atgaataacctgactgagctccaacccggcctgtttcaccatttacgctttcttgaggagcttcggctgtcaggcaaccacttgtcacacatcccaggccaggcctttagcggcctctatagtctgaaaatccttatgttgcagaacaaccagctgggcggtattcctgccgaggccctctgggagctcccttctcttcagtcactgcgactggatgctaacctgattagcttggtgcctgagcggagcttcgaaggtctgagtagcctgcgacacctgtggctagacgacaacgccctaaccgagatcccggtcagggccctcaacaatctgcccgccctgcaggctatgactcttgccctgaatcgaatctcccacattcccgactacgcttttcaaaatctgaccagcctagtagtgctggacttaaattacaacaagttgcaagagttcccggtagccatccgcaccttgggacggttacaagagttatccctgaatggggccatggatattcaagagttccccgatctcaagggaactactagcctggaaattctgaccttaaccagagctggcatccgtctcttacccagcggcatgtgccagcaactgccacgcttaagggtacttgagctgtcccacaaccagatcgaggagctgccttccctccatcggtgtcagaagttggaagagtag

SEQ ID NO: 298635 - DNA, 699 bp, Artificial Sequence
  derived and/or modified sequence
atgaacaacctgacagagctgcagcccggcctcttccaccacctgcgcttcctggaggagctgcggctgagcggcaaccacctgagccacatccctggccaggccttcagcggcctgtacagcctgaagatcctgatgctgcagaacaaccagctgggcggcatcccagctgaggccctgtgggagctgcccagcctgcagagcctgcggctggatgccaacctgatcagcctggtgcctgagaggagctttgagggcctgagcagcctgcggcacctgtggctggatgacaatgccctgacagagatccctgtgcgggccctgaacaacctgcctgccctgcaggccatgaccctggccctgaaccgcatcagccacatcccagactatgccttccagaacctgaccagcctggtggtgctggacctgaactacaacaagctgcaggagttccctgtggccatccgcaccctgggccgcctgcaggagctgagcctgaatggagccatggacatccaggagttcccagacctgaagggcaccaccagcctggagatcctgaccctgacccgggccggcatccggctgctgcccagcggcatgtgccagcagctgccccggctgcgggtgctggagctgagccacaaccagatcgaggagctgcccagcctgcaccgctgccagaagctggaggagtag

SEQ ID NO: 298636 - DNA, 699 bp, Artificial Sequence
  derived and/or modified sequence
atgaacaacctgaccgagctgcagcccggcctgttccaccacctgcgttttttggaggaattacgcctcagcggcaatcatttgagccacatcccgggtcaggccttttcgggcctctattccctgaaaatcctcatgttgcagaacaatcagctgggaggtattccagccgaagcactgtgggaattgccgagtctgcagtccctcagattggatgccaatcttatttcactggtgcccgagagatcttttgaaggcttgagctctcttcgacatctctggcttgacgataacgcactcaccgaaataccggtacgtgccctaaataatctaccagccttacaagcaatgacattagccttaaaccgcatttcgcatatcccagattacgcatttcaaaacctaacatctctagtggtgctagacctgaactataacaagcttcaggagtttccagtggccataaggacccttggtaggctacaagaactgtctttgaatggagcgatggacatccaggaattccctgacctgaaagggaccacaagtctagagatccttacactgaccagagccggaatccgactgctaccctctggcatgtgccagcagcttcccaggctgcgcgtactggagttatcacacaatcaaatcgaggagctgccatccttgcacagatgccagaaactggaggaatag

SEQ ID NO: 298637 - DNA, 699 bp, Artificial Sequence
  derived and/or modified sequence
atgaataatctgacagagctacagccagggctgttccaccacctcaggttcctcgaagaacttcggctgagtgggaatcatctaagtcacatacctggtcaggctttttccgggttgtacagtctgaagattctgatgttgcagaacaaccaattaggcggaattcccgctgaggcactgtgggagctaccctcattgcaatctctgaggttggacgccaaccttatctctttggttcccgaacgcagttttgagggactgtcaagcctgaggcatctttggctggacgacaatgctctgactgaaatccctgtgcgggctctgaacaacctccccgcactgcaggcaatgaccctcgccctaaatcgaattagccacatccctgactatgccttccagaacctcaccagtctggtggtgctcgacctgaattataacaaactgcaagagttcccagtggccatccgcaccctcggcagactgcaggagctctccctgaacggtgctatggacattcaggaatttccagatcttaagggcaccacttcactcgagatcctcaccctgactcgggctggaatccgtctcctccccagcggtatgtgccagcagctgcctagactccgcgtcttggaactgtcccataatcagattgaagagctgccatcactgcaccggtgccagaagctggaggagtag

SEQ ID NO: 298638 - DNA, 699 bp, Artificial Sequence
  derived and/or modified sequence
atgaacaacctgaccgagctgcagcccggcctgttccaccacctgagattcctggaggagctgagactgagcggcaaccacctgagccacatccccggccaggccttcagcggcctgtacagcctgaagatcctgatgctgcagaacaaccagctgggcggcatccccgccgaggccctgtgggagctgcccagcctgcagagcctgagactggacgccaacctgatcagcctggtgcccgagagaagcttcgagggcctgagcagcctgagacacctgtggctggacgacaacgccctgaccgagatccccgtgagagccctgaacaacctgcccgccctgcaggccatgaccctggccctgaacagaatcagccacatccccgactacgccttccagaacctgaccagcctggtggtgctggacctgaactacaacaagctgcaggagttccccgtggccatcagaaccctgggcagactgcaggagctgagcctgaacggcgccatggacatccaggagttccccgacctgaagggcaccaccagcctggagatcctgaccctgaccagagccggcatcagactgctgcccagcggcatgtgccagcagctgcccagactgagagtgctggagctgagccacaaccagatcgaggagctgcccagcctgcacagatgccagaagctggaggagtag

SEQ ID NO: 298639 - protein, 336 aa, Artificial Sequence
  derived and/or modified sequence
MSQAVQTNGTQPLSKTWELSLYELQRTPQEAITDGLEIVVSPRSLHSELMCPICLDMLKNTMTTKECLHRFCADCIITALRSGNKECPTCRKKLVSKRSLRPDPNFDALISKIYPSRDEYEAHQERVLARINKHNNQQALSHSIEEGLKIQAMNRLQRGKKQQIENGSGAEDNGDSSHCSNASTHSNQEAGPSNKRTKTSDDSGLELDNNNAAMAIDPVMDGASEIELVFRPHPTLMEKDDSAQTRYIKTSGNATVDHLSKYLAVRLALEELRSKGESNQMNLDTASEKQYTIYIATASGQFTVLNGSFSLELVSEKYWKVNKPMELYYAPTKEHK

SEQ ID NO: 298640 - protein, 246 aa, Artificial Sequence
  derived and/or modified sequence
MSQAVQTNGTQPLSKTWELSLYELQRTPQEAITDGLEIVVSPRSLHSELMCPICLDMLKNTMTTKECLHRFCADCIITALRSGNKECPTCRKKLVSKRSLRPDPNFDALISKIYPSRDEYEAHQERVLARINKHNNQQALSHSIEEGLKIQAMNRLQRGKKQQIENGSGAEDNGDSSHCSNASTHSNQEAGPSNKRTKTSDDSGLELDNNNAAMAIDPVMDGASEIELVFRPHPTLMEKDDSAQTR

SEQ ID NO: 298641 - DNA, 3551 bp, Artificial Sequence
  derived and/or modified sequence
gcgcctccgcccctcgctcgctcgctccttcccgccctccccgcagcgccggccgagccggcttcccctcagtctctcatgaatattgagcggcccctgttgtatttcccgagctccattgcggaagctgaggctcgccatattgtgcggcggcgccggcgtccgcggcagctgataccagagtcttgctccggccgcggccagcggagccctgggctggggcaggagccgcaatgtctcaggctgtgcagacaaacggaactcaaccattaagcaaaacatgggaactcagtttatatgagttacaacgaacacctcaggaggcaataacagatggcttagaaattgtggtttcacctcgaagtctacacagtgaattaatgtgcccaatttgtttggatatgttgaagaacaccatgactacaaaggagtgtttacatcgtttttgtgcagactgcatcatcacagcccttagaagtggcaacaaagaatgtcctacctgtcggaaaaaactagtttccaaaagatcactaaggccagacccaaactttgatgcactcatcagcaaaatttatccaagtcgtgatgagtatgaagctcatcaagagagagtattagccaggatcaacaagcacaataatcagcaagcactcagtcacagcattgaggaaggactgaagatacaggccatgaacagactgcagcgaggcaagaaacaacagattgaaaatggtagtggagcagaagataatggtgacagttcacactgcagtaatgcatccacacatagcaatcaggaagcaggccctagtaacaaacggaccaaaacatctgatgattctgggctagagcttgataataacaatgcagcaatggcaattgatccagtaatggatggtgctagtgaaattgaattagtattcaggcctcatcccacacttatggaaaaagatgacagtgcacagacgagatacataaagacttctggtaacgccactgttgatcacttatccaagtatctggctgtgaggttagctttagaagaacttcgaagcaaaggtgaatcaaaccagatgaaccttgatacagccagtgagaagcagtataccatttatatagcaacagccagtggccagttcactgtattaaatggctctttttctttggaattggtcagtgagaaatactggaaagtgaacaaacccatggaactttattacgcacctacaaaggagcacaaatgagcctttaaaaaccaattctgagactgaacttttttatagcctatttctttaatattaaagatgtactggcattacttttatggacagatcttggatatgttgttcaattttctttctgagccagactagtttacgctattcaaatcttttcccctttatttaagatttcctttttggaagggactgcaattattcagtatttttttctttcctttaaaaaaatatatctgaagtttcttgtgtttttttttttccccacaaagtgtgtttccacttggagcaccattttgacccaggaatttttcatagtttctgtattcttataagattcagttggctgtccttttcctgctcccctcaaaagatttttagtcatacagaatgttaaatattatgtattctgactttttttttcccccggagtcttgtatatttatagttttctatataaactgtagtatcttcatgaagacccaaggctcaaatttactgtccttaaaaacaattctcataggattattcttttcatggtattttcttccataatatctcattttaaaaagaagttctttatgaacttagtgtccattgtcatgcaatgtttttttttttccattctttttccctgtaattttggaatttctggtcctgggaagaatcaaacaaaatcttaagttctatgagaacttggttcattgacatattctgctgaagaaagaaaaattaaattggtagtaaaatatagtcttcaagtatacgtttgagagtgcttttttttgtattagttctgctgtcacttcatttcctgtattatatgtgatgtttttccccattaaaataccagagataatggagatattttgcactttagccttgatgaaaagtacaagatatgttcaaagcttccctaatttttttcttatttgtagccacataagtttcaagaataacatggcacacagaacaatggaaaaaagtttgtttccattggaaaattatatcattttgggttgccacatcagtttataaatttggcgctcttttaattacactctgtagaaggttaatagagcttgagccctgctttaatatgtagtgaaagataattctgtagaaaaacgtcagccagtagggtaaagtcattctactgttcttaatttttatattgaggaacaatattgggtgtttgggagccagaaagctttgttgacagatcagaaataagattgacttgggtgttatatttcatctctctccagactctaggtatatttccaactttatatatcacagtatttaaaaagacatgtttgcattgagaaattaaccctaaagggttttcaatagggtgtagacctccagtacctttgtaactaaagtctgtctagtcattgtaaatatttatctgtcagttttgacagattggggccagcttgatgttttaaatcttcagcccggtatgaaaacttaaaggtatatattcaattttttaccattttatggaaaatatttaaaatctgtttttacagggttttttttttttttttttttttgtaatctgtgccatgaaatttgaaaaccaccaaaaatcaagggaacttttatatattcaattccttttctggtgtaatgttaaagttgtatagattattaatgcatgcccactgaatataaccctggttttgtgataaaactgcttagattttgttgatgacattagattagtagttgcattaaataactaaattcccattgtgattaattgaaattttgtctttaagcagagagttatttgtgactataagctttgtgcttagagaatgtatgtgtttttatctgtcagtatgggaggatataaactgcatcattagtgaaattattggttgtgtaatcctttgtgaaatataattctaggtatttgatagggtattgagtgtattttgtgtgtgtgtggatgtgtgttttggggtacggggagaggcgatgctattggccatcactaccaaccagggtttcaaaaagtattacctaagtaatttcttttatcactatctcaactgaggaagaaaaggctcaccacaagtggtgtgaaggctttgggtacttagttctaaatttttttatggtaacatatacatagccacatttacagttttaaccattttaaggcatgtaattcagtggggttaggtacattcacaatgttgtgtaatgatcaccgctgtctacttgtaaaactttttcatcaccccaaacagaaactctgtgtgcaattaaagtaatgcatttctcttcttcttaacccct

SEQ ID NO: 298642 - DNA, 1011 bp, Artificial Sequence
  derived and/or modified sequence
atgagtcaggctgtccagacaaacggtactcagccgctcagtaagacttgggagcttagcctgtacgagcttcagagaacaccacaagaggcgattaccgatggtctggagatcgtcgtaagtccgagaagtctgcatagcgagctgatgtgcccaatttgcttagacatgctgaagaacaccatgaccaccaaggagtgtctccacagattttgcgcggactgcatcattacagccttgagaagcggaaacaaagagtgtcccacgtgtaggaagaagttggtgagtaagcggagtctgagaccggatccaaacttcgacgcgctcatttctaagatttatccctcacgggacgagtatgaagcacaccaggagagagtactcgccaggataaataaacataacaaccagcaggccctgtcccacagcatcgaagagggtctaaagattcaagccatgaatagattacaacgcggaaagaaacagcagatcgagaacgggtcaggagcggaagataacggtgatagctcgcattgctctaacgcgagcacgcactcaaaccaggaggcaggccctagcaacaaaagaaccaagacttcagacgatagtgggctcgagctcgacaacaataacgccgcaatggctatcgaccctgtgatggatggagcctccgaaattgagctcgttttcaggccccaccccacgctgatggagaaggatgactccgctcaaacccggtatatcaaaacgtcaggcaatgcgaccgtggatcatctctccaagtatcttgctgtacggctggccttggaggaattgcgcagcaagggggagagcaatcagatgaaccttgacaccgcctcagagaaacaatatactatctacatcgctacggcctcgggccagttcactgtgctcaatgggtctttttcgcttgaattggtttcagagaagtattggaaggtgaataagcctatggagttatactatgcgcctactaaggaacacaaatag

SEQ ID NO: 298643 - DNA, 741 bp, Artificial Sequence
  derived and/or modified sequence
atgagccaggccgtccagacaaacgggactcaacccctcagcaaaacttgggaactctccttatacgagctccagcgaaccccacaggaagccattactgacgggctcgagatcgtagtgtcccctaggtctctgcactcggagttaatgtgccccatctgcctggatatgctgaagaataccatgactactaaggagtgcctccaccggttttgcgccgactgtattatcacagctttacgcagcggaaacaaggagtgtccaacctgccggaagaagctggtgtccaagcgctcactgcgaccagacccaaacttcgatgctctcatttccaaaatatatccatctcgagacgaatacgaggctcaccaagaacgagtcctggccagaataaacaaacacaacaaccagcaagcactctcacacagcattgaagaaggattgaagatccaggccatgaaccggcttcaacggggaaagaaacaacaaatcgagaatgggtctggggccgaagacaatggcgattcaagccactgctcaaatgctagcacccatagtaatcaggaagcagggcctagcaataaacggaccaaaacctctgacgactctgggctggagcttgataataataatgccgccatggctatcgaccctgttatggatggcgccagcgagattgagctagtttttagacctcatccaaccctgatggagaaagacgattctgctcaaacacgatag

SEQ ID NO: 298644 - DNA, 1011 bp, Artificial Sequence
  derived and/or modified sequence
atgagccaggccgtgcagaccaacggcacccagcccctgagcaagacctgggagctgagcctgtatgagctgcagaggaccccccaggaggccatcacagatggcctggagatcgtggtgagccccaggagcctgcacagcgagctgatgtgccccatctgcctggacatgctgaagaacaccatgaccaccaaggagtgcctgcaccgcttctgtgccgactgcatcatcacagccctgcggagcggcaacaaggagtgccccacctgcaggaagaagctggtgtccaagaggagcctgcggccagaccccaactttgatgccctgatcagcaagatctaccccagcagagatgaatatgaggcccaccaggagcgggtgctggcccgcatcaacaagcacaacaaccagcaggccctgagccacagcattgaggagggcctgaagatccaggccatgaaccggctgcagaggggcaagaagcagcagattgaaaatggcagcggggctgaagataatggagacagcagccactgcagcaatgccagcacccacagcaaccaggaggccggccccagcaacaagaggaccaagaccagtgatgattctggcctggagctggacaacaacaatgctgccatggccatcgaccctgtgatggatggagccagcgagattgagctggtgttccggccccaccccaccctgatggagaaggatgacagcgcccagacccgctacatcaagaccagcggaaatgccaccgtggaccacctgagcaagtacctggccgtgcggctggccctggaggagctgcggagcaaaggagagagcaaccagatgaacctggacacagccagcgagaagcagtacaccatctacatcgccacagccagcggccagttcaccgtgctgaatggcagcttcagcctggagctggtgtctgagaagtactggaaggtgaacaagcccatggagctgtactatgcccccaccaaggagcacaagtag

SEQ ID NO: 298645 - DNA, 741 bp, Artificial Sequence
  derived and/or modified sequence
atgagccaggccgtgcagaccaacggcacccagcccctgagcaagacctgggagctgagcctgtatgagctgcagaggaccccccaggaggccatcacagatggcctggagatcgtggtgagccccaggagcctgcacagcgagctgatgtgccccatctgcctggacatgctgaagaacaccatgaccaccaaggagtgcctgcaccgcttctgtgccgactgcatcatcacagccctgcggagcggcaacaaggagtgccccacctgcaggaagaagctggtgtccaagaggagcctgcggccagaccccaactttgatgccctgatcagcaagatctaccccagcagagatgaatatgaggcccaccaggagcgggtgctggcccgcatcaacaagcacaacaaccagcaggccctgagccacagcattgaggagggcctgaagatccaggccatgaaccggctgcagaggggcaagaagcagcagattgaaaatggcagcggggctgaagataatggagacagcagccactgcagcaatgccagcacccacagcaaccaggaggccggccccagcaacaagaggaccaagaccagtgatgattctggcctggagctggacaacaacaatgctgccatggccatcgaccctgtgatggatggagccagcgagattgagctggtgttccggccccaccccaccctgatggagaaggatgacagcgcccagaccaggtag

SEQ ID NO: 298646 - DNA, 1011 bp, Artificial Sequence
  derived and/or modified sequence
atgagccaggccgtgcagaccaacggcacccagcccctgagcaagacctgggaactgagcctctatgagctccagcggactccgcaggaggcgataacggacggactggagatagtggtgtcgcctcggtcgctgcactccgagctgatgtgtccgatttgcctggacatgctaaaaaataccatgaccactaaggagtgtctccaccggttttgcgctgattgcataatcactgccctccggagcgggaacaaagagtgccccacctgcagaaagaagctggtctcaaagaggtcactcaggccggatccaaacttcgacgctttaatttccaaaatttatccatcgcgggatgagtatgaagcacatcaggagagagtcctcgccaggataaataagcacaataatcagcaagcactcagtcattcaatagaggagggactcaagatccaggcaatgaataggcttcaacgcgggaagaagcaacagatcgagaacggcagtggcgccgaggataatggggacagctcccactgcagcaacgcatctacgcactccaaccaggaagctggaccatctaacaagcggactaaaacctctgacgatagcggactcgaattagacaataacaacgcagccatggcaattgaccccgtgatggatggcgcctctgaaatcgaactggtcttccggccgcaccctacgctgatggaaaaggacgattctgctcaaaccaggtacataaagacaagcggcaatgccacagttgatcatctgtccaagtacctcgctgtacgcctggccctcgaagaactgaggagcaagggggaaagcaaccaaatgaacctggatacagcctctgaaaagcagtatacgatctatatcgcaacagcatcaggccagttcactgttctgaacggatcattttctctggaacttgtcagtgaaaagtactggaaggtgaataagcccatggagctgtattatgccccaactaaggagcataagtag

SEQ ID NO: 298647 - DNA, 741 bp, Artificial Sequence
  derived and/or modified sequence
atgagccaggccgtgcagaccaacggcacccagcccctgagcaagacatgggaactgtccctttatgaactccagaggacacctcaggaagcaatcacagacggcctcgagatcgtggttagccctagaagtttgcactctgaactgatgtgccctatatgcttggacatgctgaagaataccatgacgactaaagagtgcttacacaggttctgtgcagactgtatcattacagccttgcgtagcggcaacaaggagtgccctacttgccgcaagaagctcgtcagtaaaaggagtctgagaccagaccctaacttcgatgcactaattagcaagatttaccccagtagagatgaatacgaagctcatcaggaaagagtgctggccaggatcaataaacacaacaaccaacaggcactgagccattcaattgaggagggacttaaaattcaggcaatgaataggttacagcgcgggaaaaagcagcagattgagaacggtagcggcgccgaggacaatggagactcaagtcattgcagcaatgcatctacacactccaatcaggaagccggcccttctaacaagcgtacaaagacaagcgatgattccggcctggagctggacaacaacaacgcagccatggctatcgatccagtgatggatggcgcctcagagattgagctggtcttcaggccacatcccaccctaatggagaaggatgatagcgctcaaacccgatag

SEQ ID NO: 298648 - DNA, 1011 bp, Artificial Sequence
  derived and/or modified sequence
atgagtcaggccgtccaaacaaatggcacacaacccctgtctaaaacgtgggaactctccttgtatgagttgcagaggacaccgcaagaagcaatcacagacggtctggagatcgtcgtgtcacctagaagcttacacagcgaattaatgtgtccgatttgcctggatatgctgaaaaatactatgacaacaaaggagtgcctgcacaggttctgcgctgattgtattataacggcacttcgaagcggaaataaggaatgcccaacctgccgcaagaagcttgtctccaagaggagtttgcgccctgaccccaactttgacgcccttatcagcaaaatatacccaagccgcgatgagtacgaggcccatcaggagcgtgtattggcaagaattaacaaacataacaatcagcaggcgctctcccactccatcgaggagggtcttaagattcaggccatgaaccgattgcagaggggaaagaaacaacaaatcgaaaatggtagcggcgcagaggataacggagatagctctcactgtagcaatgcatctactcacagtaatcaggaggcaggacctagcaataagaggacaaagaccagtgatgattccggacttgaactagacaataataatgctgcgatggccatcgatcccgtgatggacggcgcatccgaaatcgaactcgtgtttcgcccacaccccactctcatggaaaaagatgacagtgcccagactcgatatatcaagacatctggcaatgctactgtcgaccacctgtctaaatatctggctgtacgattagccctcgaagagttgagaagcaagggcgagtctaatcagatgaacctggatacagcctccgagaaacaatatacaatctacatcgccaccgcaagcggccagttcacagtgttaaatggatcttttagcctggagctggtcagcgaaaaatattggaaggtcaacaagcctatggagttgtattatgctccaaccaaagaacacaagtag

SEQ ID NO: 298649 - DNA, 741 bp, Artificial Sequence
  derived and/or modified sequence
atgagtcaagcagtccagactaacggcacacagcctctgtcgaaaacgtgggagttatcactgtatgagctgcagcggactccccaggaagcgatcacagatggcctggaaattgtagtgagccctagaagtctgcactccgagctgatgtgccctatctgtctggacatgttgaagaacacgatgacaactaaggaatgcctccatagattctgcgctgactgcattataacagctctccgctcagggaataaggagtgccccacctgcaggaaaaagttggtgtctaagcgctctctaaggcccgatcctaacttcgacgctctgatttcaaagatctatccaagtagggacgaatatgaggcccaccaagaacgcgtgttggctaggataaacaagcataacaaccaacaagctctgtcacattcgatcgaggaaggccttaagatacaggcaatgaaccgactgcagcgcggaaagaagcagcaaatcgagaatggctctggtgctgaggataacggagacagtagtcattgctcgaatgcttccacccattccaatcaagaggccggaccctcaaataagcgcacaaagacctcggacgacagcggcctggagctcgataacaataacgctgccatggccatcgacccagttatggatggggcaagtgaaattgaacttgtcttccggcctcatccgacactgatggagaaagacgattctgcgcaaacacgctag

SEQ ID NO: 298650 - DNA, 3606 bp, Artificial Sequence
  derived and/or modified sequence
cggcgcaccctccctcgcgccgcgggcctccccgcgccgtgcacgtcctcgtcccgcgcctccgcccctcgctcgctcgctccttcccgccctccccgcagcgccggccgagccggcttcccctcagtctctcatgaatattgagcggcccctgttgtatttcccgagctccattgcggaagctgaggctcgccatattgtgcggcggcgccggcgtccgcggcagctgataccagagtcttgctccggccgcggccagcggagccctgggctggggcaggagccgcaatgtctcaggctgtgcagacaaacggaactcaaccattaagcaaaacatgggaactcagtttatatgagttacaacgaacacctcaggaggcaataacagatggcttagaaattgtggtttcacctcgaagtctacacagtgaattaatgtgcccaatttgtttggatatgttgaagaacaccatgactacaaaggagtgtttacatcgtttttgtgcagactgcatcatcacagcccttagaagtggcaacaaagaatgtcctacctgtcggaaaaaactagtttccaaaagatcactaaggccagacccaaactttgatgcactcatcagcaaaatttatccaagtcgtgatgagtatgaagctcatcaagagagagtattagccaggatcaacaagcacaataatcagcaagcactcagtcacagcattgaggaaggactgaagatacaggccatgaacagactgcagcgaggcaagaaacaacagattgaaaatggtagtggagcagaagataatggtgacagttcacactgcagtaatgcatccacacatagcaatcaggaagcaggccctagtaacaaacggaccaaaacatctgatgattctgggctagagcttgataataacaatgcagcaatggcaattgatccagtaatggatggtgctagtgaaattgaattagtattcaggcctcatcccacacttatggaaaaagatgacagtgcacagacgagatacataaagacttctggtaacgccactgttgatcacttatccaagtatctggctgtgaggttagctttagaagaacttcgaagcaaaggtgaatcaaaccagatgaaccttgatacagccagtgagaagcagtataccatttatatagcaacagccagtggccagttcactgtattaaatggctctttttctttggaattggtcagtgagaaatactggaaagtgaacaaacccatggaactttattacgcacctacaaaggagcacaaatgagcctttaaaaaccaattctgagactgaacttttttatagcctatttctttaatattaaagatgtactggcattacttttatggacagatcttggatatgttgttcaattttctttctgagccagactagtttacgctattcaaatcttttcccctttatttaagatttcctttttggaagggactgcaattattcagtatttttttctttcctttaaaaaaatatatctgaagtttcttgtgtttttttttttccccacaaagtgtgtttccacttggagcaccattttgacccaggaatttttcatagtttctgtattcttataagattcagttggctgtccttttcctgctcccctcaaaagatttttagtcatacagaatgttaaatattatgtattctgactttttttttcccccggagtcttgtatatttatagttttctatataaactgtagtatcttcatgaagacccaaggctcaaatttactgtccttaaaaacaattctcataggattattcttttcatggtattttcttccataatatctcattttaaaaagaagttctttatgaacttagtgtccattgtcatgcaatgtttttttttttccattctttttccctgtaattttggaatttctggtcctgggaagaatcaaacaaaatcttaagttctatgagaacttggttcattgacatattctgctgaagaaagaaaaattaaattggtagtaaaatatagtcttcaagtatacgtttgagagtgcttttttttgtattagttctgctgtcacttcatttcctgtattatatgtgatgtttttccccattaaaataccagagataatggagatattttgcactttagccttgatgaaaagtacaagatatgttcaaagcttccctaatttttttcttatttgtagccacataagtttcaagaataacatggcacacagaacaatggaaaaaagtttgtttccattggaaaattatatcattttgggttgccacatcagtttataaatttggcgctcttttaattacactctgtagaaggttaatagagcttgagccctgctttaatatgtagtgaaagataattctgtagaaaaacgtcagccagtagggtaaagtcattctactgttcttaatttttatattgaggaacaatattgggtgtttgggagccagaaagctttgttgacagatcagaaataagattgacttgggtgttatatttcatctctctccagactctaggtatatttccaactttatatatcacagtatttaaaaagacatgtttgcattgagaaattaaccctaaagggttttcaatagggtgtagacctccagtacctttgtaactaaagtctgtctagtcattgtaaatatttatctgtcagttttgacagattggggccagcttgatgttttaaatcttcagcccggtatgaaaacttaaaggtatatattcaattttttaccattttatggaaaatatttaaaatctgtttttacagggttttttttttttttttttttttgtaatctgtgccatgaaatttgaaaaccaccaaaaatcaagggaacttttatatattcaattccttttctggtgtaatgttaaagttgtatagattattaatgcatgcccactgaatataaccctggttttgtgataaaactgcttagattttgttgatgacattagattagtagttgcattaaataactaaattcccattgtgattaattgaaattttgtctttaagcagagagttatttgtgactataagctttgtgcttagagaatgtatgtgtttttatctgtcagtatgggaggatataaactgcatcattagtgaaattattggttgtgtaatcctttgtgaaatataattctaggtatttgatagggtattgagtgtattttgtgtgtgtgtggatgtgtgttttggggtacggggagaggcgatgctattggccatcactaccaaccagggtttcaaaaagtattacctaagtaatttcttttatcactatctcaactgaggaagaaaaggctcaccacaagtggtgtgaaggctttgggtacttagttctaaatttttttatggtaacatatacatagccacatttacagttttaaccattttaaggcatgtaattcagtggggttaggtacattcacaatgttgtgtaatgatcaccgctgtctacttgtaaaactttttcatcaccccaaacagaaactctgtgtgcaattaaagtaatgcatttctcttcttcttaacccct

SEQ ID NO: 298651 - DNA, 942 bp, Artificial Sequence
  derived and/or modified sequence
ggatgtgtgtctgcatcgtgggggtggggtagggggcactttgtgcagatatcgctccttccttctggggggtcggagtcggggttccagtgtagaggagctcctcgacctcggggttcctcggggagaccccttcagcttcacacattcctggagtgccgcctcctgctctggagtatctgttgctgctttctaaaacccaatgtctcaggctgtgcagacaaacggaactcaaccattaagcaaaacatgggaactcagtttatatgagttacaacgaacacctcaggaggcaataacagatggcttagaaattgtggtttcacctcgaagtctacacagtgaattaatgtgcccaatttgtttggatatgttgaagaacaccatgactacaaaggagtgtttacatcgtttttgtgcagactgcatcatcacagcccttagaagtggcaacaaagaatgtcctacctgtcggaaaaaactagtttccaaaagatcactaaggccagacccaaactttgatgcactcatcagcaaaatttatccaagtcgtgatgagtatgaagctcatcaagagagagtattagccaggatcaacaagcacaataatcagcaagcactcagtcacagcattgaggaaggactgaagatacaggccatgaacagactgcagcgaggcaagaaacaacagattgaaaatggtagtggagcagaagataatggtgacagttcacactgcagtaatgcatccacacatagcaatcaggaagcaggccctagtaacaaacggaccaaaacatctgatgattctgggctagagcttgataataacaatgcagcaatggcaattgatccagtaatggatggtgctagtgaaattgaattagtattcaggcctcatcccacacttatggaaaaagatgacagtgcacagacgagata

SEQ ID NO: 298652 - DNA, 1011 bp, Artificial Sequence
  derived and/or modified sequence
atgagccaggccgtgcagaccaacggcacccagcccctgagcaagacctgggagctgagcctgtacgagctgcagagaaccccccaggaggccatcaccgacggcctggagatcgtggtgagccccagaagcctgcacagcgagctgatgtgccccatctgcctggacatgctgaagaacaccatgaccaccaaggagtgcctgcacagattctgcgccgactgcatcatcaccgccctgagaagcggcaacaaggagtgccccacctgcagaaagaagctggtgagcaagagaagcctgagacccgaccccaacttcgacgccctgatcagcaagatctaccccagcagagacgagtacgaggcccaccaggagagagtgctggccagaatcaacaagcacaacaaccagcaggccctgagccacagcatcgaggagggcctgaagatccaggccatgaacagactgcagagaggcaagaagcagcagatcgagaacggcagcggcgccgaggacaacggcgacagcagccactgcagcaacgccagcacccacagcaaccaggaggccggccccagcaacaagagaaccaagaccagcgacgacagcggcctggagctggacaacaacaacgccgccatggccatcgaccccgtgatggacggcgccagcgagatcgagctggtgttcagaccccaccccaccctgatggagaaggacgacagcgcccagaccagatacatcaagaccagcggcaacgccaccgtggaccacctgagcaagtacctggccgtgagactggccctggaggagctgagaagcaagggcgagagcaaccagatgaacctggacaccgccagcgagaagcagtacaccatctacatcgccaccgccagcggccagttcaccgtgctgaacggcagcttcagcctggagctggtgagcgagaagtactggaaggtgaacaagcccatggagctgtactacgcccccaccaaggagcacaagtag

SEQ ID NO: 298653 - DNA, 741 bp, Artificial Sequence
  derived and/or modified sequence
atgagccaggccgtgcagaccaacggcacccagcccctgagcaagacctgggagctgagcctgtacgagctgcagagaaccccccaggaggccatcaccgacggcctggagatcgtggtgagccccagaagcctgcacagcgagctgatgtgccccatctgcctggacatgctgaagaacaccatgaccaccaaggagtgcctgcacagattctgcgccgactgcatcatcaccgccctgagaagcggcaacaaggagtgccccacctgcagaaagaagctggtgagcaagagaagcctgagacccgaccccaacttcgacgccctgatcagcaagatctaccccagcagagacgagtacgaggcccaccaggagagagtgctggccagaatcaacaagcacaacaaccagcaggccctgagccacagcatcgaggagggcctgaagatccaggccatgaacagactgcagagaggcaagaagcagcagatcgagaacggcagcggcgccgaggacaacggcgacagcagccactgcagcaacgccagcacccacagcaaccaggaggccggccccagcaacaagagaaccaagaccagcgacgacagcggcctggagctggacaacaacaacgccgccatggccatcgaccccgtgatggacggcgccagcgagatcgagctggtgttcagaccccaccccaccctgatggagaaggacgacagcgcccagaccagatag

SEQ ID NO: 298654 - protein, 1791 aa, Artificial Sequence
  derived and/or modified sequence
MMCLKILRISLAILAGWALCSANSELGWTRKKSLVEREHLNQVLLEGERCWLGAKVRRPRASPQHHLFGVYPSRAGNYLRPYPVGEQEIHHTGRSKPDTEGNAVSLVPPDLTENPAGLRGAVEEPAAPWVGDSPIGQSELLGDDDAYLGNQRSKESLGEAGIQKGSAMAATTTTAIFTTLNEPKPETQRRGWAKSRQRRQVWKRRAEDGQGDSGISSHFQPWPKHSLKHRVKKSPPEESNQNGGEGSYREAETFNSQVGLPILYFSGRRERLLLRPEVLAEIPREAFTVEAWVKPEGGQNNPAIIAGVFDNCSHTVSDKGWALGIRSGKDKGKRDARFFFSLCTDRVKKATILISHSRYQPGTWTHVAATYDGRHMALYVDGTQVASSLDQSGPLNSPFMASCRSLLLGGDSSEDGHYFRGHLGTLVFWSTALPQSHFQHSSQHSSGEEEATDLVLTASFEPVNTEWVPFRDEKYPRLEVLQGFEPEPEILSPLQPPLCGQTVCDNVELISQYNGYWPLRGEKVIRYQVVNICDDEGLNPIVSEEQIRLQHEALNEAFSRYNISWQLSVHQVHNSTLRHRVVLVNCEPSKIGNDHCDPECEHPLTGYDGGDCRLQGRCYSWNRRDGLCHVECNNMLNDFDDGDCCDPQVADVRKTCFDPDSPKRAYMSVKELKEALQLNSTHFLNIYFASSVREDLAGAATWPWDKDAVTHLGGIVLSPAYYGMPGHTDTMIHEVGHVLGLYHVFKGVSERESCNDPCKETVPSMETGDLCADTAPTPKSELCREPEPTSDTCGFTRFPGAPFTNYMSYTDDNCTDNFTPNQVARMHCYLDLVYQQWTESRKPTPIPIPPMVIGQTNKSLTIHWLPPISGVVYDRASGSLCGACTEDGTFRQYVHTASSRRVCDSSGYWTPEEAVGPPDVDQPCEPSLQAWSPEVHLYHMNMTVPCPTEGCSLELLFQHPVQADTLTLWVTSFFMESSQVLFDTEILLENKESVHLGPLDTFCDIPLTIKLHVDGKVSGVKVYTFDERIEIDAALLTSQPHSPLCSGCRPVRYQVLRDPPFASGLPVVVTHSHRKFTDVEVTPGQMYQYQVLAEAGGELGEASPPLNHIHGAPYCGDGKVSERLGEECDDGDLVSGDGCSKVCELEEGFNCVGEPSLCYMYEGDGICEPFERKTSIVDCGIYTPKGYLDQWATRAYSSHEDKKKCPVSLVTGEPHSLICTSYHPDLPNHRPLTGWFPCVASENETQDDRSEQPEGSLKKEDEVWLKVCFNRPGEARAIFIFLTTDGLVPGEHQQPTVTLYLTDVRGSNHSLGTYGLSCQHNPLIINVTHHQNVLFHHTTSVLLNFSSPRVGISAVALRTSSRIGLSAPSNCISEDEGQNHQGQSCIHRPCGKQDSCPSLLLDHADVVNCTSIGPGLMKCAITCQRGFALQASSGQYIRPMQKEILLTCSSGHWDQNVSCLPVDCGVPDPSLVNYANFSCSEGTKFLKRCSISCVPPAKLQGLSPWLTCLEDGLWSLPEVYCKLECDAPPIILNANLLLPHCLQDNHDVGTICKYECKPGYYVAESAEGKVRNKLLKIQCLEGGIWEQGSCIPVVCEPPPPVFEGMYECTNGFSLDSQCVLNCNQEREKLPILCTKEGLWTQEFKLCENLQGECPPPPSELNSVEYKCEQGYGIGAVCSPLCVIPPSDPVMLPENITADTLEHWMEPVKVQSIVCTGRRQWHPDPVLVHCIQSCEPFQADGWCDTINNRAYCHYDGGDCCSSTLSSKKVIPFAADCDLDECTCRDPKAEENQ

SEQ ID NO: 298655 - DNA, 5376 bp, Artificial Sequence
  derived and/or modified sequence
atgatgtgcctcaaaatcctgagaatctcactggcgattctcgctggatgggctctctgttctgccaattccgagctcggatggactagaaagaagtcactggttgagcgggaacatttgaatcaggtcctgctggaaggggagaggtgctggctgggagccaaagtgcggcgaccgagagcatcaccacagcaccatcttttcggtgtctacccctcacgcgcaggcaactacttacggccttacccggtgggcgagcaagaaatccatcacactggcaggtccaagcctgacaccgaaggcaacgctgtttctttagtcccacccgatctgactgaaaacccggctggcctgaggggtgccgtcgaagaacctgcggctccctgggtcggcgacagccctatcggtcagagcgagctgctcggggatgacgatgcatacctcggcaatcaaagaagtaaagagtctttgggcgaagccggaattcagaagggcagcgcaatggcagctacgactacgaccgccatctttaccacgctgaacgaacccaaacctgagacacagaggcggggatgggcaaagagcagacagcgcaggcaagtctggaagcgccgagcagaagacggtcagggagactccgggatcagctcacactttcaaccctggccaaaacactctctgaagcaccgggtaaagaaaagccctcccgaggaaagtaatcaaaatgggggagagggctcatatcgagaagccgaaacatttaacagccaggtgggcctccccattctttactttagcggacgcagagagcgcctcctgctaagaccagaggtccttgccgagattccaagagaggcatttacagtggaggcctgggtgaagcccgaaggcggacagaacaatccggcaataatcgcaggagtgttcgataactgctcccatacagtttcggataagggatgggccctcggtatcaggtcaggaaaagataagggcaagagagatgcacggttcttctttagcctgtgcactgacagagttaagaaggccacaatactcatttcacatagtagataccagccgggaacgtggactcacgttgccgctacatacgacggcaggcacatggccctctatgtagacggcactcaggttgctagttctctcgaccagagcggtcctcttaattccccctttatggctagctgccgcagcctgttactgggtggagactctagtgaggatgggcactattttcggggacacctggggactctcgtgttttggtctaccgctctgcctcagtcccacttccagcatagtagccagcacagtagcggcgaggaggaggctacggacttggtgctgaccgcctccttcgagccggtaaacaccgaatgggtgccctttcgcgacgagaaatatcctcgcttggaagtactgcaggggtttgaacccgaaccggagattttaagcccactccagcctcccctctgcggccagactgtttgcgacaatgtagagctgattagccagtataatggatactggcctttgcgtggggagaaagtcattagataccaggtggtaaatatctgcgacgatgagggcttgaatccaattgtatccgaagagcaaatccgactccaacatgaagccttgaacgaagccttttcaaggtacaacatctcttggcagctttcagtccaccaggtccacaactccactttacggcatcgcgttgtactcgtgaattgcgagccctctaagatcgggaacgatcactgtgatcctgaatgtgaacatccactcactggttatgacggcggtgactgccggctgcaaggcaggtgctactcctggaatcggagggacggactctgccatgtggagtgcaataacatgcttaacgacttcgatgatggcgattgttgcgacccgcaggtggctgacgttcgaaagacttgttttgatcccgattccccgaaaagggcttatatgagtgttaaggagctgaaagaggcactgcaactgaactccacccatttcctcaatatttactttgctagtagtgtccgtgaagacctggccggtgccgctacatggccctgggataaagacgccgtaacccatttgggtgggatcgtgctaagtccagcgtactacgggatgcccggacataccgataccatgatccacgaggtcgggcacgtgttagggctctatcatgtgtttaaaggcgtgtccgagagggagtcttgcaacgacccctgcaaggagaccgtacctagtatggaaaccggtgacctgtgcgcggatactgccccaacaccaaaatcagaactgtgccgagagccagaacctacctcagacacttgtggcttcactcgatttcctggcgctccattcactaactatatgagctataccgatgacaactgtacagataatttcacacccaatcaggtagcaaggatgcactgttacctggacctcgtttaccagcagtggacagagagccgaaagcccacacctataccaatccctcccatggtgattggtcagaccaacaaaagtctgacaatccattggctgcccccaatctcaggagttgtctatgaccgggcatcaggatccctgtgcggggcatgcacagaggatggaaccttccgccaatacgttcataccgcttcatcaagacgcgtgtgcgattctagtggatattggaccccggaggaagccgtcgggccacctgacgtcgaccagccgtgtgagccttcacttcaggcatggtccccagaggtgcatctataccacatgaatatgacagtcccatgtcctacagagggctgtagcctggaactgttgttccaacaccccgtccaggctgatactttgacactctgggtcacatctttctttatggagagcagccaggtgctctttgacactgaaattctgctggaaaataaggagtctgtgcatctgggacccctggacactttttgtgacatccctttgactattaagctccatgtggatggtaaagtttctggcgtcaaggtttacacctttgacgaacgaatagagatcgacgctgctctgctgaccagtcagccccactcaccactgtgtagtgggtgcagacccgtacgctatcaggtactgagagatcctccttttgcttctgggctgcctgttgtcgtcacccactctcatagaaagtttacagatgtcgaggtcacgccagggcagatgtatcagtaccaggtcctagcagaagctggaggcgaactcggagaagcatcaccaccccttaatcacattcatggcgcaccatactgcggggatggaaaagtatccgagcggctcggagaagagtgcgacgacggtgacctggtatcaggagatggctgctccaaggtttgcgagttagaagagggctttaactgcgtgggcgagcctagcctgtgctacatgtacgaaggggacggcatctgcgaacccttcgagagaaagacatcgattgtggactgtggcatatatacacccaaggggtatctggatcagtgggcaaccagggcttatagctctcatgaggacaaaaagaaatgcccagtgagcctcgtcaccggggagccacactctctcatctgcaccagctaccacccagatctccccaatcacagaccgctgacagggtggttcccatgcgtggcctcagaaaatgagacacaggatgatagaagcgaacagcctgagggaagcctgaagaaggaggatgaggtgtggttaaaagtgtgcttcaaccgtccgggagaggcccgtgctatcttcatctttctaacaactgacggactggtgccaggagagcatcagcagcccacagtaaccctgtatcttaccgacgtgcggggatctaaccactcactggggacctatggcctttcttgtcagcataacccactaatcataaacgtcacacatcatcagaatgtactgttccaccacactaccagtgtgcttctaaacttttcgtcccccagagtgggtatcagcgctgttgcactcaggactagtagcagaatcggcctcagtgccccatcaaattgcatctccgaagatgagggacagaatcatcagggacagtcatgcatccatcggccttgcggtaagcaggactcctgtccaagcctcctcttagaccacgccgatgtggttaactgtacctctatcggacctggcctgatgaaatgcgctatcacatgtcagagagggtttgctttgcaggctagttcgggacagtacattcggcctatgcagaaggaaattctccttacctgttcctcaggtcactgggaccagaacgtctcttgcctcccggttgattgcggagtgcctgatccgtccctggtgaactatgccaacttctcgtgcagtgagggtaccaaattccttaaaagatgctctatcagttgcgtgccccctgcgaaattacaggggctttcgccatggttgacctgtctggaggatgggctgtggtccctgcctgaggtctattgtaagctggaatgtgatgctcctcctatcatactgaacgcaaatctgttgctaccacactgcctacaagacaaccacgatgtgggtaccatttgtaaatatgaatgcaagccaggctactacgtggcagaatccgctgaggggaaggtgagaaataaattattgaaaatccagtgcctcgaggggggtatctgggagcaaggatcttgtattccagttgtatgtgagcccccaccgcctgtgttcgaagggatgtacgagtgcactaatggcttctccctcgatagtcagtgcgttctgaattgtaatcaggagcgcgagaaactccccatcctctgcacaaaagaaggcctctggacccaagaattcaagctgtgcgaaaatctgcagggcgagtgccctccaccgccatctgaactgaactctgttgagtataagtgcgaacagggttacggaattggagccgtgtgctctccactctgtgtcattccaccatctgaccctgttatgcttccagagaatatcaccgctgatactctggagcactggatggagccagtaaaggtgcagagcatcgtttgtaccggacgcagacagtggcatcccgaccctgttctggtgcactgcattcagagttgtgagccattccaggcagatggctggtgcgataccatcaataaccgagcatattgccactacgacggaggcgactgctgcagctctactctcagcagcaagaaggtaattcctttcgcagccgactgtgacttggacgaatgtacgtgcagggatcctaaagccgaagagaatcagtat

SEQ ID NO: 298656 - DNA, 5376 bp, Artificial Sequence
  derived and/or modified sequence
atgatgtgcttgaaaattctgaggatatccctagcaattctcgctgggtgggccttgtgctctgcaaactcagaactaggttggaccagaaagaaatccctggtcgagcgggagcacttgaatcaggtgttactcgagggcgagcgctgctggttaggagccaaagtgcgccggccacgagcttccccacagcaccatctgtttggagtgtaccctagtcgagccgggaattatctgcggccgtatcccgtaggcgagcaagagattcatcacactggaagaagtaagcccgacacagagggcaacgctgtgtcactcgtgccccccgatctgacagagaaccctgccggcttgcgaggggccgtggaggagcctgctgccccttgggtgggcgactcccctatcggtcagtcagagctgctgggggacgatgatgcctatctcggcaatcagcgaagcaaagagtcgctgggcgaagcaggtatacagaaaggctccgctatggctgctaccactacgaccgcaatattcacgaccttgaacgagcccaaacccgagacccaaaggagaggctgggccaaaagtaggcagcggaggcaagtttggaaacggcgcgctgaggacggacagggcgatagcggcatttcctcccacttccagccctggcccaaacactcccttaagcacagggtgaagaagtctccccccgaggaatctaaccaaaacggcggcgagggttcttatcgggaagcagaaaccttcaatagccaggtgggtttacccatcctttacttttctggcagacgcgaacgtctgctgctgcgccccgaagtgctggcagagatccctagggaagcattcaccgtggaggcatgggtaaagccagagggcggccagaataaccctgccatcatcgctggggtattcgataattgctcacacacagtatccgacaagggttgggccctaggcattcgaagcggtaaggataagggaaaacgagatgctaggtttttcttttctctttgtactgatcgcgttaagaaggctacaatcctcatctcgcattcgcgctaccaaccaggaacatggacccacgttgccgccacatacgacggccggcacatggccctgtacgttgacggaactcaggtggccagttccctcgatcaaagcggtcctttaaacagcccatttatggcttcgtgcagatctcttttactaggaggagattcttcagaggatggccactacttccggggccacctgggaactctggtattttggtctactgcccttccccagtcgcactttcagcacagcagccaacacagcagcggggaagaagaagctacggatctggtactaaccgcgagctttgaacctgtgaacacagaatgggttcctttccgggatgaaaagtacccccggctggaagtattacaaggattcgaaccagagcctgagattctttcaccactgcagccacccctctgcggccagaccgtttgtgacaacgtcgagcttataagccagtacaacggctattggcccctcagaggggaaaaggtcatccggtaccaggtcgttaatatttgtgacgatgaagggctgaatcctatcgtctctgaagagcaaatcagattacaacatgaagctctgaatgaagctttctcccgatataatatttcttggcagctgtccgtgcaccaagtgcacaactccactctccggcaccgcgtggtcctggttaattgtgagccctctaaaattggaaacgaccactgcgatcccgagtgtgaacaccccctgaccggttatgacggcggagattgcagattgcaaggcagatgctatagttggaatagacgcgatggcctttgtcatgtggaatgcaataatatgttaaatgacttcgacgacggtgattgctgtgacccccaggtcgcagatgtgcggaaaacctgtttcgacccagacagtcccaagagggcctacatgagcgtgaaagagctgaaggaggctcttcaacttaattccacccatttcttaaacatttactttgcatccagtgtccgagaagatcttgcgggagcggccacctggccttgggataaagatgctgtaactcatctgggcggcatcgtgctgtcccccgcttattatggaatgcccgggcatactgacactatgatccacgaagtgggccacgtcctgggactataccacgtgttcaaaggcgtgagtgaacgagagtcctgtaatgatccctgtaaagagactgtgccttccatggaaacaggggacctatgtgcagataccgcacccacacccaagtcggagctgtgtagagagccggaacctacatctgatacctgtgggttcacgcgttttccaggcgctccattcacgaattatatgtcctataccgacgataactgcaccgacaatttcactcccaatcaagtcgcccggatgcactgctacctagatctcgtatatcagcaatggacagaatctaggaagcccacccctatccctatcccaccaatggtgatcggtcaaacaaataaatcactcacaattcactggctacccccaatctcaggggtcgtgtatgatcgtgcaagcggcagtctctgtggagcatgcacggaggacggcacatttagacagtatgtgcatactgcttcatctcgacgagtatgtgattccagcggctattggactcctgaggaagccgtgggcccccccgacgtggaccagccctgtgaaccatcactgcaggcttggagccccgaagtgcacctgtatcatatgaatatgaccgttccatgtccaaccgagggctgttccctggaattgttgtttcagcaccctgtacaggccgatactctgactttatgggtaacatctttcttcatggaatcttcccaggtgctctttgatacagagattctgctggaaaacaaagagagcgtgcacctcggccctcttgacaccttctgtgacatacccttgaccatcaagttgcacgtcgacggtaaagtgtccggcgttaaagtttacaccttcgatgagcgcatcgagatcgacgcagcgctgctcacaagccagccccacagcccactgtgctccgggtgtaggcccgtgaggtatcaggtgcttcgcgatcccccttttgcgagcggcctgcctgtggtcgtgacgcacagtcataggaagttcactgatgttgaagtgacccctggccagatgtaccagtaccaggtcctggctgaggccggaggagaactgggggaggcttctccacccttaaatcatatccatggcgccccgtactgcggggacggcaaagtttctgagagactaggcgaagaatgcgatgacggcgaccttgtctcgggagatggatgtagcaaagtctgtgaactggaggaggggttcaattgcgtgggagagccctctctgtgctacatgtatgaaggcgacgggatttgcgaaccattcgagcgcaaaacttccatcgtggattgcggcatttacactccaaaggggtatctggatcaatgggcgaccagagcctattcaagccatgaggataaaaagaaatgcccagtaagcctcgtgactggggagccacactcactcatctgtacgagttaccatccggaccttccaaatcaccggccgttgaccgggtggttcccgtgcgtggcctcagagaacgagacccaggacgatagaagcgaacaacctgaggggtccttgaagaaggaggatgaagtgtggctgaaggtctgcttcaaccgccctggcgaagcaagagccatctttatttttttaaccaccgatggcctcgtcccgggggagcaccaacagccaactgtcacgctgtacctcacagacgtgcgtgggagcaatcattctctgggaacatacggcctgagctgccagcacaacccattgattatcaatgtgacccaccaccagaacgtgttatttcaccacactactagcgtgttgctcaatttcagttcgcctagagttggtatctccgccgtggcgttacgaacttcctcgagaattgggctatccgcgccctctaactgcatctcagaggatgagggtcagaatcatcaggggcagagctgcatccaccgtccttgcggtaagcaagatagttgcccaagcctgctgcttgatcatgccgacgtggtgaactgtacctccataggacccggcttgatgaagtgtgccattacgtgccaacgtggttttgcactacaggcctcctcgggacagtatataaggcccatgcaaaaggaaatcctgctaacctgcagctccggacactgggatcaaaatgtatcatgtctgccagttgattgtggtgtcccagatcctagtctcgtcaactacgcgaacttctcctgttcagaagggactaaatttctgaaacgctgcagcatatcttgtgtcccccctgccaaactgcaggggcttagcccgtggctcacctgcctggaggacggactgtggtccctgccggaggtgtactgtaagctcgaatgtgacgcccctccaatcattctgaatgccaatttgctactgccacattgcctccaagacaaccacgatgtgggaaccatctgtaagtacgaatgcaagccaggctactacgtggcagagtccgccgagggtaaagtgagaaataagctgttgaaaattcagtgtctggagggtggaatttgggagcaaggatcctgcattcctgtcgtatgtgaacctcccccccccgtgtttgaggggatgtacgaatgtacaaacggattctctctcgactcccaatgtgtcctaaattgtaatcaggagagagagaaactgcctatactgtgtaccaaagaaggactgtggacgcaggaattcaagctgtgtgagaatttacaaggagagtgccctcctcctccctctgagctgaactccgtcgaatacaagtgcgagcagggctacggtattggagccgtgtgttcccccttgtgcgttattccaccctcggatccagttatgcttccagagaacataacggctgacacccttgaacattggatggaacccgtgaaagtacagtccatcgtttgcaccggcaggcgacaatggcacccagaccctgtgctggtgcactgcatacaatcctgcgagcctttccaggcagacgggtggtgtgacactataaataatagggcctactgccactacgacggaggagattgttgcagcagtaccctgtctagtaagaaggtgatcccattcgctgctgattgcgatctggatgagtgcacatgtcgagacccaaaagcagaggagaatcaatag

SEQ ID NO: 298657 - DNA, 5376 bp, Artificial Sequence
  derived and/or modified sequence
atgatgtgcctgaaaatcctgcgtattagtttggccattttggcagggtgggcactgtgttcggcaaatagtgaactcggttggacaagaaagaagtccctggtcgaacgagagcacctgaatcaagtcctgctggagggggagcgatgttggctcggcgcgaaggtgagaagaccgcgggcctcacctcaacatcaccttttcggggtgtatcctagccgagctggaaattacctgcggccatatcccgtgggggagcaagaaatacatcacactggaaggagcaaacccgacaccgaggggaacgccgtctccctcgtgccgcctgatctcactgaaaatccagccggcctgagaggagcggtcgaggagccagccgcaccgtgggtaggcgattccccgatcggacagagtgagctcctgggtgatgatgacgcttatcttggtaaccagcgatcaaaggaatccttaggcgaagctggaatacaaaagggctctgcaatggccgccaccaccaccaccgccattttcaccactctgaacgaacccaagccagaaacacaaagaaggggatgggcaaaaagtcgccagcgtagacaagtatggaaacgtcgggcagaggacggacaaggcgattctgggataagctcacattttcaaccttggcccaagcactcactgaagcaccgagtaaagaagtcccctccagaagaatccaatcaaaatgggggagagggaagttacagagaagcagagactttcaacagccaagtcgggctccccatcctatacttctccggcaggagagagagattgttgctgcggcctgaagtacttgcagagatacctcgggaggcattcaccgttgaggcatgggtgaaaccagagggaggacaaaataaccctgccatcatcgctggggtattcgataattgctcacacacagtatccgacaagggttgggccctaggcattcgaagcggtaaggataagggaaaacgagatgctaggtttttcttttctctttgtactgatcgcgttaagaaggctacaatcctcatctcgcattcgcgctaccaaccaggaacatggacccacgttgccgccacatacgacggccggcacatggccctgtacgttgacggaactcaggtggccagttccctcgatcaaagcggtcctttaaacagcccatttatggccagttgcagatccttgttactaggcggcgacagttccgaggacggacattattttagaggccatcttggcacattggttttttggagcactgctctaccacagtcccactttcaacatagctcacagcatagcagcggagaagaggaagcaaccgacctggtgctgacagcctctttcgaacctgttaatacggagtgggtcccatttcgtgacgaaaagtaccccagactcgaggttctgcagggtttcgaacccgagcccgagatcctgagccctttacagccccctctctgcggacagaccgtgtgtgacaacgtggaacttatctcacagtataacggatactggcctctgagaggtgaaaaagtaattagataccaagtggtgaacatatgcgacgacgaaggattgaatccgatagtatcagaggagcagattagacttcagcatgaggctctgaatgaggctttctcccgctataacatcagctggcaattatcagttcatcaggtgcacaacagcacattaagacaccgagttgtgctcgtcaactgcgaacccagtaaaatcgggaacgaccactgtgacccagaatgtgaacatccattaacagggtatgacgggggagactgtcgcttgcagggtagatgctattcctggaatagaagagacggtttgtgccacgttgaatgtaacaatatgctgaacgacttcgacgacggcgattgttgtgatccacaggtagcagatgtgcgtaagacttgctttgatccggacagtcccaaacgagcctatatgagcgtgaaagaactcaaagaggcactccagctcaattccactcactttttgaatatctatttcgcttcctcagttcgggaggatctcgctggggcagcaacatggccttgggacaaggacgcagtcacacacctgggaggaatcgtgctgagtcccgcatattatggtatgcctggtcacacagacaccatgatacacgaagtaggacatgtcctggggctgtaccacgtgtttaaaggtgtgagcgagcgagagagttgcaatgacccttgcaaggagaccgtaccatcaatggagaccggagatctgtgcgccgatactgcccctacccctaagtccgagctgtgtagagagcccgagccaactagtgacacatgcggattcactagatttccaggcgcccctttcacaaattacatgtcttacacagatgacaactgtaccgacaactttacccctaaccaggtcgccaggatgcattgttatcttgacctcgtctatcagcagtggacggaatcacgcaaacctaccccaattccaatcccacccatggttattggccagaccaataaatccctaacaattcactggctgcctccaatttcaggtgtcgtgtacgatagagcctctggctccctttgtggtgcctgcactgaggacggaacttttagacaatatgtacatacagcttcttccaggagagtgtgcgactctagtggctactggacccctgaagaagccgtgggcccccccgacgtggaccagccctgcgaacctagtcttcaagcctggtctcccgaagtgcatctgtaccatatgaacatgaccgtgccatgccctaccgaggggtgcagcctcgaactgctgttccagcacccagtgcaagccgatactctgaccttatgggtgacatcattcttcatggaaagttcacaggtacttttcgatacagaaatccttctggagaacaaagagtccgtgcaccttggccccctcgacaccttttgtgacataccacttaccattaaattacacgtcgatggtaaagtctcaggcgtgaaagtgtatacattcgacgagcgtattgagatcgacgctgccctcctgacaagtcagccccacagtccactttgttccggctgccgccccgttagataccaagtgctgcgagaccccccatttgccagcggacttcctgtggttgtgacacactctcaccggaaatttacagacgtagaagtgacccccggtcaaatgtaccagtaccaggtactagctgaagctggaggagagctgggcgaagccagtccccccctgaaccacattcacggcgccccctattgtggtgacggcaaggtcagtgagcgactgggtgaagaatgtgatgatggtgatttggtttcaggagatggctgcagcaaagtctgtgaacttgaagaaggttttaactgcgtcggagaaccaagtctctgctatatgtatgagggagatggtatttgtgaaccattcgaaagaaaaacctccatcgtcgattgtggaatctacaccccaaagggttatcttgatcaatgggcaacccgtgcctacagttcacatgaagataagaaaaagtgccccgtcagtcttgtgacaggagaacctcatagtctaatttgtacctcctaccaccccgacctgccaaaccatcgccctctgaccggctggtttccttgtgtcgccagcgagaatgagacccaggatgataggtctgaacagccagaaggttctctcaaaaaagaagacgaggtgtggcttaaagtttgcttcaatcgccccggtgaggctcgagctatcttcattttcctgacaaccgacggactggtccccggcgagcaccaacaacccaccgtcaccctctacttgaccgatgtgcgtggttcaaatcactcgctgggcacatatggcctttcatgtcagcataatccattgatcattaatgttacccaccaccagaacgtcctctttcaccacactacatctgttctgctgaacttttcatcccctcgagtcggtatctccgccgtcgccctacgaacttcctccagaattggtctttcagcaccatcaaactgcatatctgaggatgagggacagaatcaccagggtcagtcatgcatacacagaccctgtggcaagcaagactcttgtccaagcctcctgcttgaccatgccgacgttgttaattgtacttccatcggtccaggacttatgaaatgcgcaatcacatgccagaggggatttgcgcttcaggccagttctggccagtatatccgccctatgcaaaaagaaatccttctcacctgcagctccggacactgggaccagaatgtgagttgcctccctgtcgactgcggagttcccgacccaagtttggtaaactacgcgaacttcagctgctccgagggaactaagtttctgaagcgatgctcaatttcctgcgtacctcccgccaagctgcagggcttgtccccgtggctcacgtgcctggaggacggcttgtggagcctgccagaagtgtactgcaaactcgaatgtgatgcaccgcctatcatcctgaatgctaatcttctgttaccccattgcctgcaggacaatcatgacgttgggactatatgcaaatacgagtgcaagccaggttattatgtcgccgaatccgctgaaggtaaagtccgcaataaactcctgaaaatccagtgtttagaagggggtatatgggaacaagggagctgtatacccgttgtgtgcgaacctcctccacccgttttcgaaggcatgtatgagtgtaccaatggcttctccctcgatagccagtgcgttttgaactgcaaccaggagcgcgaaaaattacctattctatgcaccaaagagggactctggacgcaagagttcaagctgtgtgagaatctgcagggagagtgtcctcctcctccctctgaactgaattctgtggagtacaagtgtgagcaggggtacggaataggcgcagtctgctcccccttgtgtgttattcctccaagtgaccccgtaatgttacctgaaaatatcaccgccgatacactggagcactggatggagcctgtcaaagtacagtctatagtgtgtacaggcaggagacaatggcacccggatccggttctcgtccactgtattcaaagctgcgagccattccaagccgacggatggtgcgatacaatcaataaccgggcatactgccattacgacggtggggactgttgcagctcgaccctcagttcaaaaaaggtgataccctttgccgcagactgcgatcttgacgaatgtacgtgtagagaccctaaggcagaagagaaccaatag

SEQ ID NO: 298658 - DNA, 5376 bp, Artificial Sequence
  derived and/or modified sequence
atgatgtgcctgaagatcctgagaatcagcctggccatcctggccggctgggccctgtgcagcgccaacagcgagctgggctggaccagaaagaagagcctggtggagagagagcacctgaaccaggtgctgctggagggcgagagatgctggctgggcgccaaggtgagaagacccagagccagcccccagcaccacctgttcggcgtgtaccccagcagagccggcaactacctgagaccctaccccgtgggcgagcaggagatccaccacaccggcagaagcaagcccgacaccgagggcaacgccgtgagcctggtgccccccgacctgaccgagaaccccgccggcctgagaggcgccgtggaggagcccgccgccccctgggtgggcgacagccccatcggccagagcgagctgctgggcgacgacgacgcctacctgggcaaccagagaagcaaggagagcctgggcgaggccggcatccagaagggcagcgccatggccgccaccaccaccaccgccatcttcaccaccctgaacgagcccaagcccgagacccagagaagaggctgggccaagagcagacagagaagacaggtgtggaagagaagagccgaggacggccagggcgacagcggcatcagcagccacttccagccctggcccaagcacagcctgaagcacagagtgaagaagagcccccccgaggagagcaaccagaacggcggcgagggcagctacagagaggccgagaccttcaacagccaggtgggcctgcccatcctgtacttcagcggcagaagagagagactgctgctgagacccgaggtgctggccgagatccccagagaggccttcaccgtggaggcctgggtgaagcccgagggcggccagaacaaccccgccatcatcgccggcgtgttcgacaactgcagccacaccgtgagcgacaagggctgggccctgggcatcagaagcggcaaggacaagggcaagagagacgccagattcttcttcagcctgtgcaccgacagagtgaagaaggccaccatcctgatcagccacagcagataccagcccggcacctggacccacgtggccgccacctacgacggcagacacatggccctgtacgtggacggcacccaggtggccagcagcctggaccagagcggccccctgaacagccccttcatggccagctgcagaagcctgctgctgggcggcgacagcagcgaggacggccactacttcagaggccacctgggcaccctggtgttctggagcaccgccctgccccagagccacttccagcacagcagccagcacagcagcggcgaggaggaggccaccgacctggtgctgaccgccagcttcgagcccgtgaacaccgagtgggtgcccttcagagacgagaagtaccccagactggaggtgctgcagggcttcgagcccgagcccgagatcctgagccccctgcagccccccctgtgcggccagaccgtgtgcgacaacgtggagctgatcagccagtacaacggctactggcccctgagaggcgagaaggtgatcagataccaggtggtgaacatctgcgacgacgagggcctgaaccccatcgtgagcgaggagcagatcagactgcagcacgaggccctgaacgaggccttcagcagatacaacatcagctggcagctgagcgtgcaccaggtgcacaacagcaccctgagacacagagtggtgctggtgaactgcgagcccagcaagatcggcaacgaccactgcgaccccgagtgcgagcaccccctgaccggctacgacggcggcgactgcagactgcagggcagatgctacagctggaacagaagagacggcctgtgccacgtggagtgcaacaacatgctgaacgacttcgacgacggcgactgctgcgacccccaggtggccgacgtgagaaagacctgcttcgaccccgacagccccaagagagcctacatgagcgtgaaggagctgaaggaggccctgcagctgaacagcacccacttcctgaacatctacttcgccagcagcgtgagagaggacctggccggcgccgccacctggccctgggacaaggacgccgtgacccacctgggcggcatcgtgctgagccccgcctactacggcatgcccggccacaccgacaccatgatccacgaggtgggccacgtgctgggcctgtaccacgtgttcaagggcgtgagcgagagagagagctgcaacgacccctgcaaggagaccgtgcccagcatggagaccggcgacctgtgcgccgacaccgcccccacccccaagagcgagctgtgcagagagcccgagcccaccagcgacacctgcggcttcaccagattccccggcgcccccttcaccaactacatgagctacaccgacgacaactgcaccgacaacttcacccccaaccaggtggccagaatgcactgctacctggacctggtgtaccagcagtggaccgagagcagaaagcccacccccatccccatcccccccatggtgatcggccagaccaacaagagcctgaccatccactggctgccccccatcagcggcgtggtgtacgacagagccagcggcagcctgtgcggcgcctgcaccgaggacggcaccttcagacagtacgtgcacaccgccagcagcagaagagtgtgcgacagcagcggctactggacccccgaggaggccgtgggcccccccgacgtggaccagccctgcgagcccagcctgcaggcctggagccccgaggtgcacctgtaccacatgaacatgaccgtgccctgccccaccgagggctgcagcctggagctgctgttccagcaccccgtgcaggccgacaccctgaccctgtgggtgaccagcttcttcatggagagcagccaggtgctgttcgacaccgagatcctgctggagaacaaggagagcgtgcacctgggccccctggacaccttctgcgacatccccctgaccatcaagctgcacgtggacggcaaggtgagcggcgtgaaggtgtacaccttcgacgagagaatcgagatcgacgccgccctgctgaccagccagccccacagccccctgtgcagcggctgcagacccgtgagataccaggtgctgagagacccccccttcgccagcggcctgcccgtggtggtgacccacagccacagaaagttcaccgacgtggaggtgacccccggccagatgtaccagtaccaggtgctggccgaggccggcggcgagctgggcgaggccagcccccccctgaaccacatccacggcgccccctactgcggcgacggcaaggtgagcgagagactgggcgaggagtgcgacgacggcgacctggtgagcggcgacggctgcagcaaggtgtgcgagctggaggagggcttcaactgcgtgggcgagcccagcctgtgctacatgtacgagggcgacggcatctgcgagcccttcgagagaaagaccagcatcgtggactgcggcatctacacccccaagggctacctggaccagtgggccaccagagcctacagcagccacgaggacaagaagaagtgccccgtgagcctggtgaccggcgagccccacagcctgatctgcaccagctaccaccccgacctgcccaaccacagacccctgaccggctggttcccctgcgtggccagcgagaacgagacccaggacgacagaagcgagcagcccgagggcagcctgaagaaggaggacgaggtgtggctgaaggtgtgcttcaacagacccggcgaggccagagccatcttcatcttcctgaccaccgacggcctggtgcccggcgagcaccagcagcccaccgtgaccctgtacctgaccgacgtgagaggcagcaaccacagcctgggcacctacggcctgagctgccagcacaaccccctgatcatcaacgtgacccaccaccagaacgtgctgttccaccacaccaccagcgtgctgctgaacttcagcagccccagagtgggcatcagcgccgtggccctgagaaccagcagcagaatcggcctgagcgcccccagcaactgcatcagcgaggacgagggccagaaccaccagggccagagctgcatccacagaccctgcggcaagcaggacagctgccccagcctgctgctggaccacgccgacgtggtgaactgcaccagcatcggccccggcctgatgaagtgcgccatcacctgccagagaggcttcgccctgcaggccagcagcggccagtacatcagacccatgcagaaggagatcctgctgacctgcagcagcggccactgggaccagaacgtgagctgcctgcccgtggactgcggcgtgcccgaccccagcctggtgaactacgccaacttcagctgcagcgagggcaccaagttcctgaagagatgcagcatcagctgcgtgccccccgccaagctgcagggcctgagcccctggctgacctgcctggaggacggcctgtggagcctgcccgaggtgtactgcaagctggagtgcgacgccccccccatcatcctgaacgccaacctgctgctgccccactgcctgcaggacaaccacgacgtgggcaccatctgcaagtacgagtgcaagcccggctactacgtggccgagagcgccgagggcaaggtgagaaacaagctgctgaagatccagtgcctggagggcggcatctgggagcagggcagctgcatccccgtggtgtgcgagccccccccccccgtgttcgagggcatgtacgagtgcaccaacggcttcagcctggacagccagtgcgtgctgaactgcaaccaggagagagagaagctgcccatcctgtgcaccaaggagggcctgtggacccaggagttcaagctgtgcgagaacctgcagggcgagtgcccccccccccccagcgagctgaacagcgtggagtacaagtgcgagcagggctacggcatcggcgccgtgtgcagccccctgtgcgtgatcccccccagcgaccccgtgatgctgcccgagaacatcaccgccgacaccctggagcactggatggagcccgtgaaggtgcagagcatcgtgtgcaccggcagaagacagtggcaccccgaccccgtgctggtgcactgcatccagagctgcgagcccttccaggccgacggctggtgcgacaccatcaacaacagagcctactgccactacgacggcggcgactgctgcagcagcaccctgagcagcaagaaggtgatccccttcgccgccgactgcgacctggacgagtgcacctgcagagaccccaaggccgaggagaaccagtag

SEQ ID NO: 298659 - DNA, 5376 bp, Artificial Sequence
  derived and/or modified sequence
atgatgtgcctgaagatcctcagaatttcgctggcaattttggcaggatgggcattatgcagcgccaattcggagctgggatggacccgaaaaaaatctctggtggagagagagcatttgaaccaggtgcttctcgaaggcgagagatgttggcttggagccaaggtccgtcgcccaagggctagcccacagcatcatctgttcggcgtgtacccaagccgtgccggcaactatctgaggccgtacccagtgggggagcaggagattcaccatacaggccggtccaaacccgatactgagggcaatgccgtctccctggttccgccagaccttaccgagaatcccgctggcctccgcggcgccgtcgaggagccagctgccccctgggtgggggatagtccgattggccagtccgaactacttggcgacgatgacgcttacctgggcaaccagcggtctaaggagtctctcggggaagcaggaattcagaaaggctccgcaatggctgcaaccacaactacagccatttttactactttgaatgaacctaagccagaaactcagcgccgcgggtgggctaaaagccgacagcgcagacaggtctggaagcgccgagccgaagatggccagggagactccggtatttcctcacattttcagccctggcctaagcacagcttgaagcacagggtcaagaaatctcctcctgaggaatcaaatcaaaatggaggggaagggtcttaccgtgaggcagaaacttttaactctcaggttggtctccccattctgtatttctctggcagaagagagagactgctcctccgccctgaggtcttggccgagattccccgggaggcctttactgtggaagcctgggtcaaacccgagggtggccagaataacccggccattatcgcaggtgtatttgataattgctctcacaccgtgagcgacaaggggtgggcgctgggcattagatccggcaaagacaaagggaaacgcgatgctcgatttttctttagtttatgcaccgaccgggtgaagaaggccaccatcttgatttcccattcgcggtatcaaccggggacatggactcatgttgccgccacctatgatggccgccacatggcactgtacgtcgacgggacccaggtagcatcatcactcgaccagtctggccccctcaatagtccctttatggcttcctgtaggtcacttttgttgggaggagactctagcgaggatggccactacttccgaggacacctgggtacgttagtcttttggtctaccgcactcccacagagccatttccagcattcaagccagcacagctctggggaagaggaggccactgacttagtcttgaccgcctcatttgagcccgtgaatactgagtgggttcccttcagggacgaaaaatatccacgactcgaagtcctccaggggtttgaaccagaaccggaaattctcagtcctttgcaaccgcctctttgcggccagaccgtatgtgacaatgtagagctgatttcccagtacaacggctattggccactccgtggggagaaggtcattagataccaggtggtgaacatttgtgatgatgagggattgaacccaatcgtctccgaggaacagataagactgcagcatgaggctctcaatgaagcattctccagatataacatatcatggcagctgagcgtgcaccaagttcataactccaccctgaggcacagggtagtgctagtaaactgtgagccaagcaagatcggcaacgatcactgtgacccggagtgtgaacacccactgacggggtacgacggtggagactgtcgccttcagggtcggtgttacagctggaacagaagggacggtctgtgtcatgttgagtgcaataacatgctgaacgatttcgacgacggtgactgctgtgatccccaagtggcagatgtccgaaaaacttgtttcgatcctgatagccccaagcgtgcatacatgtccgttaaggaactgaaggaagccctgcaactgaactcaacacatttcctgaatatttatttcgctagcagtgtgcgggaagacctcgccggagctgctacatggccttgggacaaggacgcggtgactcacttaggcggtatcgtcctcagcccggcctactacggaatgcccggccacactgacaccatgatacacgaagtcggtcacgtgctgggcctataccacgtgtttaagggcgtaagtgagagagagtcttgcaacgatccatgtaaggagacggtgccatcaatggaaaccggcgacctctgtgctgatactgcccctacccccaagagtgagctttgtcgcgagcctgagcctacatcggacacatgtggttttacgagattcccaggggctccattcaccaattacatgagctacaccgatgataactgtacagataacttcacacccaatcaggtggcgcgcatgcactgctaccttgatcttgtctatcagcagtggactgaaagcaggaaaccgacccctatcccgatcccacccatggtgatcggtcagaccaacaaatctcttaccattcattggcttcctcccattagcggagtcgtatacgacagagcgagcggctctctgtgtggggcctgtaccgaagatggcaccttccgacaatatgtgcacacggcttcaagcaggagggtctgcgactccagcgggtactggacgccagaggaggcggtgggaccacctgacgtggatcaaccttgtgaaccttcactgcaggcttggtctcccgaggtgcatctatatcatatgaacatgacagtgccgtgcccgactgagggatgttcactggaactactgttccaacacccagtgcaggccgacactctgactttatgggtcacaagcttctttatggaatccagtcaggtgctcttcgacacagagatattgttagagaacaaagagtcagttcatctgggacctctagacaccttctgcgatatccccctgacgatcaagttacacgtggatgggaaagtttctggggtcaaagtgtacacctttgacgagcgcatcgaaatcgacgctgcgctgcttactagtcagccccattcacctctttgcagtggttgccgccccgtgcgataccaggtgctccgggacccgcccttcgcaagcggcctccccgtggtggttacacactctcacagaaaattcaccgatgtcgaggtcacccccggtcagatgtatcaatatcaggtgctggccgaggccggaggggaacttggtgaagctagtccaccccttaaccatattcacggtgcaccatattgcggagatggcaaggtgagcgagcgcctgggagaggaatgtgatgacggcgacctggtctccggagatgggtgcagtaaggtgtgtgagcttgaagaaggcttcaattgtgtgggagagccatctctgtgctacatgtatgaaggtgacggtatatgcgaaccatttgagagaaaaacatcaatcgtcgactgtgggatttacacaccaaaggggtatcttgaccaatgggcgactcgggcttactcaagccatgaagacaaaaaaaagtgcccagtctcattagtgactggcgagccacacagtctaatttgcacaagctaccatcccgatctgccaaaccaccgtcctctgaccgggtggttcccctgcgtggcaagcgagaatgaaactcaagacgaccgcagcgaacagccagagggctcgttaaaaaaggaagacgaagtgtggctgaaggtatgtttcaatcggcctggcgaggcccgtgccattttcatcttcctgacaaccgacggccttgttcctggcgaacatcaacagcctaccgtgaccctgtatctcacagatgtgcggggatcaaatcactccctgggaacatacggcctttcatgtcagcacaatccactgatcatcaacgtgactcaccatcaaaacgtcttgtttcaccacaccacaagcgtgctgcttaattttagttctccgcgcgtggggatcagcgcagtcgctctgaggacttcttctaggattggtttgtcagcgccaagcaattgcatctcagaggacgaaggccagaaccaccagggccagtcgtgcattcatcggccgtgcgggaaacaggactcttgcccctcccttctgctcgatcacgcagacgtcgtcaattgtaccagcattggtcccggactgatgaagtgcgcaatcacttgtcaacgcggtttcgcacttcaggctagtagtgggcagtacatccgcccaatgcagaaggaaatactgctcacatgctccagcgggcactgggaccaaaatgtatcttgtctccctgttgattgtggggtccccgacccatctcttgttaattacgctaacttctcgtgcagcgaagggaccaaatttctgaaacggtgtagtatctcttgtgtccctcctgccaagctacagggattatccccctggctgacatgtctggaggatggtttatggtctttgcccgaggtatactgcaagctggagtgtgatgccccaccgattatactgaatgctaacttgctcttaccacattgtctacaggataaccacgacgtcgggacgatctgtaagtatgaatgcaagcccggctattacgtggcagaatctgccgaggggaaggtgcgcaataaactgttgaaaattcaatgccttgaaggggggatctgggagcagggttcctgcattcctgtcgtatgcgagccccccccgccagtcttcgagggcatgtatgagtgtacaaacgggttctctttagacagccagtgcgttcttaattgcaaccaggagagagagaagctgccaatactttgtaccaaagaggggctatggacccaggaattcaaactatgtgaaaacttacagggggaatgtccccctccccccagcgaactgaattccgttgaatataagtgtgagcaaggttatgggatcggggcagtctgctcaccactgtgcgtcatacctccgtccgacccagtgatgcttcctgagaacataaccgctgatacacttgagcattggatggagccagtcaaggtccagagcatagtgtgcaccggccgccggcaatggcatcccgaccctgttcttgtgcactgtatccaatcttgcgagccattccaggctgacggatggtgcgacaccatcaataaccgtgcttactgtcattacgatggtggggactgttgttcttctactttatcctcaaaaaaggtaatccccttcgcagcagactgcgacctggatgaatgtacttgcagggaccctaaagctgaggaaaatcagtag

SEQ ID NO: 298660 - DNA, 9685 bp, Artificial Sequence
  derived and/or modified sequence
gggcatgactctctctcttgagtaggcacacactcccttttctcgggtgtgtactttttgctttgtgatacatctctgcactttcagtattttccaactcatccttaaattccttctcacaacagtgtcaagagcctggacgccagccaggattgaggtcctacgggtgtttggggacctccccaagcccacgagtatcaatggcagtatcaattgtctgtgacagtgattaaggagcaaaacacttggaacccacaagactcccagaaggtgaagttaagagctcccagactcataaggttattagaacagcaaactggcaccccaaagaactttacggagacttgcaacctatcaacaagttggatgagggattaaaagccttcaacaaccaacaaccccaagcatcaaactgaaggaaacattctaaccttcacagacagactggaggctggatggggacctggctgaagacatctggagaatgaaagttaagtaccagcttgcatttttgtgcccctagattatttttgcattttaaaataagaagcatcaaattgcgtgtctctgtgtaaaagttctagcaatttgttttaaggtgaacttattttggcttagggactacaaaaagagaaggtaattcctagggaaggaagaagagaaagaaatgaaaattagagaataagattattttgaatgacttcaggtagcgaggagtgtgtgtttgtgagtgtgtatttgagagacttggctcatgcctgtgggtcttctcttctagtatcagtgaggggagggattactgaagaagaaggggggaaaaaaaaagaaagaaatctgagctttctgggaggaaattcaaaggaaccaagagaaattaacttcgttctgcaaggactaaagtacagcaagaggagagaggtcaagcgagaagcgtgcgggaagcacatgccctggggaggcatagaagccacactggcagagcggccagcacaggtagccagcagaggcattcttggggctatttgaaaaagtttggtctgtgaacaaaacagtttccctggtgactgcaaatccattgctagctgcctctttctcgtctgcccatcactctggtgtggtacccagaagttgacttctggttctgtagaaagagctaggggaggtatgatgtgcttaaagatcctaagaataagcctggcgattttggctgggtgggcactctgttctgccaactctgagctgggctggacacgcaagaaatccttggttgagagggaacacctgaatcaggtgctgttggaaggagaacgttgttggctgggggccaaggttcgaagacccagagcttctccacagcatcacctctttggagtctaccccagcagggctgggaactacctaaggccctaccccgtgggggagcaagaaatccatcatacaggacgcagcaaaccagacactgaaggaaatgctgtgagccttgttcccccagacctgactgaaaatccagcaggactgaggggtgcagttgaagagccggctgccccatgggtaggggatagtcctattgggcaatctgagctgctgggagatgatgacgcttatctcggcaatcaaagatccaaggagtctctaggtgaggccgggattcagaaaggctcagccatggctgccactactaccaccgccattttcacaaccctgaacgaacccaaaccagagacccaaaggaggggctgggccaagtccaggcagcgtcgccaagtgtggaagaggcgggcggaagatgggcagggagactccggtatctcttcacatttccaaccttggcccaagcattcccttaaacacagggtcaaaaagagtccaccggaggaaagcaaccaaaatggtggagagggctcctaccgagaagcagagacctttaactcccaagtaggactgcccatcttatacttctctgggaggcgggagcggctgctgctgcgtccagaagtgctggctgagattccccgggaggcgttcacagtggaagcctgggttaaaccggagggaggacagaacaacccagccatcatcgcaggtgtgtttgataactgctcccacactgtcagtgacaaaggctgggccctggggatccgctcagggaaggacaagggaaagcgggatgctcgcttcttcttctccctctgcaccgaccgcgtgaagaaagccaccatcttgattagccacagtcgctaccaaccaggcacatggacccatgtggcagccacttacgatggacggcacatggccctgtatgtggatggcactcaggtggctagcagtctagaccagtctggtcccctgaacagccccttcatggcatcttgccgctctttgctcctggggggagacagctctgaggatgggcactatttccgtggacacctgggcacactggttttctggtcgaccgccctgccacaaagccattttcagcacagttctcagcattcaagtggggaggaggaagcgactgacttggtcctgacagcgagctttgagcctgtgaacacagagtgggttccctttagagatgagaagtacccacgacttgaggttctccagggctttgagccagagcctgagattctgtcgcctttgcagcccccactctgtgggcaaacagtctgtgacaatgtggaattgatctcccagtacaatggatactggccccttcggggagagaaggtgatacgctaccaggtggtgaacatctgtgatgatgagggcctaaaccccattgtgagtgaggagcagattcgtctgcagcacgaggcactgaatgaggccttcagccgctacaacatcagctggcagctgagcgtccaccaggtccacaattccaccctgcgacaccgggttgtgcttgtgaactgtgagcccagcaagattggcaatgaccattgtgaccccgagtgtgagcacccactcacaggctatgatgggggtgactgccgcctgcagggccgctgctactcctggaaccgcagggatgggctctgtcacgtggagtgtaacaacatgctgaacgactttgacgacggagactgctgcgacccccaggtggctgatgtgcgcaagacctgctttgaccctgactcacccaagagggcatacatgagtgtgaaggagctgaaggaggccctgcagctgaacagtactcacttcctcaacatctactttgccagctcagtgcgggaagaccttgcaggtgctgccacctggccttgggacaaggacgctgtcactcacctgggtggcattgtcctcagcccagcatattatgggatgcctggccacaccgacaccatgatccatgaagtgggacatgttctgggactctaccatgtctttaaaggagtcagtgaaagagaatcctgcaatgacccctgcaaggagacagtgccatccatggaaacgggagacctctgtgccgacaccgcccccactcccaagagtgagctgtgccgggaaccagagcccactagtgacacctgtggcttcactcgcttcccaggggctccgttcaccaactacatgagctacacggatgataactgcactgacaacttcactcctaaccaagtggcccgaatgcattgctatttggacctagtctatcagcagtggactgaaagcagaaagcccacccccatccccattccacctatggtcatcggacagaccaacaagtccctcactatccactggctgcctcctattagtggagttgtatatgacagggcctcaggcagcttgtgtggcgcttgcactgaagatgggacctttcgtcagtatgtgcacacagcttcctcccggcgggtgtgtgactcctcaggttattggaccccagaggaggctgtggggcctcctgatgtggatcagccctgcgagccaagcttacaggcctggagccctgaggtccacctgtaccacatgaacatgacggtcccctgccccacagaaggctgtagcttggagctgctcttccaacacccggtccaagccgacaccctcaccctgtgggtcacttccttcttcatggagtcctcgcaggtcctctttgacacagagatcttgctggaaaacaaggagtcagtgcacctgggccccttagacactttctgtgacatcccactcaccatcaaactgcacgtggatgggaaggtgtcgggggtgaaagtctacacctttgatgagaggatagagattgatgcagcactcctgacttctcagccccacagtcccttgtgctctggctgcaggcctgtgaggtaccaggttctccgcgatcccccatttgccagtggtttgcccgtggtggtgacacattctcacaggaagttcacggacgtggaggtcacacctggacagatgtatcagtaccaagttctagctgaagctggaggagaactgggagaagcttcgcctcctctgaaccacattcatggagctccttattgtggagatgggaaggtgtcagagagactgggagaagagtgtgatgatggagaccttgtgagcggagatggctgctccaaggtgtgtgagctggaggaaggtttcaactgtgtaggagagccaagcctttgctacatgtatgagggagatggcatatgtgaaccttttgagagaaaaaccagcattgtagactgtggcatctacactcccaaaggatacttggatcaatgggctacccgggcttactcctctcatgaagacaagaagaagtgtcctgtttccttggtaactggagaacctcattccctaatttgcacatcataccatccagatttacccaaccaccgtcccctaactggctggtttccctgtgttgccagtgaaaatgaaactcaggatgacaggagtgaacagccagaaggtagcctgaagaaagaggatgaggtttggctcaaagtgtgtttcaatagaccaggagaggccagagcaatttttatttttttgacaactgatggcctagttcccggagagcatcagcagccgacagtgactctctacctgaccgatgtccgtggaagcaaccactctcttggaacctatggactgtcatgccagcataatccactgattatcaatgtgacccatcaccagaatgtccttttccaccataccacctcagtgctgctgaatttctcatccccacgggtcggcatctcagctgtggctctaaggacatcctcccgcattggtctttcggctcccagtaactgcatctcagaggacgaggggcagaatcatcagggacagagctgtatccatcggccctgtgggaagcaggacagctgtccgtcattgctgcttgatcatgctgatgtggtgaactgtacctctataggcccaggtctcatgaagtgtgctatcacttgtcaaaggggatttgcccttcaggccagcagtgggcagtacatcaggcccatgcagaaggaaattctgctcacatgttcttctgggcactgggaccagaatgtgagctgccttcccgtggactgcggtgttcccgacccgtctttggtgaactatgcaaacttctcctgctcagagggaaccaaatttctgaaacgctgctcaatctcttgtgtcccaccagccaagctgcaaggactgagcccatggctgacatgtcttgaagatggtctctggtctctccctgaagtctactgcaagttggagtgtgatgctccccctattattctgaatgccaacttgctcctgcctcactgcctccaggacaaccacgacgtgggcaccatctgcaaatatgaatgcaaaccagggtactatgtggcagaaagtgcagagggtaaagtcaggaacaagctcctgaagatacaatgcctggaaggtggaatctgggagcaaggcagctgcattcctgtggtgtgtgagccaccccctcctgtgtttgaaggcatgtatgaatgtaccaatggcttcagcctggacagccagtgtgtgctcaactgtaaccaggaacgtgaaaagcttcccatcctctgcactaaagagggcctgtggacccaggagtttaagttgtgtgagaatctgcaaggagaatgcccaccacccccctcagagctgaattctgtggagtacaaatgtgaacaaggatatgggattggtgcagtgtgttccccattgtgtgtaatcccccccagtgaccccgtgatgctacctgagaatatcactgctgacactctggagcactggatggaacctgtcaaagtccagagcattgtgtgcactggccggcgtcaatggcacccagaccccgtcttagtccactgcatccagtcatgtgagcccttccaagcagatggttggtgtgacactatcaacaaccgagcctactgccactatgacgggggagactgctgctcttccacactctcctccaagaaggtcattccatttgctgctgactgtgacctggatgagtgcacctgccgggaccccaaggcagaagaaaatcagtaactgtgggaacaagcccctccctccactgcctcagaggcagtaagaaagagaggccgacccaggaggaaacaaagggtgaatgaagaagaacaatcatgaaatggaagaaggaggaagagcatgaaggatcttataagaaatgcaagaggatattgataggtgtgaactagttcatcaagtagcccaagtaggagagaatcataggcaaaagtttctttaaagtggcagttgattaacatggaaggggaaatatgatagatatataaggaccctcctccctcacttatattctattaaatcctatcctcaactcttgccctgctctccgctccaccccctgccaactactcagtcccacccaacttgtaaaccaataccaaaatactagaggagaagttggcagggatactgttaatacccattttgaatggattgccatctttcagagcttgtctgctctcaactggctctttttctttttgtgtagtttcccttaaataatgaagttagttattaattctttataagtatttaaacataattatataaatatattatatatattatattttttgctgtttactaagctaaaaattattcattgttccacacatgctgctgtgaagttcacattcaagatgaatgttgagactttgaggacagaaaggcaacttattttcccatctttctatggatgcggattggcaggttgaatgggaagtacagaaggagagagagtaattagatggaattctggatgctagcatgtaaagctaatcatctttttttttatgacctgggagctgggcccattttatgaccaaggagatggggagttggaatggtggtactaagaggcataggaagttgagtgtgaataccattggtgatgggtccaggagaactagactatggttcttgaatatctgtccacaaagaatatactaacttttgtcaacttctcagaactcccaactggagtcggtgagacctaggattttctgcacttccacacatgcctgttccaagtgtggctgtcagccagtcaacaagtttgtactatggcccattctctgatcaccaggattacaggaactcacacactcctcatacttggcctgtagtcctacttcttgttagaagtctccaagtctggccagtcacatgaccaagtgttgatttttctggaggaaaaattttatggaaatgatataggggaaaggtgggaggagatgaaagaacaggcaagagctgtcagggttaaatccaggcccgggcatgagaatggaagtgatcagggagactcggtccttgttccaagtctccaaagaagaccaaagtgggtcccttgagcaatgaagaatctgagataaattctcttcaagtatcatgtacaaaatctgtgagccagagattttgacttgagcaagccatggaaatgcatggagcaagggtgacactctgtggggagacagaagaatttcaactatttaatgtccattttgttgtttttaccctttcttatccaatagatggaatgcacatgaaatgaccatattaagcctctctctatttacatcccaggctcactgggatgtgatctactgcagttacattttcttgtaacggtttctggattagaccctagggaaagtgagtaaggagccagtttctgtttaacattctagttttactcattttaggaaggctgtgagtgaggcttgtctcctttaaagtttcttctccaatggaaaccaagaacagacaaaatttagagctcagctgtggtctcttctcatcttctgctcttttgctttgaccacagtttttctactcttcccatcaacactagagcaatggctgtgcaaataggaataggaaatactaccacaatgatagaaatattatccacactatcacgtagggaagaacaatatcctgaaagagaataaaacacgaataaggtgatgtacccacattaatctgtgggtttgtggaatgagggttgcaaagttattgggaaaaggaaagagcagagttcacccattcaaaaaaaaccttttgtctactaatctctagtgtaaagaaaatgtagttcagataccattcattgtcttgggtcatgcttagtgcccccaagaagacaaacatatttattcttgggattctgataggcttcaatatgcaaaggacaatggaaaagtttagacactctattttcaaaattttataaacttgttttattggggaaaatgtccaaattgctagacacattctaagttctgccttggagaatcctactttgtctgagattgaggcagaggaattgttatcctgggcattactcagctcaggaacatggagcctgtggttcatgccagtgtgtgtcttcatgcagtctctccacaagagcaacagtaagaacatttctgttttaaatttcattttaaaatattttattatctgcaattcaccactgctctgggaaagcaaaaggaaagttcctgttgtgtgtgaagagcctcttaggctataaggcttcccagccatagtcagctatagctattcagagacagcaggttcttccagtctttgttcctgggacctgatgttttgagcaactcaggtcactgataaagtggaaggactaagacactgtggtcacagatcccagcaacatcaactcacactcaatccatgtggtggtccacattctgctactcttatccacccatgtggtcattgagagcctttctcagagactcttctgtgtgtttgattgtgcccaggtggcccagggctagctggctctaacaactagcatgacagcctccaatcagaaaggcaggtaaggggacagggtgaggagaatgggcagatactgacagaaattaaagtaaagggattgtgaaagtaaagagctcttcctgattctcatcttctcttttttctattacaaggcattgaacttggcacttcctgtattctttgtgatcactattgagtgcattagttaacacccaaggggatggcttgattgggaatgtagtgaaaggagctgatctactgtattgtaatgtaaaacagctacagccagttattttgtaagattataagttgttcattaaaaaatcagcacacaaaa

SEQ ID NO: 298661 - DNA, 5376 bp, Artificial Sequence
  derived and/or modified sequence
atgatgtgcctgaagatcctgcgcatcagcctggccatcctggccggctgggccctgtgcagcgccaacagcgagctgggctggaccaggaagaagagcctggtggagcgggagcacctgaaccaggtgctgctggagggggagcgctgctggctgggcgccaaggtgagaagaccccgggccagcccccagcaccacctgtttggagtgtaccccagcagagctggcaactacctgcggccctaccctgtgggggagcaggagatccaccacacaggccgcagcaagccagacacagagggcaatgctgtgtccctggtgcccccagacctgacagaaaatcctgctggcctgcggggagctgtggaggagcctgctgccccctgggtgggggacagccccatcggccagagcgagctgctgggagatgatgatgcctacctgggcaaccagaggagcaaggagagcctgggggaggccggcatccagaagggcagcgccatggccgccaccaccaccacagccatcttcaccaccctgaatgagcccaagccagagacccagaggcggggctgggccaagagccggcagaggcggcaggtgtggaagagaagagcagaagatggccagggcgacagcggcatcagcagccacttccagccctggcccaagcacagcctgaagcaccgggtgaagaagagccccccagaggagagcaaccagaatggaggagagggcagctaccgggaggccgagaccttcaacagccaggtgggcctgcccatcctgtacttcagcggccggcgggagcggctgctgctgcggcctgaggtgctggccgagatcccccgggaggccttcaccgtggaggcctgggtgaagccagagggcggccagaacaacccagccatcatcgccggcgtgtttgacaactgcagccacacagtgtctgacaagggctgggccctgggcatccgcagcggcaaggacaagggcaagagagatgcccgcttcttcttcagcctgtgcacagacagagtgaagaaggccaccatcctgatcagccacagccgctaccagcccggcacctggacccacgtggccgccacctatgatggccgccacatggccctgtatgtggatggcacccaggtggccagcagcctggaccagagcggccccctgaacagccccttcatggccagctgccgcagcctgctgctgggcggggacagcagtgaagatggccactacttccggggccacctgggcaccctggtgttctggagcacagccctgccccagagccacttccagcacagcagccagcacagcagcggggaggaggaggccacagacctggtgctgacagccagctttgagcctgtgaacacagagtgggtgcccttcagagatgagaagtacccccggctggaggtgctgcagggctttgagcctgagcctgagatcctgagccccctgcagccccccctgtgtggccagacagtgtgtgacaacgtggagctgatcagccagtacaacggctactggcccctgcggggggagaaggtgatccgctaccaggtggtgaacatctgtgatgatgagggcctgaaccccatcgtgtctgaggagcagatccggctgcagcacgaggccctgaatgaggccttcagccgctacaacatctcctggcagctgtctgtgcaccaggtgcacaacagcaccctgcggcaccgggtggtgctggtgaactgtgagcccagcaagattggaaatgaccactgtgaccctgaatgtgagcaccccctgaccggctatgatggaggagactgccgcctgcagggccgctgctacagctggaacagaagagatggcctgtgccacgtggagtgcaacaacatgctgaatgactttgatgatggagactgctgtgacccccaggtggctgatgtgaggaagacctgctttgatcctgacagccccaagagggcctacatgtctgtgaaggagctgaaggaggccctgcagctgaacagcacccacttcctgaacatctactttgccagctctgtgcgggaggacctggccggggccgccacctggccctgggacaaggatgctgtgacccacctgggcggcatcgtgctgagccctgcctactacggcatgcctggccacacagacaccatgattcatgaggtgggccacgtgctgggcctgtaccacgtgttcaagggcgtgtctgagcgggagagctgcaatgacccctgcaaggagaccgtgcccagcatggagactggagacctgtgtgccgacacagcccccacccccaagtctgagctgtgccgggagcctgagcccaccagtgacacctgtggcttcacccgcttccctggggcccccttcaccaactacatgagctacacagatgacaactgcacagacaacttcacccccaaccaggtggccaggatgcactgctacctggacctggtgtaccagcagtggacagagagcaggaagcccacccccatccccatcccccccatggtgattggccagaccaacaagagcctgaccatccactggctgccccccatctctggagtggtgtatgaccgggccagcggcagcctgtgtggggcctgcacagaagatggcaccttccggcagtatgtgcacacagccagcagccggcgggtgtgtgacagcagcggctactggaccccagaggaggccgtgggccccccagatgtggaccagccctgtgagcccagcctgcaggcctggagccctgaggtgcacctgtaccacatgaacatgacagtgccctgccccacagagggctgcagcctggagctgctcttccagcaccctgtgcaggccgacaccctgaccctgtgggtgaccagcttcttcatggagagcagccaggtgctgtttgacacagagatcctgctggagaacaaggagagcgtgcacctgggccccctggacaccttctgtgacatccccctgaccatcaagctgcacgtggatggcaaggtgtctggagtgaaggtgtacacctttgatgaaagaattgaaattgatgctgccctgctgaccagccagccccacagccccctgtgcagcggctgcaggcctgtgcgctaccaggtgctgcgggaccccccatttgccagcggcctgcctgtggtggtgacccacagccacaggaagttcacagatgtggaggtgaccccaggccagatgtaccagtaccaggtgctggccgaggccggcggggagctgggggaggccagcccccccctgaaccacatccacggggccccctactgtggagatggcaaggtgtctgagcggctgggggaggagtgtgatgatggagacctggtgtctggagatggctgcagcaaggtgtgtgagctggaggagggcttcaactgtgtgggggagcccagcctgtgctacatgtatgaaggagatggcatctgtgagccctttgagaggaagaccagcatcgtggactgtggcatctacacccccaagggctacctggaccagtgggccacccgggcctacagcagccatgaggacaagaagaagtgccctgtgtccctggtgactggagagccccacagcctcatctgcaccagctaccacccagacctgcccaaccaccggcccctgaccggctggttcccctgtgtggcctctgaaaatgagacccaggatgacagaagtgagcagcctgagggcagcctgaagaaggaggatgaggtgtggctgaaggtgtgcttcaacagacctggagaggcccgggccatcttcatcttcctgaccacagatggcctggtgcctggagagcaccagcagcccaccgtgaccctgtacctgacagatgtgcggggcagcaaccacagcctgggcacctacggcctgagctgccagcacaaccccctcatcatcaacgtgacccaccaccagaatgtgctcttccaccacaccacctctgtgctgctgaacttcagcagcccccgggtgggcatctctgctgtggccctgcggaccagcagcagaattggcctgagcgcccccagcaactgcatcagtgaagatgagggccagaaccaccagggccagagctgcatccaccggccctgtgggaagcaggacagctgccccagcctgctgctggaccacgcagatgtggtgaactgcaccagcatcggccctggcctgatgaagtgtgccatcacctgccagaggggctttgccctgcaggccagcagcggccagtacatccggcccatgcagaaggagatcctgctgacctgcagcagcggccactgggaccagaatgtgtcctgcctgcctgtggactgtggggtgcctgaccccagcctggtgaactatgccaacttcagctgcagcgagggcaccaagttcctgaagcgctgcagcatcagctgtgtgcccccagccaagctgcagggcctgagcccctggctgacctgcctggaggatggcctgtggagcctgcctgaggtgtactgcaagctggagtgtgatgccccacccatcatcctgaatgccaacctgctgctgccccactgcctgcaggacaaccatgatgtgggcaccatctgcaagtatgagtgcaagccaggctactacgtggccgagagcgctgagggcaaggtgaggaacaagctgctgaagatccagtgcctggagggcggcatctgggagcagggcagctgcatccctgtggtgtgtgagcccccacctcctgtgtttgagggcatgtatgaatgtaccaacggcttcagcctggacagccagtgtgtgctgaactgcaaccaggagcgggagaagctgcccatcctgtgcaccaaggagggcctgtggacccaggagttcaagctgtgtgagaacctgcagggcgagtgccccccaccacccagcgagctgaacagcgtggagtacaagtgtgagcagggctatggaattggagctgtgtgcagccccctgtgtgtgatcccccccagcgaccctgtgatgctgcctgagaacatcacagctgacaccctggagcactggatggagcctgtgaaggtgcagagcatcgtgtgcacaggaagacggcagtggcacccagaccctgtgctggtgcactgcatccagagctgtgagcccttccaggctgatggctggtgtgacaccatcaacaacagagcctactgccactatgatggaggagactgctgcagcagcaccctgagcagcaagaaggtgatcccctttgctgctgactgtgacctggatgaatgtacctgccgggaccccaaggccgaggagaaccagtag

SEQ ID NO: 298662 - DNA, 5376 bp, Artificial Sequence
  derived and/or modified sequence
atgatgtgcctgaagatcctgcggatcagcctggccatcctggccggttgggccctctgttcggctaatagtgaactgggctggacccgtaagaaaagcctggtagaaagagagcatcttaatcaggtgttactagagggggaaagatgctggctgggggcaaaggtacgccgcccacgggcgtcaccgcagcaccatctgttcggtgtttacccctccagggccggaaactacctccgaccatatccagttggtgagcaggaaattcatcacaccggtcgtagcaaaccagataccgaaggaaacgcggtgtcgctcgtccctccggatttaacagaaaaccccgctgggctccggggcgccgttgaagaacctgcagccccttgggtcggagattctcctatcggccagtccgagctcctgggtgatgacgatgcatacctgggaaatcagcggtctaaggagtccctgggtgaagctggcattcagaagggctcagccatggcagctacaaccactactgcgatatttacgaccttaaatgagccgaagcctgagacccagaggcggggctgggctaagtctaggcaaagacggcaggtgtggaaaagacgcgccgaggatggtcagggcgactccggcatctcctcccatttccagccctggcccaaacactctcttaagcacagagtgaagaagagtccacctgaagaaagtaatcaaaatggcggtgaaggttcctatagagaagccgagacctttaacagtcaggtgggcctgcccattctatacttttctggcagaagggagcgactccttcttcggcccgaagtcctggctgaaatccctagggaggccttcaccgtagaggcctgggtaaaacccgaaggcggacagaataaccccgctattatcgctggcgtttttgacaattgctctcacacggttagcgacaaagggtgggcactcgggatccgcagcgggaaagataagggcaagcgggacgcgcgcttctttttttctttgtgtactgatcgcgtgaaaaaggcaactattctcatttcccattctcgctatcagccaggcacttggacacacgtggcagctacatacgatggccgacatatggcattgtacgtagatgggactcaagtggcgtctagcctcgatcaatccggccctttgaactcaccattcatggccagctgtcggtcgctgctgttggggggtgacagttccgaagacgggcattacttcagaggtcatctgggcacccttgttttttggtctacagcactccctcaatctcattttcaacacagtagccagcatagcagtggggaagaggaggcaactgacttggtcttaacggcctcctttgaaccggttaacacagaatgggttccctttcgagacgaaaagtacccaaggctcgaggtacttcagggcttcgaacctgaaccagaaattttgtctccgttacaaccacctctatgcggccagacagtctgtgacaatgttgagcttatctctcagtataacgggtattggcctctgcgaggggagaaagtgatcaggtaccaagtcgtgaatatttgtgacgatgaggggctgaacccgatagtcagcgaggaacagatccggctgcagcacgaagccctcaacgaagcattctctaggtataacattagctggcagttatctgtgcaccaggtacataacagcacattgcggcaccgcgtggttctggtgaactgcgagcccagcaaaatcggcaatgaccattgtgatccagagtgcgagcacccgctgacagggtatgatggcggtgactgccgtctgcaagggcgctgttattcctggaataggcgggatgggctgtgccacgtggaatgcaataatatgctgaatgacttcgatgacggcgattgctgcgacccacaggtggcagatgtgaggaagacatgctttgatcccgattctcccaagagggcatatatgtctgtcaaggaattaaaagaggcactccaacttaacagcacacatttcttaaacatatatttcgcttcctcagtgcgtgaggatctggcaggggccgccacctggccctgggataaagacgcagtgactcacctgggggggattgtattgtctcccgcttattacgggatgcctgggcataccgacacaatgatccatgaagtgggccacgttctaggcctgtaccacgtgttcaagggcgtgagtgagcgcgaaagttgtaatgatccttgcaaggagactgtgcctagtatggagactggtgacctctgcgcggataccgcaccaactcctaaaagcgaactgtgtagagagccagagccgacttcagacacctgcggttttactcgattccccggggccccatttacaaattatatgtcctacacagacgacaactgtaccgacaacttcacacccaatcaggttgcacgaatgcactgctacctggacctggtctaccagcaatggacggagagtaggaaacccacccccatccctattccacctatggtaatcgggcagactaacaagtctctaacaatccactggctgccaccaatatcgggtgtggtgtatgatcgagccagtgggagcctctgcggtgcctgtaccgaggacggaaccttcaggcagtacgtccacaccgccagttcgcggcgcgtatgcgactcatcgggttattggacccctgaggaggcggtcggtccacccgacgttgaccagccttgtgagccgagcctacaggcttggagcccagaagtacacctgtatcatatgaatatgactgtaccctgcccgacggagggttgtagcctggaactcctttttcaacacccagtacaggccgacacgctgactctttgggttacttccttctttatggaaagcagtcaagtgctgtttgacactgagatcctgctagaaaataaggaatctgtccatctcggtcctcttgacaccttctgcgacattccactaaccatcaaactgcatgtggacggaaaggtgtcaggggtcaaggtctatacattcgatgaacgaattgaaattgatgccgcactgttgacctcccaaccgcactccccattatgtagcggctgtcgacctgtgcggtaccaggtgttaagggatccgcctttcgcttcaggactgcctgtagtagtcacgcactcccataggaaattcactgacgtagaggtgacacccggtcagatgtaccagtaccaggttctagctgaggcggggggcgaacttggcgaagcctctcctccactgaaccatatccatggagcaccatattgtggggacggaaaagtctccgaacgcctaggtgaagaatgtgacgacggggacctggtgagtggagatggttgtagcaaggtgtgcgaacttgaggaaggcttcaattgcgtgggcgagccttctttatgttatatgtatgagggggatggaatctgtgagccttttgagaggaaaacttctatcgtggattgcggtatttatacacctaagggctacctagaccagtgggctacccgcgcttatagctcacatgaggacaaaaagaagtgcccggtgagcctcgtcaccggcgagcctcactccttaatctgcacttcctatcaccctgacctccctaaccacaggccattgaccggatggtttccttgtgtggccagcgagaatgagacgcaagatgatcgtagcgagcagcccgagggttccttgaaaaaggaagatgaagtgtggctcaaggtgtgtttcaacagacccggcgaggccagagcgattttcattttcctgactacagatgggcttgtgccaggggagcatcaacaaccaaccgttacactgtacctgaccgacgtcaggggatcgaatcacagccttggtacctatggactgagttgccagcataatcctttaatcataaacgtgacacaccaccagaatgtgctctttcatcacaccacatcagtcctgctcaatttcagctcaccaagggtcggcatcagcgccgttgctctccgcactagctctagaatcggactgtccgctccttctaactgcattagcgaagatgagggccagaatcaccagggacaatcatgtatacaccggccttgcggtaagcaagactcttgccccagtctcttgctggaccacgccgacgtcgtcaactgtacctctattgggccggggctgatgaaatgcgccatcacatgccagagggggtttgccctacaagcttcttctggacagtacattagacccatgcagaaggagatcctgcttacgtgctcaagcggccactgggatcagaacgtgtcttgccttcctgtggattgtggggtacccgatccaagtctggtgaactacgcaaattttagctgctcagaagggacgaaatttcttaagaggtgtagtatcagttgtgtaccacctgcaaagctgcaggggctttcaccctggctgacatgcttggaggacggactgtggtcactgcctgaggtttattgcaagctggaatgcgacgccccccctattatcctgaatgccaaccttctgctaccccattgccttcaggataaccatgatgtcggtaccatctgcaaatacgagtgcaagcctgggtactatgtagccgaaagtgctgaaggcaaggttaggaataagctgctcaagatccaatgcctggaagggggaatctgggagcagggctcctgtatacccgtggtatgcgagcctccaccacctgtgtttgagggtatgtatgagtgcaccaatggattcagcctcgattctcagtgcgtccttaattgcaatcaagagcgggaaaaactgcccattttgtgtactaaggaaggtctgtggacgcaggagtttaagctgtgtgagaacctccagggagagtgtcccccacctccttctgagctgaatagcgtggagtacaagtgcgaacagggctatgggatcggcgcagtgtgctcaccactctgtgtaatccctccttccgaccccgtgatgctgccggagaacattaccgccgacacgctcgagcactggatggagcccgtgaaagtacagtccattgtctgtacaggtaggcgccagtggcatcctgatccggtgctggtgcactgtattcagtcctgtgaaccctttcaagcggacggatggtgcgacactatcaataatcgggcctactgtcactacgacggcggggactgttgtagctcgactttgagctctaagaaggtgattcccttcgccgcggattgtgacctcgatgaatgcacatgtagagatcccaaagcagaggagaatcagtag

SEQ ID NO: 298663 - RNA, 5376 nt, Artificial Sequence
  derived and/or modified sequence
augaugugcuugaaaauucugaggauaucccuagcaauucucgcugggugggccuugugcucugcaaacucagaacuagguuggaccagaaagaaaucccuggucgagcgggagcacuugaaucagguguuacucgagggcgagcgcugcugguuaggagccaaagugcgccggccacgagcuuccccacagcaccaucuguuuggaguguacccuagucgagccgggaauuaucugcggccguaucccguaggcgagcaagagauucaucacacuggaagaaguaagcccgacacagagggcaacgcugugucacucgugccccccgaucugacagagaacccugccggcuugcgaggggccguggaggagccugcugccccuugggugggcgacuccccuaucggucagucagagcugcugggggacgaugaugccuaucucggcaaucagcgaagcaaagagucgcugggcgaagcagguauacagaaaggcuccgcuauggcugcuaccacuacgaccgcaauauucacgaccuugaacgagcccaaacccgagacccaaaggagaggcugggccaaaaguaggcagcggaggcaaguuuggaaacggcgcgcugaggacggacagggcgauagcggcauuuccucccacuuccagcccuggcccaaacacucccuuaagcacagggugaagaagucuccccccgaggaaucuaaccaaaacggcggcgaggguucuuaucgggaagcagaaaccuucaauagccagguggguuuacccauccuuuacuuuucuggcagacgcgaacgucugcugcugcgccccgaagugcuggcagagaucccuagggaagcauucaccguggaggcauggguaaagccagagggcggccagaauaacccugccaucaucgcugggguauucgauaauugcucacacacaguauccgacaaggguugggcccuaggcauucgaagcgguaaggauaagggaaaacgagaugcuagguuuuucuuuucucuuuguacugaucgcguuaagaaggcuacaauccucaucucgcauucgcgcuaccaaccaggaacauggacccacguugccgccacauacgacggccggcacauggcccuguacguugacggaacucagguggccaguucccucgaucaaagcgguccuuuaaacagcccauuuauggcuucgugcagaucucuuuuacuaggaggagauucuucagaggauggccacuacuuccggggccaccugggaacucugguauuuuggucuacugcccuuccccagucgcacuuucagcacagcagccaacacagcagcggggaagaagaagcuacggaucugguacuaaccgcgagcuuugaaccugugaacacagaauggguuccuuuccgggaugaaaaguacccccggcuggaaguauuacaaggauucgaaccagagccugagauucuuucaccacugcagccaccccucugcggccagaccguuugugacaacgucgagcuuauaagccaguacaacggcuauuggccccucagaggggaaaaggucauccgguaccaggucguuaauauuugugacgaugaagggcugaauccuaucgucucugaagagcaaaucagauuacaacaugaagcucugaaugaagcuuucucccgauauaauauuucuuggcagcuguccgugcaccaagugcacaacuccacucuccggcaccgcgugguccugguuaauugugagcccucuaaaauuggaaacgaccacugcgaucccgagugugaacacccccugaccgguuaugacggcggagauugcagauugcaaggcagaugcuauaguuggaauagacgcgauggccuuugucauguggaaugcaauaauauguuaaaugacuucgacgacggugauugcugugacccccaggucgcagaugugcggaaaaccuguuucgacccagacagucccaagagggccuacaugagcgugaaagagcugaaggaggcucuucaacuuaauuccacccauuucuuaaacauuuacuuugcauccaguguccgagaagaucuugcgggagcggccaccuggccuugggauaaagaugcuguaacucaucugggcggcaucgugcugucccccgcuuauuauggaaugcccgggcauacugacacuaugauccacgaagugggccacguccugggacuauaccacguguucaaaggcgugagugaacgagaguccuguaaugaucccuguaaagagacugugccuuccauggaaacaggggaccuaugugcagauaccgcacccacacccaagucggagcuguguagagagccggaaccuacaucugauaccuguggguucacgcguuuuccaggcgcuccauucacgaauuauauguccuauaccgacgauaacugcaccgacaauuucacucccaaucaagucgcccggaugcacugcuaccuagaucucguauaucagcaauggacagaaucuaggaagcccaccccuaucccuaucccaccaauggugaucggucaaacaaauaaaucacucacaauucacuggcuacccccaaucucaggggucguguaugaucgugcaagcggcagucucuguggagcaugcacggaggacggcacauuuagacaguaugugcauacugcuucaucucgacgaguaugugauuccagcggcuauuggacuccugaggaagccgugggcccccccgacguggaccagcccugugaaccaucacugcaggcuuggagccccgaagugcaccuguaucauaugaauaugaccguuccauguccaaccgagggcuguucccuggaauuguuguuucagcacccuguacaggccgauacucugacuuuauggguaacaucuuucuucauggaaucuucccaggugcucuuugauacagagauucugcuggaaaacaaagagagcgugcaccucggcccucuugacaccuucugugacauacccuugaccaucaaguugcacgucgacgguaaaguguccggcguuaaaguuuacaccuucgaugagcgcaucgagaucgacgcagcgcugcucacaagccagccccacagcccacugugcuccggguguaggcccgugagguaucaggugcuucgcgaucccccuuuugcgagcggccugccuguggucgugacgcacagucauaggaaguucacugauguugaagugaccccuggccagauguaccaguaccagguccuggcugaggccggaggagaacugggggaggcuucuccacccuuaaaucauauccauggcgccccguacugcggggacggcaaaguuucugagagacuaggcgaagaaugcgaugacggcgaccuugucucgggagauggauguagcaaagucugugaacuggaggagggguucaauugcgugggagagcccucucugugcuacauguaugaaggcgacgggauuugcgaaccauucgagcgcaaaacuuccaucguggauugcggcauuuacacuccaaagggguaucuggaucaaugggcgaccagagccuauucaagccaugaggauaaaaagaaaugcccaguaagccucgugacuggggagccacacucacucaucuguacgaguuaccauccggaccuuccaaaucaccggccguugaccgggugguucccgugcguggccucagagaacgagacccaggacgauagaagcgaacaaccugagggguccuugaagaaggaggaugaaguguggcugaaggucugcuucaaccgcccuggcgaagcaagagccaucuuuauuuuuuuaaccaccgauggccucgucccgggggagcaccaacagccaacugucacgcuguaccucacagacgugcgugggagcaaucauucucugggaacauacggccugagcugccagcacaacccauugauuaucaaugugacccaccaccagaacguguuauuucaccacacuacuagcguguugcucaauuucaguucgccuagaguugguaucuccgccguggcguuacgaacuuccucgagaauugggcuauccgcgcccucuaacugcaucucagaggaugagggucagaaucaucaggggcagagcugcauccaccguccuugcgguaagcaagauaguugcccaagccugcugcuugaucaugccgacguggugaacuguaccuccauaggacccggcuugaugaagugugccauuacgugccaacgugguuuugcacuacaggccuccucgggacaguauauaaggcccaugcaaaaggaaauccugcuaaccugcagcuccggacacugggaucaaaauguaucaugucugccaguugauuguggugucccagauccuagucucgucaacuacgcgaacuucuccuguucagaagggacuaaauuucugaaacgcugcagcauaucuuguguccccccugccaaacugcaggggcuuagcccguggcucaccugccuggaggacggacuguggucccugccggagguguacuguaagcucgaaugugacgccccuccaaucauucugaaugccaauuugcuacugccacauugccuccaagacaaccacgaugugggaaccaucuguaaguacgaaugcaagccaggcuacuacguggcagaguccgccgaggguaaagugagaaauaagcuguugaaaauucagugucuggaggguggaauuugggagcaaggauccugcauuccugucguaugugaaccucccccccccguguuugaggggauguacgaauguacaaacggauucucucucgacucccaauguguccuaaauuguaaucaggagagagagaaacugccuauacuguguaccaaagaaggacuguggacgcaggaauucaagcugugugagaauuuacaaggagagugcccuccuccucccucugagcugaacuccgucgaauacaagugcgagcagggcuacgguauuggagccguguguucccccuugugcguuauuccacccucggauccaguuaugcuuccagagaacauaacggcugacacccuugaacauuggauggaacccgugaaaguacaguccaucguuugcaccggcaggcgacaauggcacccagacccugugcuggugcacugcauacaauccugcgagccuuuccaggcagacggguggugugacacuauaaauaauagggccuacugccacuacgacggaggagauuguugcagcaguacccugucuaguaagaaggugaucccauucgcugcugauugcgaucuggaugagugcacaugucgagacccaaaagcagaggagaaucaauag

SEQ ID NO: 298664 - RNA, 5376 nt, Artificial Sequence
  derived and/or modified sequence
augaugugccugaaaauccugcguauuaguuuggccauuuuggcagggugggcacuguguucggcaaauagugaacucgguuggacaagaaagaagucccuggucgaacgagagcaccugaaucaaguccugcuggagggggagcgauguuggcucggcgcgaaggugagaagaccgcgggccucaccucaacaucaccuuuucgggguguauccuagccgagcuggaaauuaccugcggccauaucccgugggggagcaagaaauacaucacacuggaaggagcaaacccgacaccgaggggaacgccgucucccucgugccgccugaucucacugaaaauccagccggccugagaggagcggucgaggagccagccgcaccguggguaggcgauuccccgaucggacagagugagcuccugggugaugaugacgcuuaucuugguaaccagcgaucaaaggaauccuuaggcgaagcuggaauacaaaagggcucugcaauggccgccaccaccaccaccgccauuuucaccacucugaacgaacccaagccagaaacacaaagaaggggaugggcaaaaagucgccagcguagacaaguauggaaacgucgggcagaggacggacaaggcgauucugggauaagcucacauuuucaaccuuggcccaagcacucacugaagcaccgaguaaagaaguccccuccagaagaauccaaucaaaaugggggagagggaaguuacagagaagcagagacuuucaacagccaagucgggcuccccauccuauacuucuccggcaggagagagagauuguugcugcggccugaaguacuugcagagauaccucgggaggcauucaccguugaggcaugggugaaaccagagggaggacaaaauaacccugccaucaucgcugggguauucgauaauugcucacacacaguauccgacaaggguugggcccuaggcauucgaagcgguaaggauaagggaaaacgagaugcuagguuuuucuuuucucuuuguacugaucgcguuaagaaggcuacaauccucaucucgcauucgcgcuaccaaccaggaacauggacccacguugccgccacauacgacggccggcacauggcccuguacguugacggaacucagguggccaguucccucgaucaaagcgguccuuuaaacagcccauuuauggccaguugcagauccuuguuacuaggcggcgacaguuccgaggacggacauuauuuuagaggccaucuuggcacauugguuuuuuggagcacugcucuaccacagucccacuuucaacauagcucacagcauagcagcggagaagaggaagcaaccgaccuggugcugacagccucuuucgaaccuguuaauacggagugggucccauuucgugacgaaaaguaccccagacucgagguucugcaggguuucgaacccgagcccgagauccugagcccuuuacagcccccucucugcggacagaccgugugugacaacguggaacuuaucucacaguauaacggauacuggccucugagaggugaaaaaguaauuagauaccaaguggugaacauaugcgacgacgaaggauugaauccgauaguaucagaggagcagauuagacuucagcaugaggcucugaaugaggcuuucucccgcuauaacaucagcuggcaauuaucaguucaucaggugcacaacagcacauuaagacaccgaguugugcucgucaacugcgaacccaguaaaaucgggaacgaccacugugacccagaaugugaacauccauuaacaggguaugacgggggagacugucgcuugcaggguagaugcuauuccuggaauagaagagacgguuugugccacguugaauguaacaauaugcugaacgacuucgacgacggcgauuguugugauccacagguagcagaugugcguaagacuugcuuugauccggacagucccaaacgagccuauaugagcgugaaagaacucaaagaggcacuccagcucaauuccacucacuuuuugaauaucuauuucgcuuccucaguucgggaggaucucgcuggggcagcaacauggccuugggacaaggacgcagucacacaccugggaggaaucgugcugagucccgcauauuaugguaugccuggucacacagacaccaugauacacgaaguaggacauguccuggggcuguaccacguguuuaaaggugugagcgagcgagagaguugcaaugacccuugcaaggagaccguaccaucaauggagaccggagaucugugcgccgauacugccccuaccccuaaguccgagcuguguagagagcccgagccaacuagugacacaugcggauucacuagauuuccaggcgccccuuucacaaauuacaugucuuacacagaugacaacuguaccgacaacuuuaccccuaaccaggucgccaggaugcauuguuaucuugaccucgucuaucagcaguggacggaaucacgcaaaccuaccccaauuccaaucccacccaugguuauuggccagaccaauaaaucccuaacaauucacuggcugccuccaauuucaggugucguguacgauagagccucuggcucccuuuguggugccugcacugaggacggaacuuuuagacaauauguacauacagcuucuuccaggagagugugcgacucuaguggcuacuggaccccugaagaagccgugggcccccccgacguggaccagcccugcgaaccuagucuucaagccuggucucccgaagugcaucuguaccauaugaacaugaccgugccaugcccuaccgaggggugcagccucgaacugcuguuccagcacccagugcaagccgauacucugaccuuaugggugacaucauucuucauggaaaguucacagguacuuuucgauacagaaauccuucuggagaacaaagaguccgugcaccuuggcccccucgacaccuuuugugacauaccacuuaccauuaaauuacacgucgaugguaaagucucaggcgugaaaguguauacauucgacgagcguauugagaucgacgcugcccuccugacaagucagccccacaguccacuuuguuccggcugccgccccguuagauaccaagugcugcgagaccccccauuugccagcggacuuccugugguugugacacacucucaccggaaauuuacagacguagaagugacccccggucaaauguaccaguaccagguacuagcugaagcuggaggagagcugggcgaagccagucccccccugaaccacauucacggcgcccccuauuguggugacggcaaggucagugagcgacugggugaagaaugugaugauggugauuugguuucaggagauggcugcagcaaagucugugaacuugaagaagguuuuaacugcgucggagaaccaagucucugcuauauguaugagggagaugguauuugugaaccauucgaaagaaaaaccuccaucgucgauuguggaaucuacaccccaaaggguuaucuugaucaaugggcaacccgugccuacaguucacaugaagauaagaaaaagugccccgucagucuugugacaggagaaccucauagucuaauuuguaccuccuaccaccccgaccugccaaaccaucgcccucugaccggcugguuuccuugugucgccagcgagaaugagacccaggaugauaggucugaacagccagaagguucucucaaaaaagaagacgagguguggcuuaaaguuugcuucaaucgccccggugaggcucgagcuaucuucauuuuccugacaaccgacggacugguccccggcgagcaccaacaacccaccgucacccucuacuugaccgaugugcgugguucaaaucacucgcugggcacauauggccuuucaugucagcauaauccauugaucauuaauguuacccaccaccagaacguccucuuucaccacacuacaucuguucugcugaacuuuucauccccucgagucgguaucuccgccgucgcccuacgaacuuccuccagaauuggucuuucagcaccaucaaacugcauaucugaggaugagggacagaaucaccagggucagucaugcauacacagacccuguggcaagcaagacucuuguccaagccuccugcuugaccaugccgacguuguuaauuguacuuccaucgguccaggacuuaugaaaugcgcaaucacaugccagaggggauuugcgcuucaggccaguucuggccaguauauccgcccuaugcaaaaagaaauccuucucaccugcagcuccggacacugggaccagaaugugaguugccucccugucgacugcggaguucccgacccaaguuugguaaacuacgcgaacuucagcugcuccgagggaacuaaguuucugaagcgaugcucaauuuccugcguaccucccgccaagcugcagggcuuguccccguggcucacgugccuggaggacggcuuguggagccugccagaaguguacugcaaacucgaaugugaugcaccgccuaucauccugaaugcuaaucuucuguuaccccauugccugcaggacaaucaugacguugggacuauaugcaaauacgagugcaagccagguuauuaugucgccgaauccgcugaagguaaaguccgcaauaaacuccugaaaauccaguguuuagaaggggguauaugggaacaagggagcuguauacccguugugugcgaaccuccuccacccguuuucgaaggcauguaugaguguaccaauggcuucucccucgauagccagugcguuuugaacugcaaccaggagcgcgaaaaauuaccuauucuaugcaccaaagagggacucuggacgcaagaguucaagcugugugagaaucugcagggagaguguccuccuccucccucugaacugaauucuguggaguacaagugugagcagggguacggaauaggcgcagucugcucccccuuguguguuauuccuccaagugaccccguaauguuaccugaaaauaucaccgccgauacacuggagcacuggauggagccugucaaaguacagucuauaguguguacaggcaggagacaauggcacccggauccgguucucguccacuguauucaaagcugcgagccauuccaagccgacggauggugcgauacaaucaauaaccgggcauacugccauuacgacgguggggacuguugcagcucgacccucaguucaaaaaaggugauacccuuugccgcagacugcgaucuugacgaauguacguguagagacccuaaggcagaagagaaccaauag

SEQ ID NO: 298665 - DNA, 469 bp, Artificial Sequence
  derived and/or modified sequence
acccggcgctccattaaatagccgtagacggaacttcgcctttctctcggccttagcgccatttttttggaaacctctgcgccatgagagccaagtggaggaagaagcgaatgcgcaggctgaagcgcaaaagaagaaagatgaggcagaggtccaagtaaaccgctagcttgttgcaccgtggaggccacaggagcagaaacatggaatgccagacgctggggatgctggtacaagttgtgggactgcatgctactgtctagagcttgtctcaatggatctagaacttcatcgccctctgatcgccgatcacctctgagacccaccttgctcataaacaaaatgcccatgttggtcctctgccctggacctgtgacattctggactatttctgtgtttatttgtggccgagtgtaacaaccatataataaatcacctcttccgctgttttagctgaagaattaaatca

SEQ ID NO: 298666 - DNA, 699 bp, Artificial Sequence
  derived and/or modified sequence
cgacacccggcgctccattaaatagccgtagacggaacttcgcctttctctcggccttagcgccatttttttgggtgagtgttttttggttcctgcgttgggattccgtgtacaatccatagacatctgacctcggcacttagcatcatcacagcaaactaactgtagcctttctctctttccctgtagaaacctctgcgccatgagagccaagtggaggaagaagcgaatgcgcaggctgaagcgcaaaagaagaaagatgaggcagaggtccaagtaaaccgctagcttgttgcaccgtggaggccacaggagcagaaacatggaatgccagacgctggggatgctggtacaagttgtgggactgcatgctactgtctagagcttgtctcaatggatctagaacttcatcgccctctgatcgccgatcacctctgagacccaccttgctcataaacaaaatgcccatgttggtcctctgccctggacctgtgacattctggactatttctgtgtttatttgtggccgagtgtaacaaccatataataaatcacctcttccgctgttttagctgaagaattaaatcatcttgtctattatgttttttatggttccatcgggtgggggttttctgtcattagagtttgccctgtcactacctgtgctatggagggtatcaaagctataaaggcaacagc

SEQ ID NO: 298667 - protein, 110 aa, Artificial Sequence
  derived and/or modified sequence
MPAAWILWAHSHSELHTVMETPLEKALTTMVTTFHKYSGREGSKLTLSRKELKELIKKELCLGEMKESSIDDLMKSLDKNSDQEIDFKEYSVFLTMLCMAYNDFFLEDNK

SEQ ID NO: 298668 - protein, 92 aa, Artificial Sequence
  derived and/or modified sequence
METPLEKALTTMVTTFHKYSGREGSKLTLSRKELKELIKKELCLGEMKESSIDDLMKSLDKNSDQEIDFKEYSVFLTMLCMAYNDFFLEDNK

SEQ ID NO: 298669 - DNA, 333 bp, Artificial Sequence
  derived and/or modified sequence
atgcccgccgcctggatattatgggcacattcccattctgagttgcacaccgtcatggagacacctctggagaaggctcttaccaccatggtcaccacttttcacaaatactctggtcgcgagggcagcaaactgactcttagtcggaaggagctcaaggaactgattaagaaagagctgtgcctgggggaaatgaaagaaagctccattgatgacctcatgaaaagtcttgacaagaactcagatcaagagatcgatttcaaagaatacagcgtgtttctgaccatgctttgcatggcttataatgattttttcctagaagacaacaaatag

SEQ ID NO: 298670 - DNA, 333 bp, Artificial Sequence
  derived and/or modified sequence
atgcctgctgcctggatcctgtgggcccacagccacagcgagctgcacacagtgatggagacccccctggagaaggccctgaccaccatggtgaccaccttccacaagtacagcggccgggagggcagcaagctgaccctgagcaggaaggagctgaaggagctgatcaagaaggagctgtgcctgggggagatgaaggagagcagcattgatgacctgatgaagagcctggacaagaacagcgaccaggagattgacttcaaggagtacagcgtcttcctgaccatgctgtgcatggcctacaatgacttcttcctggaggacaacaagtag

SEQ ID NO: 298671 - DNA, 333 bp, Artificial Sequence
  derived and/or modified sequence
atgcccgccgcctggatcctgtgggcccacagccacagcgagctgcataccgtcatggagactcctctggaaaaggccctgacaactatggtgacaaccttccacaagtacagcgggcgcgagggaagcaagcttaccctgagtagaaaggaacttaaagagctcatcaagaaggaactttgtttaggtgaaatgaaagagagttcaatagatgatttgatgaaatccctggataagaactccgaccaggaaatcgatttcaaggaatattcggtgttcttgactatgctctgcatggcctacaatgatttctttcttgaggacaataagtag

SEQ ID NO: 298672 - DNA, 333 bp, Artificial Sequence
  derived and/or modified sequence
atgcctgccgcatggatactgtgggcccatagccatagcgagctgcataccgttatggaaacccctcttgagaaggcattgacaacaatggtgaccacctttcataaatacagcggtagagagggtagcaagttaaccctgtcacggaaagagctgaaggaactcattaagaaggagttgtgcctgggagagatgaaggagagtagcatcgacgatttgatgaaatcacttgataagaattcagaccaggagatcgactttaaggagtactcagtctttctcactatgctttgcatggcctacaatgatttctttctggaggacaacaagtag

SEQ ID NO: 298673 - DNA, 710 bp, Artificial Sequence
  derived and/or modified sequence
tcccacacttctgaggttttctttccaggacagcctggtttcccttcttcggcttattgttccatcagatttcagattttgagttctgatttttggtcagaagagtaaagtttctgggattggggacgtgtgtgctatgggaactcagtgtgtccccagcccttgtttgtaaacaaggaagggacagagatcagggaaataaaggcagaaggcagtgagagggaggctatgcctgctgcttggattctctgggctcactcccacagtgagctgcacactgtgatggagactcctctggagaaggccctgaccactatggtgaccacgtttcacaaatattcggggagagagggtagcaaactgaccctgagtaggaaggaactcaaggagctgatcaagaaagagctgtgtcttggggagatgaaggagagcagcatcgatgacttgatgaagagcctggacaagaacagcgaccaggagatcgacttcaaggagtactcggtgttcctgaccatgctgtgcatggcctacaacgacttctttctagaggacaacaagtgaccagggctgccctccaccctcaccctccaccctttgctgctgacctcggctgctcctctcacagaccctctttggccccctgccctcctctccctcccagatggacccttccatgggaggaaataaagtttccatcgcaggtgctggga

SEQ ID NO: 298674 - DNA, 506 bp, Artificial Sequence
  derived and/or modified sequence
cagccccctctcagccctggactctctctttgccctgtccccgactttaataatgggacactcctcgatatcagagctgcacactgtgatggagactcctctggagaaggccctgaccactatggtgaccacgtttcacaaatattcggggagagagggtagcaaactgaccctgagtaggaaggaactcaaggagctgatcaagaaagagctgtgtcttggggagatgaaggagagcagcatcgatgacttgatgaagagcctggacaagaacagcgaccaggagatcgacttcaaggagtactcggtgttcctgaccatgctgtgcatggcctacaacgacttctttctagaggacaacaagtgaccagggctgccctccaccctcaccctccaccctttgctgctgacctcggctgctcctctcacagaccctctttggccccctgccctcctctccctcccagatggacccttccatgggaggaaataaagtttccatcgca

SEQ ID NO: 298675 - DNA, 333 bp, Artificial Sequence
  derived and/or modified sequence
atgcccgccgcctggatcctgtgggcccacagccacagcgagctgcacaccgtgatggagacccccctggagaaggccctgaccaccatggtgaccaccttccacaagtacagcggcagagagggcagcaagctgaccctgagcagaaaggagctgaaggagctgatcaagaaggagctgtgcctgggcgagatgaaggagagcagcatcgacgacctgatgaagagcctggacaagaacagcgaccaggagatcgacttcaaggagtacagcgtgttcctgaccatgctgtgcatggcctacaacgacttcttcctggaggacaacaagtag

SEQ ID NO: 298676 - DNA, 495 bp, Artificial Sequence
  derived and/or modified sequence
gagcagccttcctgagagaggagagagaaagctcagggaggtctggagcaaagatactcctggaggtggggagtgaggcagggataaggaaggagagtatcctccagcaccttccagtgggtggggcaagtccgtgggcatcatgttgaccgagctggagaaagccttgaactctatcatcgacgtctaccacaagtactccctgataaaggggaatttccatgccgtctacagggatgacctgaagaaattgctagagaccgagtgtcctcagtatatcaggaaaaagggtgcagacgtctggttcaaagagttggatatcaacactgatggtgcagttaacttccaggagttcctcattctggtgataaagatgggcgtggcagcccacaaaaaaagccatgaagaaagccacaaagagtagctgagttactgggcccagaggctgggcccctggacatgtacctgcagaataataaagtcatcaatacctca

SEQ ID NO: 298677 - DNA, 523 bp, Artificial Sequence
  derived and/or modified sequence
gagaaaccagagactgtagcaactctggcagggagaagctgtctctgatggcctgaagctgtgggcagctggccaagcctaaccgctataaaaaggagctgcctctcagccctgcatgtctcttgtcagctgtctttcagaagacctggtggggcaagtccgtgggcatcatgttgaccgagctggagaaagccttgaactctatcatcgacgtctaccacaagtactccctgataaaggggaatttccatgccgtctacagggatgacctgaagaaattgctagagaccgagtgtcctcagtatatcaggaaaaagggtgcagacgtctggttcaaagagttggatatcaacactgatggtgcagttaacttccaggagttcctcattctggtgataaagatgggcgtggcagcccacaaaaaaagccatgaagaaagccacaaagagtagctgagttactgggcccagaggctgggcccctggacatgtacctgcagaataataaagtcatcaatacctca

SEQ ID NO: 298678 - protein, 98 aa, Artificial Sequence
  derived and/or modified sequence
MAAEPLTELEESIETVVTTFFTFARQEGRKDSLSVNEFKELVTQQLPHLLKDVGSLDEKMKSLDVNQDSELKFNEYWRLIGELAKEIRKKKDLKIRKK

SEQ ID NO: 298679 - DNA, 297 bp, Artificial Sequence
  derived and/or modified sequence
atggccgcagaacccctcacggagttagaagagtcaatcgaaacagtggtaaccacgttttttactttcgcacggcaagagggacgtaaggatagtctgtccgtgaacgaattcaaagaactggttactcaacaactgccgcacctgctgaaggatgtggggtcactggatgaaaagatgaaatcactggacgtcaatcaggattctgagctcaagtttaatgagtattggcggttgatcggagaactggcaaaggagatcagaaagaagaaagacctgaagatcaggaaaaaatag

SEQ ID NO: 298680 - DNA, 297 bp, Artificial Sequence
  derived and/or modified sequence
atggccgctgaaccacttacggagctggaagagtccattgagactgtagttaccaccttttttactttcgccagacaggagggacggaaagattctttatctgtgaacgagtttaaggaactggtcacccagcagctcccccacttgcttaaggacgtgggctcattggatgaaaaaatgaagagtctggatgtaaaccaggatagcgagttgaagttcaacgagtattggagactgatcggcgagctggctaaagagatccggaagaagaaggacttgaaaattcgaaagaaatag

SEQ ID NO: 298681 - DNA, 297 bp, Artificial Sequence
  derived and/or modified sequence
atggctgcagagcccctgactgagttggaggaaagtatagagacagtcgttaccacatttttcaccttcgcccgccaggaagggaggaaagactcattgtcggtcaatgaatttaaagaattagtgacacaacagctgccacatctgttgaaggacgtagggtctttagatgagaaaatgaaaagcctggatgtcaaccaggattccgaacttaagttcaatgaatattggagactcatcggcgaactcgctaaggagatccggaaaaaaaaggatctgaagatacggaagaagtag

SEQ ID NO: 298682 - DNA, 297 bp, Artificial Sequence
  derived and/or modified sequence
atggctgccgagcctctgaccgaactggaggagtccatagaaaccgtcgtaactacattcttcacatttgccagacaggagggccgaaaggatagcctatccgtgaatgagtttaaagaacttgttacccagcagctcccccatctgctgaaagacgttggctcactggacgaaaagatgaaatctctggatgttaaccaggattcagagttgaaatttaacgaatattggcgtttaatcggcgaactggccaaggaaatcaggaagaaaaaggatctcaaaatccgcaagaaatag

SEQ ID NO: 298683 - DNA, 297 bp, Artificial Sequence
  derived and/or modified sequence
atggccgccgagccactaacagaacttgaggagagcatcgagaccgtggtgaccacattcttcacattcgcccgccaggagggcagaaaagattccctcagcgtgaacgagtttaaagagctggtcacacagcagctgccacaccttttgaaagatgttggatcacttgatgagaaaatgaaatctcttgatgttaatcaagactctgagttaaagttcaatgagtactggagattgataggggaactcgcaaaggagatccggaagaagaaggatctgaagatcaggaaaaaatag

SEQ ID NO: 298684 - DNA, 297 bp, Artificial Sequence
  derived and/or modified sequence
atggctgctgagcccctgacagagctggaggagagcattgaaacagtggtgaccaccttcttcacctttgcccggcaggagggcaggaaggacagcctgtctgtgaatgagttcaaggagctggtgacccagcagctgccccacctgctgaaggatgtgggcagcctggatgagaagatgaagagcctggatgtgaaccaggacagcgagctgaagttcaatgagtactggaggctcatcggggagctggccaaggagatcaggaagaagaaggacctgaagatcaggaagaagtag

SEQ ID NO: 298685 - DNA, 297 bp, Artificial Sequence
  derived and/or modified sequence
atggccgccgagcccctgaccgagctggaggagagcatcgagaccgtggtcacgacctttttcaccttcgcacggcaggaaggccgaaaagactctctctcggttaacgaatttaaggagctggtgacccaacagttgccccacctgttaaaggatgtgggatctctagatgagaaaatgaagagccttgacgtaaatcaagattctgagctgaaatttaacgagtattggagactgattggcgagctggcaaaggagattagaaagaagaaggatttgaaaattcgcaagaagtag

SEQ ID NO: 298686 - DNA, 297 bp, Artificial Sequence
  derived and/or modified sequence
atggccgccgagcccctgaccgagctggaggagagcatcgagaccgttgtgacaacgtttttcacattcgcgcgacaggagggtcgcaaagattcgctgtccgtcaatgagtttaaagagttagttacacaacagctcccacatctgctgaaggacgtcggatcgcttgacgagaaaatgaaatccctggatgtgaaccaagattcagaacttaaatttaacgaatactggcgcttgatcggtgagctggcgaaagaaattcgaaaaaaaaaggacctgaaaattcggaaaaagtag

SEQ ID NO: 298687 - DNA, 297 bp, Artificial Sequence
  derived and/or modified sequence
atggccgccgagcccctgaccgagctggaggagagcatcgagaccgtagtgacgaccttcttcacattcgcccgccaggagggacggaaggatagcctgtctgttaacgagttcaaggagctggtgacacaacagctgccgcacctgctcaaggacgtcggcagtttggatgagaaaatgaaatcgctcgatgtgaatcaggactctgagctcaagttcaatgagtattggcgtttgattggagagttggccaaggaaatcagaaaaaagaaggacttgaagattcggaaaaaatag

SEQ ID NO: 298688 - DNA, 297 bp, Artificial Sequence
  derived and/or modified sequence
atggccgccgagcccctgaccgagctggaggagagcatcgagaccgtcgtcacaacgttcttcacgttcgctcgacaagagggtcgcaaagatagtctgtccgtgaatgagttcaaggaactggttacccagcagctaccccatcttctcaaagatgtgggctcactcgacgagaaaatgaagagccttgacgtgaaccaggattccgagttaaagttcaatgagtactggagactaatcggggagctggccaaagaaattagaaagaagaaagatcttaagattaggaagaagtag

SEQ ID NO: 298689 - DNA, 297 bp, Artificial Sequence
  derived and/or modified sequence
atggccgccgagcccctgaccgagctggaggagagcatcgagaccgtggtaaccacattctttacatttgctcgacaggaagggaggaaggattcactgagtgtgaacgagttcaaagagcttgtaactcagcagctgccgcacctactgaaggatgttggttcccttgatgagaagatgaagagccttgacgttaaccaagactccgaactcaaatttaatgagtactggaggttgattggcgaacttgctaaagagattaggaagaagaaggacctgaagatcaggaaaaagtag

SEQ ID NO: 298690 - DNA, 297 bp, Artificial Sequence
  derived and/or modified sequence
atggccgctgagcctctcaccgagctggaagagtcaatcgagaccgtagtcacaaccttctttaccttcgcgcgtcaagaagggcgaaaggactccctgtcagtgaatgagtttaaagagttagtgacccaacagcttccacacctgctgaaagatgtgggctccctggatgaaaagatgaagtccttggatgtgaatcaggacagtgaactcaagtttaatgaatactggaggctcatcggggaactcgcgaaagaaattcgcaagaaaaaggatcttaagatccgtaaaaaatag

SEQ ID NO: 298691 - DNA, 297 bp, Artificial Sequence
  derived and/or modified sequence
atggccgcagagccgcttacagagctagaggagtcaatcgagaccgtggtcaccaccttcttcacctttgccaggcaggaaggccgtaaagatagcctgagcgtgaacgagtttaaggagctggtcacccagcagctcccgcacctgctcaaggacgtcgggagtctggatgagaagatgaagagccttgatgttaaccaggacagtgagctgaagtttaatgagtactggagactgattggcgagcttgcaaaggagatcaggaagaaaaaagacctcaaaatcagaaaaaagtag

SEQ ID NO: 298692 - DNA, 297 bp, Artificial Sequence
  derived and/or modified sequence
atggccgcagaaccactaactgaactcgaggaatcgattgaaaccgtcgttaccaccttttttacgtttgcaagacaggaaggccgtaaggattccctttccgtgaatgagttcaaagaacttgtcacacagcagttacctcatctgctgaaagatgttggttcacttgatgagaaaatgaagagccttgatgtaaatcaggactccgaactgaaattcaacgaatactggagattgattggtgagctggccaaagagatccggaagaaaaaagacctaaagattagaaagaaatag

SEQ ID NO: 298693 - DNA, 297 bp, Artificial Sequence
  derived and/or modified sequence
atggccgcagagccccttacggaactggaggaatccatcgaaaccgtcgtcaccaccttcttcacctttgcacgtcaggaagggaggaaggattcgcttagtgtgaacgaattcaaagagcttgtgacccagcagctgccgcacttactcaaggatgtcggttccctggatgaaaagatgaaatctctggatgtcaaccaggattctgaactgaagttcaatgaatactggaggcttattggagaactggccaaggagataaggaagaaaaaggatctgaaaattagaaaaaaatag

SEQ ID NO: 298694 - DNA, 297 bp, Artificial Sequence
  derived and/or modified sequence
atggccgctgaacccctgactgagctcgaagaatccattgagactgtggttactaccttcttcaccttcgcgagacaggaaggcagaaaagatagcctctctgtgaatgaatttaaggaattagtgacccaacagctgcctcacctactcaaggacgtcggtagcctggacgaaaagatgaaatccctggatgtgaaccaggactccgaacttaagttcaatgagtattggcggcttataggcgaactcgccaaggagattagaaaaaaaaaggatctcaagatccgcaagaaatag

SEQ ID NO: 298695 - DNA, 1137 bp, Artificial Sequence
  derived and/or modified sequence
aacaaattggtaatcggtggttaaataaatatgcccaaagtcccacagctagaaagtagcagggctggaatttgaacccagtccaataaaacctcaaaaccggtgcactttctaccgtatcctgaggcttctttactttggggccctggttagccttagcagcctagttttctacatccttcatgccagttgaatgaaactactgacatgctccacattcttctttctcccatgcttttgttcattcagttacctcctcctaaaatgtctgcatttacccagataatcttccaatggaaatccatggttcaagtgccacctcttcaggaaagccatctgacttcaatcaggaagccagagagctccgtctgcagcagctctttcagctccttcttgctcagcttgtacttgtccccctctttgcccgagtgggcgtggaacacgttgatgagggtctccatcgccgtctccagctcagagcccattgcagcagtgcacctacccacccccatcatggaagtgagctgaggaccaggcccggagtacctggggtctaggcagcagtggatggtgcaggggaaagaggtgggaaggaggtcctgggagggacactggatgtcttaccccaagctgggccttgcagtacctgtggctggctgtgctggttgagcccgcttccacaggtcagccctgacaaaggtcagctagccccttgaggacatcagctttggcctcagggtcctaatggcagcagaaccactgacagagctagaggagtccattgagaccgtggtcaccaccttcttcacctttgcaaggcaggagggccggaaggatagcctcagcgtcaacgagttcaaagagctggttacccagcagttgccccatctgctcaaggatgtgggctctcttgatgagaagatgaagagcttggatgtgaatcaggactcggagctcaagttcaatgagtactggagattgattggggagctggccaaggaaatcaggaagaagaaagacctgaagatcaggaagaagtaaagccgcctggctgagatggggtgggcagggcagagctgatcagggccgagcagaaccgcactcttcccaaataaagcttcctccttgaaacacaaa

SEQ ID NO: 298696 - DNA, 892 bp, Artificial Sequence
  derived and/or modified sequence
cggtgtccaaaacaaaatggccgccacgtccagtgcttgtctgaccggctaaaatggcgtctacgcaattacgtcaggcgtcagatccgcgcacgactagagggcgggaaagatttgagctacgcctgcgcagagttgagaagctgatgtctcctcgacttccaactggaaccttgaacccccacatttctggaccttgagcattcctcaagtaggaagatgtaatgcaccttgacctctttctaaataagacacttccccaaataaggggagttgagagtgaacagtcttcacgtctccacccacttccagatcccagaggagacagacatcggatggctgttacctcctcctaaaatgtctgcatttacccagataatcttccaatggaaatccatggttcaagtgccacctcttcaggaaagccatctgacttcaatcaggtcagccctgacaaaggtcagctagccccttgaggacatcagctttggcctcagggtcctaatggcagcagaaccactgacagagctagaggagtccattgagaccgtggtcaccaccttcttcacctttgcaaggcaggagggccggaaggatagcctcagcgtcaacgagttcaaagagctggttacccagcagttgccccatctgctcaaggatgtgggctctcttgatgagaagatgaagagcttggatgtgaatcaggactcggagctcaagttcaatgagtactggagattgattggggagctggccaaggaaatcaggaagaagaaagacctgaagatcaggaagaagtaaagccgcctggctgagatggggtgggcagggcagagctgatcagggccgagcagaaccgcactcttcccaaataaagcttcctccttgaaac

SEQ ID NO: 298697 - DNA, 547 bp, Artificial Sequence
  derived and/or modified sequence
gctgggaggagcggttagagtgtgtgtgggcggatgcgagtggccggagaccagggcccaacataaacaagctttggagacaaacaaccttatgacctgtcagccctgacaaaggtcagctagccccttgaggacatcagctttggcctcagggtcctaatggcagcagaaccactgacagagctagaggagtccattgagaccgtggtcaccaccttcttcacctttgcaaggcaggagggccggaaggatagcctcagcgtcaacgagttcaaagagctggttacccagcagttgccccatctgctcaaggatgtgggctctcttgatgagaagatgaagagcttggatgtgaatcaggactcggagctcaagttcaatgagtactggagattgattggggagctggccaaggaaatcaggaagaagaaagacctgaagatcaggaagaagtaaagccgcctggctgagatggggtgggcagggcagagctgatcagggccgagcagaaccgcactcttcccaaataaagcttcctccttgaaac

SEQ ID NO: 298698 - DNA, 579 bp, Artificial Sequence
  derived and/or modified sequence
gtactaaacccgtcctggagcagggagtcagagacgccccgttccaggacccttgtcaccgggagacaggagcggggaggatctgtggggtcctgggttcagcactctgccctgctgccgctgaggagaggtcagccctgacaaaggtcagctagccccttgaggacatcagctttggcctcagggtcctaatggcagcagaaccactgacagagctagaggagtccattgagaccgtggtcaccaccttcttcacctttgcaaggcaggagggccggaaggatagcctcagcgtcaacgagttcaaagagctggttacccagcagttgccccatctgctcaaggatgtgggctctcttgatgagaagatgaagagcttggatgtgaatcaggactcggagctcaagttcaatgagtactggagattgattggggagctggccaaggaaatcaggaagaagaaagacctgaagatcaggaagaagtaaagccgcctggctgagatggggtgggcagggcagagctgatcagggccgagcagaaccgcactcttcccaaataaagcttcctccttgaaac

SEQ ID NO: 298699 - DNA, 684 bp, Artificial Sequence
  derived and/or modified sequence
aggcagcagtggatggtgcaggggaaagaggtgggaaggaggtcctgggagggacactggatgtcttaccccaagctgggccttgcagtacctgtggctggctgtgctggttgagcccgaatcgaccacggaaatttgacacctccgggcttggaagcagctctctcctccttccccgctgcttataaacctcagccctgaggctccagctcactctaccccatctccttgccgggtcagccctgacaaaggtcagctagccccttgaggacatcagctttggcctcagggtcctaatggcagcagaaccactgacagagctagaggagtccattgagaccgtggtcaccaccttcttcacctttgcaaggcaggagggccggaaggatagcctcagcgtcaacgagttcaaagagctggttacccagcagttgccccatctgctcaaggatgtgggctctcttgatgagaagatgaagagcttggatgtgaatcaggactcggagctcaagttcaatgagtactggagattgattggggagctggccaaggaaatcaggaagaagaaagacctgaagatcaggaagaagtaaagccgcctggctgagatggggtgggcagggcagagctgatcagggccgagcagaaccgcactcttcccaaataaagcttcctccttgaaac

SEQ ID NO: 298700 - DNA, 297 bp, Artificial Sequence
  derived and/or modified sequence
atggccgccgagcccctgaccgagctggaggagagcatcgagaccgtggtgaccaccttcttcaccttcgccagacaggagggcagaaaggacagcctgagcgtgaacgagttcaaggagctggtgacccagcagctgccccacctgctgaaggacgtgggcagcctggacgagaagatgaagagcctggacgtgaaccaggacagcgagctgaagttcaacgagtactggagactgatcggcgagctggccaaggagatcagaaagaagaaggacctgaagatcagaaagaagtag

SEQ ID NO: 298701 - protein, 114 aa, Artificial Sequence
  derived and/or modified sequence
MRLLILALLGICSLTAYIVEGVGSEVSDKRTCVSLTTQRLPVSRIKTYTITEGSLRAVIFITKRGLKVCADPQATWVRDVVRSMDRKSNTRNNMIQTKPTGTQQSTNTAVTLTG

SEQ ID NO: 298702 - DNA, 345 bp, Artificial Sequence
  derived and/or modified sequence
atgagactgttaattctcgccctgctggggatatgctcacttaccgcgtatattgtcgagggtgtgggttcagaggtgagcgataagagaacgtgcgtgtctctgactactcagcggctgcctgtatcccgaatcaagacttacactatcaccgaagggtccctccgcgctgtcatattcatcactaagagaggattaaaggtgtgtgctgatcctcaggccacgtgggttcgggacgtggtgaggtcaatggatcgcaagagcaatacaagaaacaatatgattcagaccaaaccaaccggcacacagcagagcaccaacaccgccgtgaccctcaccggctag

SEQ ID NO: 298703 - DNA, 345 bp, Artificial Sequence
  derived and/or modified sequence
atgaggctgctgatcctggccctgctgggcatctgcagcctgacagcctacatcgtggagggcgtgggcagcgaggtgtctgacaagaggacctgtgtgtccctgaccacccagaggctgcctgtgagccgcatcaagacctacaccatcacagagggcagcctgcgggctgtgatcttcatcaccaagaggggcctgaaggtgtgtgccgacccccaggccacctgggtgagagatgtggtgcgctccatggacaggaagagcaacaccaggaacaacatgatccagaccaagcccaccggcacccagcagagcaccaacacagctgtgaccctgactggatag

SEQ ID NO: 298704 - DNA, 345 bp, Artificial Sequence
  derived and/or modified sequence
atgcggctgctgatcctggccctgctgggcatctgcagcctgaccgcttatattgtcgaaggagtcgggagcgaggtttcagacaaaagaacttgcgtgagcctgacgacacagaggttaccggtgtcccggatcaaaacctataccatcacggaagggagtctgagagccgtgattttcatcactaagagaggcctcaaagtttgcgcagatccgcaggcaacttgggtccgcgacgtagtgcgctcaatggatcgtaagagcaacactcggaataacatgattcagaccaagcccacggggactcaacagtctactaacaccgctgtcacactcactggatag

SEQ ID NO: 298705 - DNA, 345 bp, Artificial Sequence
  derived and/or modified sequence
atgaggctgctgattctagctcttctgggtatctgtagtttgacagcctacatcgtggaaggagtgggctcagaagtttctgataagcgtacttgtgtttctctgaccacccagaggctgcccgtctcacggattaaaacatacaccatcacggaagggtcactgcgggctgtgattttcataactaagcgtgggctgaaggtgtgtgcagacccgcaggctacatgggtgcgagacgttgtgagaagcatggatcgcaaaagcaatacacgcaataacatgatacagacaaagcccactggaacccagcagagtaccaataccgcagttactttaactggctag

SEQ ID NO: 298706 - DNA, 1367 bp, Artificial Sequence
  derived and/or modified sequence
taagaaaaataaaagcatcagtattgcaaagactttccatgatcctacacccacctcgaaagccccctctcaccacaggaagtgcactgaccactggaggcataaaagaggtcctcaaagagcccgatcctcactctccttgcacagctcagcaggacctcagccatgagacttctcatcctggccctccttggcatctgctctctcactgcatacattgtggaaggtgtagggagtgaagtctcagataagaggacctgtgtgagcctcactacccagcgactgccggttagcagaatcaagacctacaccatcacggaaggctccttgagagcagtaatttttattaccaaacgtggcctaaaagtctgtgctgatccacaagccacatgggtgagagacgtggtcaggagcatggacaggaaatccaacaccagaaataacatgatccagaccaagccaacaggaacccagcaatcgaccaatacagctgtgactctgactggctagtagtctctggcaccctgtccgtctccagccagccagctcatttcactttacacgctcatggactgagtttatactcaccttttatgaaagcactgcatgaataaaattattcctttgtatttttacttttaaatgtcttctgtattcacttatatgttctaattaataaattatttattattaagaatagttccctagtctattcattatatttagggaaaggtagtgtatcattgttgtttgatttctgaccttgtacctctctttgatggtaaccataatggaagagattctggctagtgtctatcagaggtgaaagctatatcaatctctcttagagtccagcttgtaatggttctttacacatcagtcacaagttacagctgtgacaatggcaacaatttgagatgtatttcaacttgtctctataatagaattctgtttatagaataagggagaaaataatccagtcttcactgggttcccattctgagggtccactactcaaaaatttgcttcactcaatttttttcacctctttgtgttttattttggtgtcctattaaaggaataaaatgacacaacttgtcccttttttgtcccattagcaaaaattagaattttggtataaagaaactttattcaagtaaaaatcaataccctttgaattggacaataatctcactaccttattaggatttctgtatttgccattacgctagttatcatgcatgttatgctttactgcgaataagcttttaatgctccaaatgctgacccatgcaatatttcctcatgtgatcacaatttgcagtaaacttttaattaaatgctcatctggtaactcaacaccccag

SEQ ID NO: 298707 - DNA, 345 bp, Artificial Sequence
  derived and/or modified sequence
atgagactgctgatcctggccctgctgggcatctgcagcctgaccgcctacatcgtggagggcgtgggcagcgaggtgagcgacaagagaacctgcgtgagcctgaccacccagagactgcccgtgagcagaatcaagacctacaccatcaccgagggcagcctgagagccgtgatcttcatcaccaagagaggcctgaaggtgtgcgccgacccccaggccacctgggtgagagacgtggtgagaagcatggacagaaagagcaacaccagaaacaacatgatccagaccaagcccaccggcacccagcagagcaccaacaccgccgtgaccctgaccggctag

SEQ ID NO: 298708 - protein, 911 aa, Artificial Sequence
  derived and/or modified sequence
MAQLFLPLLAALVLAQAPAALADVLEGDSSEDRAFRVRIAGDAPLQGVLGGALTIPCHVHYLRPPPSRRAVLGSPRVKWTFLSRGREAEVLVARGVRVKVNEAYRFRVALPAYPASLTDVSLALSELRPNDSGIYRCEVQHGIDDSSDAVEVKVKGVVFLYREGSARYAFSFSGAQEACARIGAHIATPEQLYAAYLGGYEQCDAGWLSDQTVRYPIQTPREACYGDMDGFPGVRNYGVVDPDDLYDVYCYAEDLNGELFLGDPPEKLTLEEARAYCQERGAEIATTGQLYAAWDGGLDHCSPGWLADGSVRYPIVTPSQRCGGGLPGVKTLFLFPNQTGFPNKHSRFNVYCFRDSAQPSAIPEASNPASNPASDGLEAIVTVTETLEELQLPQEATESESRGAIYSIPIMEDGGGGSSTPEDPAEAPRTLLEFETQSMVPPTGFSEEEGKALEEEEKYEDEEEKEEEEEEEEVEDEALWAWPSELSSPGPEASLPTEPAAQEESLSQAPARAVLQPGASPLPDGESEASRPPRVHGPPTETLPTPRERNLASPSPSTLVEAREVGEATGGPELSGVPRGESEETGSSEGAPSLLPATRAPEGTRELEAPSEDNSGRTAPAGTSVQAQPVLPTDSASRGGVAVVPASGDCVPSPCHNGGTCLEEEEGVRCLCLPGYGGDLCDVGLRFCNPGWDAFQGACYKHFSTRRSWEEAETQCRMYGAHLASISTPEEQDFINNRYREYQWIGLNDRTIEGDFLWSDGVPLLYENWNPGQPDSYFLSGENCVVMVWHDQGQWSDVPCNYHLSYTCKMGLVSCGPPPELPLAQVFGRPRLRYEVDTVLRYRCREGLAQRNLPLIRCQENGRWEAPQISCVPRRPARALHPEEDPEGRQGRLLGRWKALLIPPSSPMPGP

SEQ ID NO: 298709 - DNA, 79 bp, Artificial Sequence
  derived and/or modified sequence
tatgactttcacaaattacagaaaaagacacccatttgacaagggaactgaaggtggtgaagacatactggcaggctac

SEQ ID NO: 298710 - DNA, 2736 bp, Artificial Sequence
  derived and/or modified sequence
atggcgcagttgtttcttccactcctggctgcgctcgttctggctcaggcaccagcagccctggctgacgtactggagggcgactcttcagaggaccgggcattcagagtaagaatcgcaggggatgccccattgcagggggtcctgggcggtgcactcactattccatgtcacgtccactatctgcgccctcctccaagtaggagggccgtgttaggatcccccagagtgaagtggaccttcctgtcaagaggaagagaggccgaggtactggttgcgagaggagttagggttaaggtgaacgaggcatacaggttccgggtggccctgccagcataccctgcttccttgactgatgtgtcccttgccctgtctgaactgcgcccaaatgacagcggtatctaccggtgcgaagttcagcacggtatcgacgactcatctgatgccgtagaggtgaaggtcaagggtgtcgtatttctgtacagagagggcagcgccaggtatgccttcagtttctccggcgctcaggaagcctgcgccagaataggcgcacatatagctacacccgagcaactgtatgctgcttacctcggcggatacgagcaatgtgacgcgggttggctgagcgatcagactgtgcgatatcccattcagactcctcgggaagcttgctatggtgatatggatggattccccggtgtaaggaactacggcgtagtcgatcctgatgacctttacgatgtgtattgttatgcagaagatctcaatggggagctgtttcttggtgatcccccagagaagctgacgctggaggaggccagggcctattgtcaagaaaggggcgctgagatcgcaaccactggacagttgtatgccgcttgggacggcggactcgatcactgtagccctggctggctagccgatgggagcgtaaggtacccaatcgtaacgccttctcagaggtgtggcggtggactgccaggagtcaaaactctgttcttgttcccgaaccaaactggattccctaacaagcattcacgctttaacgtgtactgttttcgggacagcgctcagcccagcgctatccctgaggcctcaaacccagccagcaatccggcaagcgatggcctggaagccattgtgacagtcacggaaacattagaggaattacagctcccacaggaagcaaccgagtctgaatcaagaggtgccatatattcgattccaatcatggaggatggaggcggaggatcctcaactcctgaggatcctgctgaggcacctcgaacgcttctagagtttgagacgcagtccatggtgccccctacgggtttctctgaggaagaagggaaggctctggaggaggaagagaagtacgaagacgaggaggaaaaagaggaggaagaggaagaggaagaggttgaagacgaggcgctgtgggcatggccctccgagctcagcagccccggaccagaggcctctctgcccactgagcctgctgcacaagaagagtccctctctcaagctccagccagggcagtgttgcaacccggagcctcaccacttcctgacggagaatccgaagcctcccgcccacccagggttcatggccctcccaccgagacccttccaacccccagagagaggaatctggcgtcaccttctcctagcacgttggtcgaagcgagagaagtgggcgaagccactgggggacccgaattgtctggtgtgccgagaggtgaaagcgaggaaaccgggtcgtccgagggagccccatccttactccctgcgacccgagcacctgaaggcactcgcgagctagaagccccaagcgaggataactccggaaggacagcccctgctggaacctcggtgcaggcacagcccgtgctgcccacggactcggctagtagaggtggagtcgcagttgtccccgcttcaggtgattgcgtaccctccccttgccacaacggcggaacgtgcttagaggaagaggagggagtgaggtgtctctgcctgcctggatacgggggagacctgtgtgatgttgggctgcggttctgcaatcctggctgggatgcctttcaaggcgcttgttacaagcatttcagtacccgccgtagttgggaggaggctgagacgcagtgccgaatgtatggagcgcacttagcttcaatctctacacccgaggaacaggactttatcaacaacaggtatcgcgagtatcagtggatcggactgaacgataggacaatcgaaggcgactttctctggtcagacggcgtgcccctgctgtacgagaattggaaccccggacagcccgattcctacttcctatcaggggagaactgcgtcgtcatggtgtggcatgaccagggccagtggtcagacgtcccttgtaattaccacctgtcctatacttgcaaaatggggcttgtgtcctgtggacccccaccagaactgccactggctcaggtattcggacgtcctcgcctgcgttatgaggtggacactgtcctgcgttatagatgccgggaaggactggcccagcgaaatcttccgctcattagatgccaggaaaatggcagatgggaagctcctcaaattagttgcgttcccaggcggccagcgcgtgctcttcaccccgaggaggatcctgagggccgacagggcagactactgggacggtggaaggccctgctcattcctccctcctctcccatgccgggaccatag

SEQ ID NO: 298711 - DNA, 2736 bp, Artificial Sequence
  derived and/or modified sequence
atggcacagctgttcctgccacttttggctgccctagttctcgcacaggcacctgcagctctggccgatgtgcttgagggagacagtagcgaggatcgcgcattccgtgtgcggattgccggcgatgccccattgcagggtgttctgggcggagctctaaccatcccatgccacgtacattatttgcgaccccccccctcccgccgcgccgtgctcggctccccaagggtgaagtggactttcttgagccggggtagagaggccgaggtgctggttgcccggggcgtaagggtcaaggtcaatgaagcctacaggttcagagtcgcactacccgcctaccccgcatccctcacagatgtttccttagccttgtcagaactgagacccaacgactcaggaatttatcggtgcgaggtgcagcatggcattgatgattcttctgatgccgtggaagtcaaagtgaaaggagttgtgtttctgtatagagaaggctcagctcggtacgcattctcttttagtggagcccaagaagcctgcgcccgaattggagcccatatcgccacacctgaacagttgtacgctgcttatctgggcgggtatgaacagtgtgatgccggctggctctctgaccagactgtgcgctatcccatccaaacgccaagagaggcctgctatggcgatatggacggctttccaggcgttagaaactatggggttgtcgaccccgacgatctatatgacgtgtattgctatgccgaggacctgaacggagagcttttcctgggagacccaccagaaaaactcaccctcgaggaagcccgcgcttattgccaggagagaggtgctgagatagccacaactggacagttatatgccgcctgggacggcgggctggatcattgttcacccggatggctggcagacggctcagtgcggtatccaattgtgacacccagtcagagatgcgggggcggcttacctggagtgaagaccctcttcttatttcctaaccagaccggctttccaaacaagcactcccgattcaacgtgtactgcttccgcgactccgcccagcctagcgctataccagaagcttccaaccccgcttcaaatccagcttcagacgggctggaggctattgtgacggttaccgagacgttagaggaactccagttgccacaagaggctacggaaagcgaaagtaggggcgcaatttactctatcccaataatggaagacgggggcggtgggagtagtacgcctgaagaccctgccgaggctccccgcactctgctcgaatttgagacccagtccatggtaccaccgactggattttccgaggaggaaggtaaagcactggaagaggaggaaaagtatgaagatgaagaggagaaagaagaagaagaggaagaggaagaagtggaagatgaagcgttgtgggcgtggccctctgagctgtcttcgcctggcccagaggcctcgctccctacagaaccggccgcccaggaggagtcactcagtcaggcaccagccagagctgtccttcagccgggtgcgtcgccattgcccgacggggagtctgaggcatctaggccacctcgtgtgcacggccctccaacggagacacttcccaccccccgggagcggaatcttgcttctccatctccatctacgctagtggaggcacgggaagtcggagaggccacaggaggccccgaactgtccggcgtacctagaggcgagagcgaggaaacaggttcatcagagggtgcaccaagtcttctgccagcgacccgtgctccagaggggacacgcgagctcgaagccccttctgaggataacagcggccgcaccgcaccagccgggaccagtgttcaggctcaacctgtcctgccaacagacagcgcgagtaggggcggcgtggctgtcgttcctgccagcggggattgcgtgcccagtccttgccataatggaggcacgtgtcttgaagaagaggaaggagttcgctgtctgtgcctcccgggatacgggggggatctctgcgacgtcggacttcgcttctgcaatccaggttgggacgcattccagggcgcgtgctataagcatttcagtaccagacgcagctgggaggaggccgaaacccagtgtaggatgtacggggcccatctggccagcattagcacgccagaggagcaggacttcatcaacaataggtaccgagaataccagtggatcggacttaatgatcgcacaatcgagggcgatttcctctggtccgacggcgtgcctcttctgtacgagaactggaacccaggccaaccagactcctattttctgtccggcgaaaattgtgttgtgatggtgtggcatgaccagggccagtggtccgacgtcccatgtaactaccacctgtcttacacgtgcaagatgggcttggttagttgtgggcctcctcccgaactccctttggctcaggtattcggccgtcctcgcttgcggtacgaggtggacactgttcttagatacagatgccgcgaggggctggctcagaggaatttgcctttgattcgctgccaggagaacggcagatgggaggctccacagattagctgtgttcctcgcaggcctgcacgcgcgctccatcccgaggaggatccagaaggtagacagggccggctcctcggtaggtggaaggcactgcttatccctccctcaagtcccatgccaggcccatag

SEQ ID NO: 298712 - DNA, 2736 bp, Artificial Sequence
  derived and/or modified sequence
atggctcaactcttcctgccgctgctggcagccctggtactggcacaagcccctgcagcgcttgcggacgtattagagggagattcttctgaggacagagcctttcgcgtacgaattgccggcgatgccccccttcaaggtgtgttgggtggcgctctcaccattccatgccacgttcactacctccggccacctccaagcagacgggcagtacttggcagccctagggtgaagtggacctttctgtcccgaggcagagaagctgaggtactggtggcgcgcggcgtacgggtaaaggtaaacgaggcttaccgatttcgagtggccctccctgcatatccagcctcattaacagacgtgagcctggcattatccgagctacgccccaatgacagtggtatatatcgttgcgaagtgcagcatggaattgacgactcatctgatgctgtagaggtgaaagtcaagggtgttgtatttttatatcgtgagggctctgcccggtacgctttctcctttagtggtgcccaggaagcatgcgctaggatcggggctcatatagccacaccagaacagctctacgccgcctacctcggaggatacgaacagtgcgatgccggatggttaagcgatcagaccgtgaggtacccgattcagactccccgagaggcgtgctatggggatatggatggattccctggtgttcgtaactacggcgtagtggacccggacgatctgtacgacgtttattgctatgcagaggacctgaacggagaattgttcctgggagaccctcctgagaagttgacgttggaagaggctagggcttactgtcaagagagaggcgcagagattgctacgactgggcagctatacgccgcatgggatggcggccttgatcactgttcacctggctggctggccgatggcagtgtacgttatcccattgttacacctagccagcgatgcggcggcgggcttcctggtgtcaaaacccttttcctgtttcccaatcaaaccggattcccaaacaagcatagtcggtttaatgtgtactgctttcgcgactccgcccaacccagcgctataccagaggcatctaacccagcttcgaacccagcatccgatggcctggaagccattgtcactgtgacagagacattagaagaacttcagctcccacaggaggctacagaatctgagtctcggggagccatctactcaatcccaatcatggaagacggaggcggaggatctagcactcctgaggaccctgccgaagcaccccgaaccctcctggaatttgagacccaatctatggtcccccctacaggtttttcagaggaagaaggcaaggcacttgaggaggaggagaagtatgaggacgaagaggagaaggaagaggaagaggaagaggaagaggtggaggacgaagcgctctgggcgtggccatctgaactcagctcccctggacccgaagcgtcattacctaccgagccagcggcacaagaagagagtttgtcgcaggcacccgcccgcgccgtactgcagcccggggcaagtcctctgcctgacggagagtctgaggcctctcgcccccctcgcgtccacggaccaccaaccgaaacactgcctaccccacgggagagaaacctagccagccccagtcctagtacactggtggaagccagagaggttggagaggccactggcggaccagaactgagcggagtccctaggggcgagtcagaagaaaccggcagttccgagggcgcacccagtttgctcccagccactcgagccccagaggggacaagagaactggaagcaccctccgaggacaactccggacgaactgcaccagccgggacatctgtgcaagcgcagcctgtgctgcccaccgactcagcttcaagggggggagtggctgtcgtacctgcctccggagactgtgtgcccagtccctgccataatgggggaacctgtctcgaagaagaagaaggagttcgctgcctgtgcctgcctggctacggcggagacctgtgcgacgtgggactgagattctgcaacccagggtgggacgcttttcagggagcatgctacaaacactttagtactagaagaagttgggaagaggccgaaacacagtgcagaatgtatggagcccatttagcttccatctccaccccagaggagcaggatttcattaacaatcgatatagagaatatcagtggataggattgaacgatcgcacaatcgagggggatttcttgtggtctgacggtgtacccttgctatacgagaactggaatcctggtcagcccgacagctatttcctaagcggggaaaactgtgtagtcatggtgtggcatgatcaagggcagtggtcagacgtgccgtgcaactatcatttaagttacacttgcaaaatgggactcgtttcctgtgggccacccccagaacttccgcttgctcaggtcttcggtaggccccgcttgcgctacgaagtcgatacagtgctgcggtatcggtgtagagagggactagctcagagaaacctgcccttgattcgatgccaggagaatggaaggtgggaggccccgcaaatcagctgcgtaccccgtcggccagcgagagcgctccatcctgaggaagatccagaagggagacagggtagactcttgggccgctggaaggcactcttgatccccccatcatctccaatgccaggcccctag

SEQ ID NO: 298713 - DNA, 3285 bp, Artificial Sequence
  derived and/or modified sequence
cgctcgtccttgctctcgccgctgctgccggagccgaagcagagaaggcagcgggtcccgtgaccgtcccgagagccccgcgctcccgaccagggggcgggggcggccccggggagggcggggcaggggcggggggaagaaagggggttttgtgctgcgccgggagggccggcgccctcttccgaatgtcctgcggccccagcctctcctcacgctcgcgcagtctccgccgcagtctcagctgcagctgcaggactgagccgtgcacccggaggagacccccggaggaggcgacaaacttcgcagtgccgcgacccaaccccagccctgggtagcctgcagcatggcccagctgttcctgcccctgctggcagccctggtcctggcccaggctcctgcagctttagcagatgttctggaaggagacagctcagaggaccgcgcttttcgcgtgcgcatcgcgggcgacgcgccactgcagggcgtgctcggcggcgccctcaccatcccttgccacgtccactacctgcggccaccgccgagccgccgggctgtgctgggctctccgcgggtcaagtggactttcctgtcccggggccgggaggcagaggtgctggtggcgcggggagtgcgcgtcaaggtgaacgaggcctaccggttccgcgtggcactgcctgcgtacccagcgtcgctcaccgacgtctccctggcgctgagcgagctgcgccccaacgactcaggtatctatcgctgtgaggtccagcacggcatcgatgacagcagcgacgctgtggaggacagccagctgtatcccatccagaccccacgagaggcctgttacggagacatggatggcttccccggggtccggaactatggtgtggtggacccggatgacctctatgatgtgtactgttatgctgaagacctaaatggagaactgttcctgggtgaccctccagagaagctgacattggaggaagcacgggcgtactgccaggagcggggtgcagagattgccaccacgggccaactgtatgcagcctgggatggtggcctggaccactgcagcccagggtggctagctgatggcagtgtgcgctaccccatcgtcacacccagccagcgctgtggtgggggcttgcctggtgtcaagactctcttcctcttccccaaccagactggcttccccaataagcacagccgcttcaacgtctactgcttccgagggagcacttgccttctgccatccctgaggcctccaacccagcctccaacccaggatggactagaggctatcgtcacagtgacagagaccctggaggaactgcagctgcctcaggaagccacagagagtgaatcccgtggggccatctactccatccccatcatggaggacggaggaggtggaagctccactccagaagacccagcagaggcccctaggacgctcctagaatttgaaacacaatccatggtaccgcccacggggttctcagaagaggaaggtaaggcattggaggaagaagagaaatatgaagatgaagaagagaaagaggaggaagaagaagaggaggaggtggaggatgaggctctgtgggcatggcccagcgagctcagcagcccgggccctgaggcctctctccccactgagccagcagcccaggaggagtcactctcccaggcgccagcaagggcagtcctgcagcctggtgcatcaccacttcctgatggagagtcagaagcttccaggcctccaagggtccatggaccacctactgagactctgcccactcccagggagaggaacctagcatccccatcaccttccactctggttgaggcaagagaggtgggggaggcaactggtggtcctgagctatctggggtccctcgaggagagagcgaggagacaggaagctccgagggtgccccttccctgcttccagccacacgggcccctgagggtaccagggagctggaggccccctctgaagataattctggaagaactgccccagcagggacctcagtgcaggcccagccagtgctgcccactgacagcgccagccgaggtggagtggccgtggtccccgcatcaggtgactgtgtccccagcccctgccacaatggtgggacatgcttggaggaggaggaaggggtccgctgcctatgtctgcctggctatgggggggacctgtgcgatgttggcctccgcttctgcaaccccggctgggacgccttccagggcgcctgctacaagcacttttccacacgaaggagctgggaggaggcagagacccagtgccggatgtacggcgcgcatctggccagcatcagcacacccgaggaacaggacttcatcaacaaccggtaccgggagtaccagtggatcggactcaacgacaggaccatcgaaggcgacttcttgtggtcggatggcgtccccctgctctatgagaactggaaccctgggcagcctgacagctacttcctgtctggagagaactgcgtggtcatggtgtggcatgatcagggacaatggagtgacgtgccctgcaactaccacctgtcctacacctgcaagatggggctggtgtcctgtgggccgccaccggagctgcccctggctcaagtgttcggccgcccacggctgcgctatgaggtggacactgtgcttcgctaccggtgccgggaaggactggcccagcgcaatctgccgctgatccgatgccaagagaacggtcgttgggaggccccccagatctcctgtgtgcccagaagacctgcccgagctctgcacccagaggaggacccagaaggacgtcaggggaggctactgggacgctggaaggcgctgttgatccccccttccagccccatgccaggtccctagggggcaaggccttgaacactgccggccacagcactgccctgtcacccaaattttccctcacaccctgcgctcccgccaccacaggaagtgacaacatgacgaggggtggtactggagtccaggtgacagttcctgaaggggcttctgggaaatacctaggaggctccagcccagcccaggccctctccccctaccctgggcaccagatcttccatcagggccggagtaaatccctaagtgcctcaactgccctctccctggcagccatcttgtcccctctattcctctagggagcactgtgcccactctttctgggttttccaagggaatgggcttgcaggatggagtgtctgtaaaatcaacaggaaataaaactgtgtatgagccca

SEQ ID NO: 298714 - DNA, 2736 bp, Artificial Sequence
  derived and/or modified sequence
atggcccagctgttcctgcccctgctggccgccctggtgctggcccaggcccccgccgccctggccgacgtgctggagggcgacagcagcgaggacagagccttcagagtgagaatcgccggcgacgcccccctgcagggcgtgctgggcggcgccctgaccatcccctgccacgtgcactacctgagacccccccccagcagaagagccgtgctgggcagccccagagtgaagtggaccttcctgagcagaggcagagaggccgaggtgctggtggccagaggcgtgagagtgaaggtgaacgaggcctacagattcagagtggccctgcccgcctaccccgccagcctgaccgacgtgagcctggccctgagcgagctgagacccaacgacagcggcatctacagatgcgaggtgcagcacggcatcgacgacagcagcgacgccgtggaggtgaaggtgaagggcgtggtgttcctgtacagagagggcagcgccagatacgccttcagcttcagcggcgcccaggaggcctgcgccagaatcggcgcccacatcgccacccccgagcagctgtacgccgcctacctgggcggctacgagcagtgcgacgccggctggctgagcgaccagaccgtgagataccccatccagacccccagagaggcctgctacggcgacatggacggcttccccggcgtgagaaactacggcgtggtggaccccgacgacctgtacgacgtgtactgctacgccgaggacctgaacggcgagctgttcctgggcgacccccccgagaagctgaccctggaggaggccagagcctactgccaggagagaggcgccgagatcgccaccaccggccagctgtacgccgcctgggacggcggcctggaccactgcagccccggctggctggccgacggcagcgtgagataccccatcgtgacccccagccagagatgcggcggcggcctgcccggcgtgaagaccctgttcctgttccccaaccagaccggcttccccaacaagcacagcagattcaacgtgtactgcttcagagacagcgcccagcccagcgccatccccgaggccagcaaccccgccagcaaccccgccagcgacggcctggaggccatcgtgaccgtgaccgagaccctggaggagctgcagctgccccaggaggccaccgagagcgagagcagaggcgccatctacagcatccccatcatggaggacggcggcggcggcagcagcacccccgaggaccccgccgaggcccccagaaccctgctggagttcgagacccagagcatggtgccccccaccggcttcagcgaggaggagggcaaggccctggaggaggaggagaagtacgaggacgaggaggagaaggaggaggaggaggaggaggaggaggtggaggacgaggccctgtgggcctggcccagcgagctgagcagccccggccccgaggccagcctgcccaccgagcccgccgcccaggaggagagcctgagccaggcccccgccagagccgtgctgcagcccggcgccagccccctgcccgacggcgagagcgaggccagcagaccccccagagtgcacggcccccccaccgagaccctgcccacccccagagagagaaacctggccagccccagccccagcaccctggtggaggccagagaggtgggcgaggccaccggcggccccgagctgagcggcgtgcccagaggcgagagcgaggagaccggcagcagcgagggcgcccccagcctgctgcccgccaccagagcccccgagggcaccagagagctggaggcccccagcgaggacaacagcggcagaaccgcccccgccggcaccagcgtgcaggcccagcccgtgctgcccaccgacagcgccagcagaggcggcgtggccgtggtgcccgccagcggcgactgcgtgcccagcccctgccacaacggcggcacctgcctggaggaggaggagggcgtgagatgcctgtgcctgcccggctacggcggcgacctgtgcgacgtgggcctgagattctgcaaccccggctgggacgccttccagggcgcctgctacaagcacttcagcaccagaagaagctgggaggaggccgagacccagtgcagaatgtacggcgcccacctggccagcatcagcacccccgaggagcaggacttcatcaacaacagatacagagagtaccagtggatcggcctgaacgacagaaccatcgagggcgacttcctgtggagcgacggcgtgcccctgctgtacgagaactggaaccccggccagcccgacagctacttcctgagcggcgagaactgcgtggtgatggtgtggcacgaccagggccagtggagcgacgtgccctgcaactaccacctgagctacacctgcaagatgggcctggtgagctgcggccccccccccgagctgcccctggcccaggtgttcggcagacccagactgagatacgaggtggacaccgtgctgagatacagatgcagagagggcctggcccagagaaacctgcccctgatcagatgccaggagaacggcagatgggaggccccccagatcagctgcgtgcccagaagacccgccagagccctgcaccccgaggaggaccccgagggcagacagggcagactgctgggcagatggaaggccctgctgatcccccccagcagccccatgcccggcccctag

SEQ ID NO: 298715 - DNA, 3461 bp, Artificial Sequence
  derived and/or modified sequence
ccttgctctcgccgctgctgccggagccgaagcagagaaggcagcgggtcccgtgaccgtcccgagagccccgcgctcccgaccagggggcgggggcggccccggggagggcggggcaggggcggggggaagaaagggggttttgtgctgcgccgggagggccggcgccctcttccgaatgtcctgcggccccagcctctcctcacgctcgcgcagtctccgccgcagtctcagctgcagctgcaggactgagccgtgcacccggaggagacccccggaggaggcgacaaacttcgcagtgccgcgacccaaccccagccctgggtagcctgcagcatggcccagctgttcctgcccctgctggcagccctggtcctggcccaggctcctgcagctttagcagatgttctggaaggagacagctcagaggaccgcgcttttcgcgtgcgcatcgcgggcgacgcgccactgcagggcgtgctcggcggcgccctcaccatcccttgccacgtccactacctgcggccaccgccgagccgccgggctgtgctgggctctccgcgggtcaagtggactttcctgtcccggggccgggaggcagaggtgctggtggcgcggggagtgcgcgtcaaggtgaacgaggcctaccggttccgcgtggcactgcctgcgtacccagcgtcgctcaccgacgtctccctggcgctgagcgagctgcgccccaacgactcaggtatctatcgctgtgaggtccagcacggcatcgatgacagcagcgacgctgtggaggtcaaggtcaaaggggtcgtctttctctaccgagagggctctgcccgctatgctttctccttttctggggcccaggaggcctgtgcccgcattggagcccacatcgccaccccggagcagctctatgccgcctaccttgggggctatgagcaatgtgatgctggctggctgtcggatcagaccgtgaggtatcccatccagaccccacgagaggcctgttacggagacatggatggcttccccggggtccggaactatggtgtggtggacccggatgacctctatgatgtgtactgttatgctgaagacctaaatggagaactgttcctgggtgaccctccagagaagctgacattggaggaagcacgggcgtactgccaggagcggggtgcagagattgccaccacgggccaactgtatgcagcctgggatggtggcctggaccactgcagcccagggtggctagctgatggcagtgtgcgctaccccatcgtcacacccagccagcgctgtggtgggggcttgcctggtgtcaagactctcttcctcttccccaaccagactggcttccccaataagcacagccgcttcaacgtctactgcttccgagactcggcccagccttctgccatccctgaggcctccaacccagcctccaacccagcctctgatggactagaggctatcgtcacagtgacagagaccctggaggaactgcagctgcctcaggaagccacagagagtgaatcccgtggggccatctactccatccccatcatggaggacggaggaggtggaagctccactccagaagacccagcagaggcccctaggacgctcctagaatttgaaacacaatccatggtaccgcccacggggttctcagaagaggaaggtaaggcattggaggaagaagagaaatatgaagatgaagaagagaaagaggaggaagaagaagaggaggaggtggaggatgaggctctgtgggcatggcccagcgagctcagcagcccgggccctgaggcctctctccccactgagccagcagcccaggaggagtcactctcccaggcgccagcaagggcagtcctgcagcctggtgcatcaccacttcctgatggagagtcagaagcttccaggcctccaagggtccatggaccacctactgagactctgcccactcccagggagaggaacctagcatccccatcaccttccactctggttgaggcaagagaggtgggggaggcaactggtggtcctgagctatctggggtccctcgaggagagagcgaggagacaggaagctccgagggtgccccttccctgcttccagccacacgggcccctgagggtaccagggagctggaggccccctctgaagataattctggaagaactgccccagcagggacctcagtgcaggcccagccagtgctgcccactgacagcgccagccgaggtggagtggccgtggtccccgcatcaggtgactgtgtccccagcccctgccacaatggtgggacatgcttggaggaggaggaaggggtccgctgcctatgtctgcctggctatgggggggacctgtgcgatgttggcctccgcttctgcaaccccggctgggacgccttccagggcgcctgctacaagcacttttccacacgaaggagctgggaggaggcagagacccagtgccggatgtacggcgcgcatctggccagcatcagcacacccgaggaacaggacttcatcaacaaccggtaccgggagtaccagtggatcggactcaacgacaggaccatcgaaggcgacttcttgtggtcggatggcgtccccctgctctatgagaactggaaccctgggcagcctgacagctacttcctgtctggagagaactgcgtggtcatggtgtggcatgatcagggacaatggagtgacgtgccctgcaactaccacctgtcctacacctgcaagatggggctggtgtcctgtgggccgccaccggagctgcccctggctcaagtgttcggccgcccacggctgcgctatgaggtggacactgtgcttcgctaccggtgccgggaaggactggcccagcgcaatctgccgctgatccgatgccaagagaacggtcgttgggaggccccccagatctcctgtgtgcccagaagacctgcccgagctctgcacccagaggaggacccagaaggacgtcaggggaggctactgggacgctggaaggcgctgttgatccccccttccagccccatgccaggtccctagggggcaaggccttgaacactgccggccacagcactgccctgtcacccaaattttccctcacaccctgcgctcccgccaccacaggaagtgacaacatgacgaggggtggtactggagtccaggtgacagttcctgaaggggcttctgggaaatacctaggaggctccagcccagcccaggccctctccccctaccctgggcaccagatcttccatcagggccggagtaaatccctaagtgcctcaactgccctctccctggcagccatcttgtcccctctattcctctagggagcactgtgcccactctttctgggttttccaagggaatgggcttgcaggatggagtgtctgtaaaatcaacaggaaataaaactgtgtatgagccca

SEQ ID NO: 298716 - DNA, 2736 bp, Artificial Sequence
  derived and/or modified sequence
atggcacagttgtttttacctttgctggccgccctggtgctcgcacaagccccggccgccctcgctgacgtccttgaaggtgactctagtgaggatcgcgcatttcgggttcggatcgccggggacgcccctctgcagggagttctgggaggagctcttactatcccgtgccatgtacactacctccgaccccctccgtcaagacgagctgtgctgggttcccctcgggtcaagtggacctttctctccagaggccgggaggctgaggtcttagtggctcgcggggttagggtaaaagtgaatgaggcgtatcggttcagagtggccctgccagcttatccagccagtctgacagacgtgtctttggctctgagcgaactgcgccctaacgattcaggcatttacagatgcgaggttcagcacggtatcgacgactccagtgatgcagtggaagtcaaagtcaaaggcgtggtgtttctgtatcgggaaggcagcgcaaggtacgctttttcattcagtggagcccaggaggcttgcgccagaataggggctcacatcgccaccccggagcagctttacgccgcctatctgggaggctacgaacagtgcgatgcagggtggctatccgaccagaccgtacgctacccaatacagacaccccgtgaagcctgctacggagacatggacggcttcccaggtgttcggaactatggagtggtagaccctgatgatctctacgatgtctactgttatgctgaagatctcaacggggaattattcctgggcgacccacccgagaaacttacactcgaggaggcccgcgcgtactgccaggaacggggagcggaaatcgctacgaccggtcaactctatgccgcttgggacggggggctggatcattgcagcccgggctggctggccgatgggtccgtcaggtaccctattgtgacccctagccagagatgcggcggcggactgccaggcgtcaaaaccctgttcctcttccctaaccaaacgggctttcccaataaacattctcggtttaatgtttactgttttagagactctgcacagccttccgccattcccgaggcctccaaccccgcaagtaacccagccagtgacggtctggaagccatcgtgacggtcactgagactttggaagagctgcaactgcctcaagaggctaccgagtccgagtctcgaggggctatctacagtattcccatcatggaggacggaggcggtggaagctccaccccagaggaccctgcggaggctcctaggactcttctcgaattcgaaacacagtctatggtgccacccaccggtttctcagaggaagaaggcaaggcgctagaggaagaggagaagtatgaggacgaggaggagaaagaggaagaagaagaagaggaggaggtggaggatgaggcgctctgggcctggccaagcgagctcagttcccccggacccgaggcatctctccctaccgagccggctgcccaggaggaaagcctgtcacaggcacccgcacgcgcagttttacagcctggagcctcccccctgcctgatggcgagtctgaagcatcccggccgccgcgcgttcacgggccgccaaccgaaaccctgcctactcctcgtgagaggaacctcgcctccccttctccgtctacgcttgtagaggcccgcgaggtcggcgaggcaaccgggggaccagagctctctggcgtaccccgcggcgagagcgaagagaccggaagtagcgagggggctccctctcttctgccagcgactcgggcacctgagggaacgcgagagctcgaggccccttctgaggataattcgggaagaactgcacctgcaggtacaagcgtgcaagcacagccggtactgccaacggattccgcctcccgtggcggggttgctgtggtcccagccagcggagactgtgtgcccagcccttgccataatggaggaacctgtcttgaagaagaagaaggcgtgcgctgcctctgcctgcccggatacggcggcgatttgtgcgacgtgggactgcgcttttgcaatccgggatgggacgcctttcagggagcctgttataagcacttctctacccgccgctcatgggaggaagccgagactcaatgtcggatgtacggcgcacacctggcgtcaattagcacccccgaggaacaagattttattaacaatcgttatcgggagtatcagtggattggtctgaatgataggacgattgagggtgactttttgtggagtgacggcgttccgctgctctatgagaattggaatcccgggcagcccgatagttattttttgagtggagaaaattgcgttgtaatggtgtggcatgaccaggggcagtggtctgacgtaccctgtaattatcatctttcatacacatgtaagatgggtctcgtttcttgtgggcctccaccggaactaccgctggcccaggtgttcgggagaccacgtcttcgctacgaagtggacacagtcctgaggtatcgctgtcgagagggactggcccagcggaatctgcccctgattaggtgccaagagaacggaagatgggaagctcctcagattagctgcgtgccgagacggccggcaagagccctgcacccggaggaggatccggaaggacgccaagggcgcctgttaggacgatggaaagcccttttaattcccccttcgtcacctatgcctggcccctag

SEQ ID NO: 298717 - DNA, 2736 bp, Artificial Sequence
  derived and/or modified sequence
atggcccagctgttcctgcccctgctggccgccctggtgctggcccaggccccagctgccctggctgatgtgctggagggggacagcagtgaagatcgggccttccgggtgagaattgctggagatgcccccctgcagggcgtgctgggcggggccctgaccatcccctgccacgtgcactacctgcggcccccacccagccggcgggctgtgctgggcagcccccgggtgaagtggaccttcctgagccggggccgggaggccgaggtgctggtggcccggggcgtgcgggtgaaggtgaatgaggcctaccgcttccgggtggccctgcctgcctacccagccagcctgacagatgtgtccctggccctgtctgagctgcggcccaatgacagcggcatctaccgctgtgaggtgcagcacggcattgatgacagcagtgatgctgtggaggtgaaggtgaagggcgtggtgttcctgtaccgggagggcagcgcccgctatgccttctccttcagcggggcccaggaggcctgtgcccgcatcggggcccacatcgccaccccagagcagctgtatgctgcctacctgggcggctatgagcagtgtgatgctggctggctgagtgaccagacagtgcgctaccccatccagaccccccgggaggcctgctatggagacatggatggcttccctggggtgagaaattatggagtggtggaccctgatgacctgtatgatgtgtactgctacgccgaggacctgaatggagagctgttcctgggggaccccccagagaagctgaccctggaggaggcccgggcctactgccaggagagaggagctgagatcgccaccaccggccagctgtatgctgcctgggatggcggcctggaccactgcagccctggctggctggctgatggctctgtgcgctaccccatcgtgacccccagccagagatgtggcggcggcctgcccggggtgaagaccctcttcctgttccccaaccagacaggcttccccaacaagcacagccgcttcaacgtgtactgcttccgggacagcgcccagcccagcgccatccctgaggccagcaacccagccagcaacccagccagtgatggcctggaggccatcgtgacagtgacagagaccctggaggagctgcagctgccccaggaggccacagaaagtgagagcagaggagccatctacagcatccccatcatggaggatggcggcggcggcagcagcaccccagaggaccctgctgaggcccccaggaccctgctggagtttgagacccagagcatggtgcccccaacaggcttcagcgaggaggagggcaaggccctggaggaggaggagaagtatgaagatgaggaggagaaggaggaggaggaggaggaggaggaggtggaggatgaggccctgtgggcctggcccagcgagctgagcagccctggccctgaggccagcctgcccacagagcctgctgcccaggaggagagcctgagccaggccccagcccgggctgtgctgcagcccggggccagccccctgcctgatggagagagcgaggccagccggcccccccgggtgcacggccccccaacagagaccctgcccaccccccgggagaggaacctggccagccccagccccagcaccctggtggaggcccgggaggtgggggaggccactggaggccctgagctgtctggagtgcccagaggagagagcgaggagaccggcagcagcgagggcgcccccagcctgctgcctgccacccgggcccctgagggcacccgggagctggaggcccccagcgaggacaacagcggccgcacagccccagctggcacctctgtgcaggcccagcctgtgctgcccacagattctgccagcagaggaggagtggccgtggtgcctgccagcggggactgtgtgcccagcccctgccacaatggaggcacctgcctggaggaggaggagggcgtgcgctgcctgtgcctgcccggctacggcggggacctgtgtgatgtgggcctgcgcttctgcaaccctggctgggatgccttccagggcgcctgctacaagcacttcagcacccggcgctcctgggaggaggccgagacccagtgcaggatgtatggagcccacctggccagcatcagcaccccagaggagcaggacttcatcaacaaccgctaccgggagtaccagtggattggcctgaatgacaggaccatcgagggggacttcctgtggagcgatggagtgcccctgctgtatgagaactggaaccctggccagcctgacagctacttcctgagcggggagaactgtgtggtgatggtgtggcatgaccagggccagtggagcgatgtgccctgcaactaccacctgagctacacctgcaagatgggcctggtgtcctgtggccccccacctgagctgcccctggcccaggtgtttggccggccccggctgcgctatgaggtggacacagtgctgcgctaccgctgccgggagggcctggcccagaggaacctgcccctcatccgctgccaggagaatggccgctgggaggccccccagatcagctgtgtgccccggcggcctgcccgggccctgcaccctgaggaggaccctgagggccggcagggccgcctgctgggccgctggaaggccctgctgatcccccccagcagccccatgcctggcccctag

SEQ ID NO: 298718 - DNA, 2736 bp, Artificial Sequence
  derived and/or modified sequence
atggcccagctgttcctgcccctgctggccgccctggtgctggcccaagccccagctgctctggcagacgtcctggaaggcgactcaagtgaagatcgcgcattccgggtgcgcattgcgggcgacgccccactgcagggagtgctcgggggagctttgacaatcccctgccacgtgcattatctgcgcccaccaccctcccgccgtgccgtccttggtagccctcgagtcaagtggactttcctctctagaggacgcgaggcagaggtcctggttgctcgcggggttagggtgaaggtgaatgaggcgtatcgcttcagagtcgcccttccagcttatcctgctagtttgactgatgtctcattggctctgtccgaattgcggcccaatgattctgggatctataggtgcgaagtgcagcatggcatagacgacagttcagatgcagttgaggtcaaagttaaaggggttgtgttcctttaccgggaggggtccgctagatacgccttctcattctcaggggctcaggaagcctgcgcaaggatcggggcacatatagcaacccctgagcaactctacgctgcctaccttggaggttatgagcaatgtgacgccggctggctgtctgatcagactgtgcgttatcctattcagacaccacgggaagcttgctacggagacatggacggatttccaggcgtaaggaattacggagtcgtggatcctgatgacttgtacgatgtgtattgttacgccgaggacctcaacggcgaattgtttcttggagatccccccgaaaagctgacgctggaagaagccagagcttactgccaggaaaggggggccgaaattgcaacaactggtcagctgtacgcggcgtgggatggaggcctggaccattgttcaccgggctggctcgcagacggaagcgttcgttaccccattgtcacccctagccagcgctgtggaggcggtttgcctggagtcaaaaccctgttccttttcccaaatcagacaggattcccgaacaaacattctagattcaacgtctactgctttcgcgacagtgcccaacctagcgctatcccagaggccagcaatcccgcctctaaccctgcatctgacggactggaagctattgttactgtcactgagacgctggaagaactccagttgccccaggaggctacagaatcagaatcccgaggagccatatactccattcccattatggaggatgggggaggcggtagctccacccccgaagatcctgcggaagctcccaggacactgctagagtttgagacacagtccatggttccacctacaggctttagtgaagaggaggggaaggccctggaagaagaggagaaatacgaagacgaggaggagaaagaagaagaagaagaggaagaagaggtcgaagacgaagcactatgggcatggccaagtgagctctcaagccctggccctgaggcctcacttcccacagagcccgccgcccaggaagagagcctgagtcaagcccccgcaagggccgtgttgcaacccggggcgtcccctctccccgatggagaaagtgaggccagtagacctccccgcgtgcacggaccccccactgagaccctgcccacaccacgcgaacgcaatttggccagccccagccccagcacactcgtcgaagcaagggaagttggggaggcgacaggcggcccggaactgtccggggtcccccgcggggaatcagaagagaccgggtcatcagagggcgctccctcactgctgccggccactcgcgcaccggaaggcactcgtgagctggaagccccctcggaagacaactccggtaggacagcgccagccgggacctctgtccaggcccagcctgtattgcccactgactctgcaagcagaggcggggttgcagtcgtgcctgcatctggtgactgtgtgcctagcccctgccataacggcggcacatgcctcgaggaggaggaaggcgtccggtgcctgtgcctcccaggatacggaggagatctctgcgatgtggggttgaggttctgcaaccctgggtgggatgcttttcagggagcttgctacaagcacttcagtacacgccgatcatgggaagaggccgaaacccagtgcagaatgtacggcgcacacttggcatcgatcagtacgcccgaggagcaggacttcataaacaaccgctaccgcgaataccagtggataggacttaacgaccggaccatagagggtgatttcttgtggagtgatggggtgcccctgttgtatgagaactggaacccgggccaacccgattcatattttttgagtggcgagaactgcgtggtgatggtgtggcatgaccagggacagtggagcgatgttccgtgcaattaccatctttcctatacctgcaaaatgggtctggtgtcttgtggacctcctccagagcttcctttagctcaggtgttcggtagaccaagactgcggtatgaagtcgataccgttctgcggtacaggtgtagagaggggctcgctcaacgaaatctgcctctgatccggtgtcaggagaacggaagatgggaggcccctcaaataagctgcgtacctagaagacctgctcgagcactgcatccggaagaggatccagaaggtagacagggcaggctgctgggacgatggaaagccctgctgattcctcccagtagtcccatgcccggcccctag

SEQ ID NO: 298719 - RNA, 2736 nt, Artificial Sequence
  derived and/or modified sequence
auggcacagcuguuccugccacuuuuggcugcccuaguucucgcacaggcaccugcagcucuggccgaugugcuugagggagacaguagcgaggaucgcgcauuccgugugcggauugccggcgaugccccauugcaggguguucugggcggagcucuaaccaucccaugccacguacauuauuugcgacccccccccucccgccgcgccgugcucggcuccccaagggugaaguggacuuucuugagccgggguagagaggccgaggugcugguugcccggggcguaagggucaaggucaaugaagccuacagguucagagucgcacuacccgccuaccccgcaucccucacagauguuuccuuagccuugucagaacugagacccaacgacucaggaauuuaucggugcgaggugcagcauggcauugaugauucuucugaugccguggaagucaaagugaaaggaguuguguuucuguauagagaaggcucagcucgguacgcauucucuuuuaguggagcccaagaagccugcgcccgaauuggagcccauaucgccacaccugaacaguuguacgcugcuuaucugggcggguaugaacagugugaugccggcuggcucucugaccagacugugcgcuaucccauccaaacgccaagagaggccugcuauggcgauauggacggcuuuccaggcguuagaaacuaugggguugucgaccccgacgaucuauaugacguguauugcuaugccgaggaccugaacggagagcuuuuccugggagacccaccagaaaaacucacccucgaggaagcccgcgcuuauugccaggagagaggugcugagauagccacaacuggacaguuauaugccgccugggacggcgggcuggaucauuguucacccggauggcuggcagacggcucagugcgguauccaauugugacacccagucagagaugcgggggcggcuuaccuggagugaagacccucuucuuauuuccuaaccagaccggcuuuccaaacaagcacucccgauucaacguguacugcuuccgcgacuccgcccagccuagcgcuauaccagaagcuuccaaccccgcuucaaauccagcuucagacgggcuggaggcuauugugacgguuaccgagacguuagaggaacuccaguugccacaagaggcuacggaaagcgaaaguaggggcgcaauuuacucuaucccaauaauggaagacgggggcggugggaguaguacgccugaagacccugccgaggcuccccgcacucugcucgaauuugagacccaguccaugguaccaccgacuggauuuuccgaggaggaagguaaagcacuggaagaggaggaaaaguaugaagaugaagaggagaaagaagaagaagaggaagaggaagaaguggaagaugaagcguugugggcguggcccucugagcugucuucgccuggcccagaggccucgcucccuacagaaccggccgcccaggaggagucacucagucaggcaccagccagagcuguccuucagccgggugcgucgccauugcccgacggggagucugaggcaucuaggccaccucgugugcacggcccuccaacggagacacuucccaccccccgggagcggaaucuugcuucuccaucuccaucuacgcuaguggaggcacgggaagucggagaggccacaggaggccccgaacuguccggcguaccuagaggcgagagcgaggaaacagguucaucagagggugcaccaagucuucugccagcgacccgugcuccagaggggacacgcgagcucgaagccccuucugaggauaacagcggccgcaccgcaccagccgggaccaguguucaggcucaaccuguccugccaacagacagcgcgaguaggggcggcguggcugucguuccugccagcggggauugcgugcccaguccuugccauaauggaggcacgugucuugaagaagaggaaggaguucgcugucugugccucccgggauacgggggggaucucugcgacgucggacuucgcuucugcaauccagguugggacgcauuccagggcgcgugcuauaagcauuucaguaccagacgcagcugggaggaggccgaaacccaguguaggauguacggggcccaucuggccagcauuagcacgccagaggagcaggacuucaucaacaauagguaccgagaauaccaguggaucggacuuaaugaucgcacaaucgagggcgauuuccucugguccgacggcgugccucuucuguacgagaacuggaacccaggccaaccagacuccuauuuucuguccggcgaaaauuguguugugaugguguggcaugaccagggccagugguccgacgucccauguaacuaccaccugucuuacacgugcaagaugggcuugguuaguugugggccuccucccgaacucccuuuggcucagguauucggccguccucgcuugcgguacgagguggacacuguucuuagauacagaugccgcgaggggcuggcucagaggaauuugccuuugauucgcugccaggagaacggcagaugggaggcuccacagauuagcuguguuccucgcaggccugcacgcgcgcuccaucccgaggaggauccagaagguagacagggccggcuccucgguagguggaaggcacugcuuaucccucccucaagucccaugccaggcccauag

SEQ ID NO: 298720 - RNA, 2736 nt, Artificial Sequence
  derived and/or modified sequence
auggcucaacucuuccugccgcugcuggcagcccugguacuggcacaagccccugcagcgcuugcggacguauuagagggagauucuucugaggacagagccuuucgcguacgaauugccggcgaugccccccuucaagguguguuggguggcgcucucaccauuccaugccacguucacuaccuccggccaccuccaagcagacgggcaguacuuggcagcccuagggugaaguggaccuuucugucccgaggcagagaagcugagguacugguggcgcgcggcguacggguaaagguaaacgaggcuuaccgauuucgaguggcccucccugcauauccagccucauuaacagacgugagccuggcauuauccgagcuacgccccaaugacagugguauauaucguugcgaagugcagcauggaauugacgacucaucugaugcuguagaggugaaagucaaggguguuguauuuuuauaucgugagggcucugcccgguacgcuuucuccuuuaguggugcccaggaagcaugcgcuaggaucggggcucauauagccacaccagaacagcucuacgccgccuaccucggaggauacgaacagugcgaugccggaugguuaagcgaucagaccgugagguacccgauucagacuccccgagaggcgugcuauggggauauggauggauucccugguguucguaacuacggcguaguggacccggacgaucuguacgacguuuauugcuaugcagaggaccugaacggagaauuguuccugggagacccuccugagaaguugacguuggaagaggcuagggcuuacugucaagagagaggcgcagagauugcuacgacugggcagcuauacgccgcaugggauggcggccuugaucacuguucaccuggcuggcuggccgauggcaguguacguuaucccauuguuacaccuagccagcgaugcggcggcgggcuuccuggugucaaaacccuuuuccuguuucccaaucaaaccggauucccaaacaagcauagucgguuuaauguguacugcuuucgcgacuccgcccaacccagcgcuauaccagaggcaucuaacccagcuucgaacccagcauccgauggccuggaagccauugucacugugacagagacauuagaagaacuucagcucccacaggaggcuacagaaucugagucucggggagccaucuacucaaucccaaucauggaagacggaggcggaggaucuagcacuccugaggacccugccgaagcaccccgaacccuccuggaauuugagacccaaucuaugguccccccuacagguuuuucagaggaagaaggcaaggcacuugaggaggaggagaaguaugaggacgaagaggagaaggaagaggaagaggaagaggaagagguggaggacgaagcgcucugggcguggccaucugaacucagcuccccuggacccgaagcgucauuaccuaccgagccagcggcacaagaagagaguuugucgcaggcacccgcccgcgccguacugcagcccggggcaaguccucugccugacggagagucugaggccucucgccccccucgcguccacggaccaccaaccgaaacacugccuaccccacgggagagaaaccuagccagccccaguccuaguacacugguggaagccagagagguuggagaggccacuggcggaccagaacugagcggagucccuaggggcgagucagaagaaaccggcaguuccgagggcgcacccaguuugcucccagccacucgagccccagaggggacaagagaacuggaagcacccuccgaggacaacuccggacgaacugcaccagccgggacaucugugcaagcgcagccugugcugcccaccgacucagcuucaagggggggaguggcugucguaccugccuccggagacugugugcccagucccugccauaaugggggaaccugucucgaagaagaagaaggaguucgcugccugugccugccuggcuacggcggagaccugugcgacgugggacugagauucugcaacccagggugggacgcuuuucagggagcaugcuacaaacacuuuaguacuagaagaaguugggaagaggccgaaacacagugcagaauguauggagcccauuuagcuuccaucuccaccccagaggagcaggauuucauuaacaaucgauauagagaauaucaguggauaggauugaacgaucgcacaaucgagggggauuucuuguggucugacgguguacccuugcuauacgagaacuggaauccuggucagcccgacagcuauuuccuaagcggggaaaacuguguagucaugguguggcaugaucaagggcaguggucagacgugccgugcaacuaucauuuaaguuacacuugcaaaaugggacucguuuccugugggccacccccagaacuuccgcuugcucaggucuucgguaggccccgcuugcgcuacgaagucgauacagugcugcgguaucgguguagagagggacuagcucagagaaaccugcccuugauucgaugccaggagaauggaaggugggaggccccgcaaaucagcugcguaccccgucggccagcgagagcgcuccauccugaggaagauccagaagggagacaggguagacucuugggccgcuggaaggcacucuugauccccccaucaucuccaaugccaggccccuag

SEQ ID NO: 298721 - protein, 1122 aa, Artificial Sequence
  derived and/or modified sequence
MSLQEMFRFPMGLLLGSVLLVASAPATLEPPGCSNKEQQVTVSHTYKIDVPKSALVQVDADPQPLSDDGASLLALGEAREEQNIIFRHNIRLQTPQKDCELAGSVQDLLARVKKLEEEMVEMKEQCSAQRCCQGVTDLSRHCSGHGTFSLETCSCHCEEGREGPACERLACPGACSGHGRCVDGRCLCHEPYVGADCGYPACPENCSGHGECVRGVCQCHEDFMSEDCSEKRCPGDCSGHGFCDTGECYCEEGFTGLDCAQVVTPQGLQLLKNTEDSLLVSWEPSSQVDHYLLSYYPLGKELSGKQIQVPKEQHSYEILGLLPGTKYIVTLRNVKNEVSSSPQHLLATTDLAVLGTAWVTDETENSLDVEWENPSTEVDYYKLRYGPMTGQEVAEVTVPKSSDPKSRYDITGLHPGTEYKITVVPMRGELEGKPILLNGRTEIDSPTNVVTDRVTEDTATVSWDPVQAVIDKYVVRYTSADGDTKEMAVHKDESSTVLTGLKPGEAYKVYVWAERGNQGSKKADTNALTEIDSPANLVTDRVTENTATISWDPVQATIDRYVVRYTSAKDGETREVPVGKEQSSTVLTGLRPGVEYTVHVWAQKGAQESKKADTKAQTDIDSPQNLVTDWVTENTATVSWDPVQATIDRYVVHYTSANGETREVPVGKEQSSTVLTGLRPGMEYTVHVWAQKGNQESKKADTKAQTEIDGPKNLVTDWVTENMATVSWDPVQATIDKYMVRYTSADGETREVPVGKEHSSTVLTGLRPGMEYMVHVWAQKGAQESKKADTKAQTELDPPRNLRPSAVTQSGGILTWTPPSAQIHGYILTYQFPDGTVKEMQLGREDQRFALQGLEQGATYPVSLVAFKGGRRSRNVSTTLSTVGARFPHPSDCSQVQQNSNAASGLYTIYLHGDASRPLQVYCDMETDGGGWIVFQRRNTGQLDFFKRWRSYVEGFGDPMKEFWLGLDKLHNLTTGTPARYEVRVDLQTANESAYAIYDFFQVASSKERYKLTVGKYRGTAGDALTYHNGWKFTTFDRDNDIALSNCALTHHGGWWYKNCHLANPNGRYGETKHSEGVNWEPWKGHEFSIPYVELKIRPHGYSREPVLGRKKRTLRGRLRTF

SEQ ID NO: 298722 - DNA, 3369 bp, Artificial Sequence
  derived and/or modified sequence
atgagcctgcaggagatgttccggttccccatgggcctgctgctgggtagtgtgctcttagtggctagtgcgccagccacactcgagcctccgggatgtagtaataaggagcagcaagtgacagtgagccacacgtacaaaatagatgtccctaagtcagctctggttcaagtggacgccgatcctcaacctctcagcgacgatggtgcatctctgctggccctgggcgaggcgagagaggagcagaacatcatttttagacacaacattcggctgcagacacctcagaaggactgcgagcttgctggctcagtccaggacctgctagcgagagtgaagaagctggaagaggaaatggttgaaatgaaagaacagtgtagtgctcagcggtgctgccagggtgtaacggacttatccaggcactgttctggacacggcacatttagtctggaaacctgttcctgccattgcgaggaggggcgagaaggcccagcctgcgaacggctcgcctgcccaggagcttgctcgggtcacggcaggtgtgtcgacgggcgctgcctctgccacgagccatacgtgggagcggattgcgggtaccccgcatgcccggaaaactgctcaggccacggagagtgtgtgcgtggcgtgtgtcagtgtcacgaggactttatgtccgaagactgttcagaaaagaggtgtcctggggactgttctggtcacggtttttgcgacaccggcgagtgttactgcgaggaggggtttactggtctggattgtgctcaggtggtcacaccccagggcttgcaactgctcaagaataccgaggatagtttgctcgtctcgtgggagccctcgtcccaggtggaccactacctcctgtcatactatccgcttggcaaagagctctctggcaagcaaatccaagtgcctaaagagcaacacagctatgagattctgggtttactgcctgggacaaaatatattgtgacactccggaatgtaaagaacgaggtgtctagttcaccgcagcaccttctagctaccaccgacttggccgtgctgggcacagcgtgggtcactgacgaaacggagaactctctggacgtggagtgggagaatccgtcaaccgaggtggactactataagctcaggtatgggccaatgaccggccaggaggttgcggaagtgacggtcccaaaaagttcggaccccaagtctagatacgatattacgggtttgcaccctggaaccgagtacaaaatcacggttgtgcccatgaggggagaactggaaggtaaacctatcctgctgaacgggcggacagaaattgactccccaacaaatgttgtgacagaccgggtgaccgaagataccgcaaccgtgtcctgggatcctgtccaggctgtgatagacaaatacgtcgttagatacacttccgcggatggagacactaaggaaatggcagttcacaaggacgaaagctctaccgtgctgacaggcctcaagcccggtgaggcctataaagtctacgtttgggctgagagggggaatcagggtagcaagaaggcagacacaaacgcactgaccgagatcgactcaccagcaaatctggtgaccgatcgagtcacggagaacacggccacgataagctgggacccagtgcaggctaccattgaccggtacgtggtccggtatacctcagccaaagacggtgagacccgcgaggtgcccgttggaaaagagcagtcaagcacagtgttgacagggttgaggcccggtgtagaatatactgtgcacgtgtgggctcaaaagggggcacaggagtctaagaaggccgacacgaaagcccagacagacatagactctccccagaacctggtgacagattgggtaacagaaaatacagctaccgtgtcatgggatcctgtccaggctaccatcgaccgctatgtggtacattatactagcgcgaacggagaaactcgagaggtgcccgtcggcaaggaacaatcaagcacagtgctgactggcctgagacccgggatggagtacacagtacatgtctgggcgcagaaaggaaatcaggagagcaagaaagccgatactaaagctcaaacagagattgatgggccaaagaacctcgtgaccgactgggtcaccgagaatatggccaccgtctcgtgggatcctgtccaagcaactatcgataagtatatggtgagatacacatcagccgatggagagactcgagaggtgcctgtcggcaaggagcatagctcaacagtgctgaccgggctgaggcctggaatggaatatatggtgcacgtttgggctcagaaaggagcgcaggaatcaaaaaaggctgataccaaagctcagactgaactggatccaccccgcaatcttcggccgtctgccgtcacacagtccggaggaatactcacctggacacccccatccgcacagattcacggctacatattgacttaccagtttcctgatgggacggtgaaagaaatgcagctaggacgggaagatcagagatttgctctgcagggcctggaacagggtgccacctatcccgtgtcactggtcgccttcaaaggggggcgccgcagtaggaacgtgagtactacactatccacagttggggctcgatttccacacccatctgactgctcacaggtgcaacagaacagcaatgccgcttcaggcctgtatactatttatctccacggagacgcttctagaccactccaggtatattgcgatatggagacggacggcggtggttggatcgtgttccagcgtagaaataccggacagcttgattttttcaaaaggtggcgatcctacgtcgagggatttggtgatcctatgaaagaattctggttgggactggacaagctgcacaacttgactaccggaactccagcgagatacgaagtgcgggtggatcttcagaccgcgaatgagtcagcctatgcgatctatgacttttttcaggttgcatcgagtaaagaaagatacaagctgactgtgggcaaatacagggggacggcaggggatgcactcacctaccacaacggatggaagtttaccacttttgacagggacaacgatatcgctctaagcaactgcgcccttacacaccacggtggctggtggtataagaattgccatctggccaatccaaacggaagatatggtgagacaaaacacagcgagggagtgaactgggagccatggaagggccacgaattctcaatcccctacgtggagctgaagattaggccccacggatacagcagagagcccgtcttaggacgcaaaaaaaggaccctcaggggccggctcagaacgttctag

SEQ ID NO: 298723 - DNA, 3369 bp, Artificial Sequence
  derived and/or modified sequence
atgagtctacaggaaatgttcagattccctatgggtctgctgctcgggtccgtgctgctagtggccagtgcgccagccaccctggaacccccaggatgctccaataaagaacagcaggtgacagtgtcccacacctataagatagatgtgcctaagtctgcattagtgcaagtagatgccgacccccagccactcagtgacgacggtgctagtctgctcgctttgggagaagcgagggaagagcaaaatatcattttccgccacaacattagactccagactcctcaaaaggactgtgaactcgccggtagtgtccaggatctgctcgccagggtgaagaaactagaagaagaaatggtagagatgaaagagcagtgcagcgcccaaagatgttgtcaaggcgttactgacctcagcaggcactgttcaggtcacggaacattcagcctagagacatgtagttgccactgtgaagagggcagggaaggtcctgcctgtgagagattagcctgtcccggagcctgttctggacatgggagatgtgtcgacgggagatgtttgtgtcatgagccttatgtgggtgcggactgcgggtaccctgcctgtccagagaactgctctggacacggggaatgcgtgcgcggagtctgtcaatgtcatgaggatttcatgagcgaagactgtagcgagaaacgctgtcccggagattgttccggacacggattctgcgatactggtgaatgctattgcgaggaggggttcactggactcgactgcgcccaggttgtaactcctcaggggctgcagcttctgaagaataccgaagatagcttgctagtatcttgggaaccttcatcacaggttgaccattatctgctgtcctattaccccctgggtaaggaactgtcagggaagcaaattcaggtccccaaagagcagcatagctacgagatcctcgggttgctgcccggtaccaagtacattgttacccttaggaacgtaaagaatgaagtgtcatcctcacctcagcatctgctcgctacaactgatctggctgtcttagggaccgcctgggtaaccgacgagactgaaaacagcctcgacgtagaatgggagaacccctccactgaagtggactactacaaattgaggtacggacctatgaccgggcaggaagtggcggaggtgactgtcccaaagagcagcgatccaaagtctagatacgacatcaccggcctgcacccagggactgagtacaagataactgtagtgccgatgcggggtgaactcgagggcaagcccattctgcttaacgggagaacagaaattgacagccctacaaacgtggtgaccgatcgcgtgactgaagacacagcaacagttagctgggacccagtgcaggcagttattgacaaatacgtcgtgcgctatacatccgctgatggcgacactaaggagatggccgtgcataaagatgaatcttctactgtgcttactggccttaaacccggtgaggcctataaagtgtacgtgtgggcagaacggggaaatcaggggagcaaaaaagctgacacgaacgcactcaccgagattgacagccctgctaatctggtcacagatagagtcaccgagaacacagctacgattagttgggatcctgtacaggccacaattgataggtatgtggtcagatatacctcagcaaaggatggagaaacacgagaggtaccagtgggcaaggagcaatcttctaccgtgttaactggtctcagaccgggtgtcgaatacaccgtccatgtatgggcgcagaagggcgcacaagaatccaagaaagccgatacaaaagctcagaccgacatcgattctccacagaacttggtcaccgattgggtgacagaaaatactgcaacagtgagttgggaccctgtgcaggcgacaatcgaccgctacgtggtgcactacacatctgccaatggggagaccagggaggtgcctgtcggtaaggagcagagcagcactgtgcttaccgggctgcgccctggcatggaatataccgttcatgtgtgggcccagaaaggcaatcaggagagtaaaaaagcagacacaaaggcacagacggagatagacggccctaaaaatttggtaaccgattgggttactgagaatatggctacagtgagctgggatcctgtacaggcaactatcgacaagtacatggtgaggtatacaagcgctgacggggaaactcgcgaagtacccgtaggcaaggaacattctagcactgttctgaccggactgagaccgggtatggagtatatggttcacgtctgggcccagaagggggctcaggaatctaagaaggcagataccaaggcccagaccgaactggatccaccgagaaacttacgcccatcagccgtgacccagtctgggggaattctgacttggactcctccaagcgctcaaattcacggctacatcctcacctatcagttccctgacggaaccgtcaaagaaatgcaactggggcgagaggaccaacgcttcgctctgcaaggtctcgaacagggggctacctaccccgtgagccttgtggctttcaaggggggtcgccgatcccggaatgtcagcactactctttccacagtcggggctcggtttcctcatccttctgattgcagccaagttcagcagaattccaacgccgcaagcggactctacacgatctacctgcatggcgacgcgtctcgaccactgcaagtctattgcgacatggagacagatggagggggatggattgtcttccaaagacgcaataccggacaactggacttttttaaacgttggaggtcttatgttgaagggttcggtgacccgatgaaagaattctggttgggcctggataagctgcataatttaactactggtacccctgcaagatatgaggttcgcgtggacttgcagaccgccaatgagtccgcctacgctatctatgactttttccaggttgccagcagtaaggagcgatacaagctgactgtaggcaaatatcgcggaactgccggagatgccctgacttatcacaatggctggaaattcaccacatttgatcgggataacgacatcgctctttccaattgtgcactaacacaccacggaggctggtggtataagaactgccacctcgctaatcccaacgggcgatacggcgaaacaaagcattccgagggggtaaattgggagccctggaagggccatgagttttcaattccatatgtggagctgaagatccggcctcacggctactcccgggaacctgtccttggtagaaagaaacgaacactccggggacggctgagaaccttttag

SEQ ID NO: 298724 - DNA, 3369 bp, Artificial Sequence
  derived and/or modified sequence
atgtccctacaggagatgttccgcttcccaatgggcttgttacttggctctgtattactggttgcctcagcacctgcaaccttggagccgcccggttgcagtaacaaggaacagcaggtgactgtttcccacacctacaagatagatgtgccaaagtccgccctggtgcaggtggacgcagaccctcagcccctgtcagacgacggcgcgtcattgctggctctgggcgaagcacgggaggaacagaacattatttttcgccacaacataaggctgcagactccacagaaggattgtgaattagccggcagcgtccaggatcttcttgctagggtgaagaaattggaagaagagatggtggagatgaaagagcagtgctcagcccaaagatgctgtcagggcgtgacggacctgtcccggcattgctccggtcacggtacattctccctcgagacctgtagttgccactgtgaggaagggcgagagggtccggcatgcgaacggctggcctgtcccggagcctgcagcggtcacgggagatgcgtagatggtcgctgtctctgtcacgaaccatacgtaggcgctgactgtggatatcccgcctgccccgagaattgtagcggacacggcgagtgtgtccggggggtatgtcaatgtcatgaagacttcatgtccgaagactgttcagaaaagcggtgccccggcgactgttccgggcacgggttttgcgataccggtgaatgctattgtgaagaaggctttacaggactggactgcgcgcaggttgtgacaccacagggcctccagctgttgaaaaacacggaagacagcctgcttgtgtcctgggagccctcgtcgcaggtcgaccattatctgttaagctactatcccctaggcaaagaactgtccggtaaacagatccaggtcccaaaagaacagcactcctacgagattttaggcctcctgcctggcacaaaatacattgtcactctgagaaacgtcaagaatgaggtgtccagctctcctcaacacttgctcgcgacgaccgatctcgctgttctcggaactgcatgggtgactgatgagacagaaaattctctggacgtcgaatgggaaaacccctcgactgaagtcgactattacaagctgagatacggccctatgaccggccaggaggtggccgaggtgaccgtacccaaatccagcgatccaaagtcccggtatgatatcaccggactgcacccagggactgagtataaaatcacagtcgtccctatgcgcggcgaactggaaggtaaaccaatcctcttaaacggccgcacagagatcgattcccctacaaatgtagtgaccgaccgcgtgacggaggatacagcaactgtttcctgggacccagtgcaagccgtgatagacaagtatgttgtgcgctacaccagcgcagacggagacacaaaggagatggcagtccacaaggacgaatcttccacagtgctgacaggcttgaagcctggcgaagcttacaaagtgtatgtttgggctgagagaggcaaccaaggaagtaagaaggccgatacaaacgccctgaccgagatcgacagccccgctaacctggttacagatagagtcacagagaatactgccacaatttcctgggatcccgtccaggccaccatcgatcggtacgttgtacggtacacttcggcgaaagatggcgaaaccagggaggtgccagtcgggaaagagcagagttcgacagtactgactggcctgcggccaggcgtggaatatacagttcatgtctgggcacagaagggtgcccaagagtccaagaaggctgacactaaggcccaaacagacatagatagccctcagaatctggttacagactgggtcactgagaacacagcgaccgtgtcatgggacccagtccaggccactattgatcgatacgtcgtgcattacacatccgcaaacggtgaaactagggaagtgccggtgggtaaggaacagagcagtactgttctaacagggctacggccaggcatggaatatacggtgcatgtgtgggcccagaaaggcaatcaagagagcaaaaaagctgataccaaggctcagacggagatcgacgggcctaagaatctcgtaaccgattgggtcactgaaaatatggccaccgtgtcctgggaccccgttcaggcaactatcgacaaatatatggtacgctacactagcgcagatggggaaaccagggaggtccctgtgggaaaagaacattcctcaactgtcttgaccggtttgcggccagggatggagtatatggtgcacgtctgggctcaaaaaggggcccaagagagcaagaaggctgacactaaggcccagactgagctggatcctcctaggaatctccgaccttccgcagtgacccagagcgggggcattttaacttggacgcccccgtccgctcaaatccacggctatatactaacgtatcaatttccagatggaactgtcaaagagatgcagctcggtagggaggaccagcgcttcgctctgcaaggactggaacagggtgcaacatacccagtgtcacttgtcgcatttaagggtggaagaaggagtagaaatgtctcaaccacactgtcaacagtgggtgcgcgctttccgcacccttccgattgtagtcaggtgcagcagaactctaacgccgcctcagggttatataccatatatcttcacggtgatgcatccaggccgttacaagtctactgcgatatggaaactgacggaggtggttggattgtctttcagagacgaaatactggccagctcgacttcttcaagcgttggaggagttatgtggaggggttcggcgatcccatgaaagaattttggcttggacttgacaaactccataatctgaccactggaaccccggccagatacgaggtgagagtcgacctgcagacagccaatgaaagtgcttacgccatatatgatttttttcaggtcgccagctctaaagagagatacaagttgaccgtaggaaaatatagaggcactgccggcgacgccttaacataccataatgggtggaagtttacaactttcgaccgcgataacgacatagccctttcaaattgcgcactgactcatcatggagggtggtggtacaaaaactgccacctcgcgaacccaaacgggcgctacggagaaacaaagcattctgagggagtgaattgggaaccctggaagggccacgagttctcaatcccttatgtagagctgaagataaggccacacgggtactctcgagagcccgtccttggaaggaagaaacgaacactacgcggaagactgaggacattctag

SEQ ID NO: 298725 - DNA, 3369 bp, Artificial Sequence
  derived and/or modified sequence
atgagtctacaagagatgttccgctttcccatgggactgctccttggctcagttctgctggtcgcctcagcccccgccaccctggaaccacccggatgttctaataaggaacagcaagttactgtgagtcatacctacaagatagacgtgcctaaatcagccctggtgcaggtagacgcggatccccagcccctaagcgacgacggcgcctccttgttggccttgggcgaagctcgcgaagaacagaacataatctttaggcacaacatcagactgcagactccccagaaagattgcgagctggcaggcagcgtgcaagacctgctcgctagggtgaagaaactggaggaggaaatggtggagatgaaagagcaatgttccgcccagagatgttgtcagggtgtcacggatttgtctcgccactgctcaggacatggtacttttagcttggaaacttgtagctgtcactgcgaagaaggaagagagggcccagcttgcgagcggctggcctgccctggggcgtgttcagggcatgggaggtgtgtggacggccgttgtctctgtcatgaaccctatgtgggggctgattgtggatatcccgcctgtccagaaaattgttcgggtcatggagagtgcgtaaggggcgtgtgtcagtgtcacgaagactttatgtctgaggactgtagcgaaaagagatgccccggcgattgtagtggacacggattctgtgacaccggggaatgctattgtgaggagggtttcaccggactagactgcgcacaagtagtgactccccaggggctacaactgttgaaaaataccgaagactcactgctcgttagctgggagccaagctcacaggttgaccactatctcttatcttattaccccctgggaaaggagttgtccgggaagcaaatccaagtgccaaaagaacagcattcctacgagatactgggactcctcccaggcaccaaatacattgtcacgttgcgaaatgtcaagaacgaagtgagctctagcccccagcacttgcttgccacaacagatttggccgtgttgggtacagcctgggtcacggacgaaaccgagaattccctggatgtggagtgggaaaacccaagtaccgaggtcgactactacaaactgcgctatggcccaatgaccggtcaggaggttgctgaggtcactgttccgaagtcttccgatcctaagtccaggtatgatataacaggtctgcaccccggaactgaatataagatcaccgttgtgccaatgaggggagagcttgagggcaagcccatactcctgaatgggaggacagaaatagatagcccgaccaatgttgtgactgaccgcgtcaccgaggatacagctacagtctcttgggacccagtgcaggcagtgatcgacaagtatgtggtaagatacacttcagctgacggagatacaaaggaaatggccgtgcacaaggatgagtcaagtaccgtgctaacgggacttaaaccaggcgaagcttataaggtttacgtgtgggcagagaggggaaaccaaggctcaaagaaagctgacaccaacgcacttactgaaatagactcccccgccaatctggtgaccgatcgggtaactgaaaacactgccacaatctcttgggatcctgtacaagctaccatcgacagatacgtggtgagatatacttccgctaaagacggagagacccgtgaggtgcccgtggggaaagaacagtccagcactgtcttgaccggcctgagacccggagtagaatatacagtccatgtatgggcacaaaaaggcgctcaggaaagtaagaaggccgatacgaaagcacagactgatattgactcacctcaaaatctcgtgactgattgggtcacagagaacactgcaacggtcagttgggatcctgtgcaggctaccatcgatcgatatgtagtccattatacatctgccaatggagagacacgcgaagtacccgtcgggaaggaacaaagcagcacagtacttacagggcttagaccggggatggagtacacagtccatgtctgggcacaaaaaggaaatcaggaaagtaaaaaagctgacaccaaagctcagaccgagatcgatggtccaaaaaatcttgtcacagattgggtcactgagaacatggcaactgtatcctgggaccccgttcaggccacaatagacaaatacatggtgagatatacctcagctgacggtgagacaagagaagtgcccgtgggcaaagagcactcttctacagttcttaccggccttagaccagggatggaatacatggtgcacgtttgggcgcaaaaaggagcacaggagagtaagaaagcagacacgaaagcccaaacggagctcgaccccccgaggaatctccggccttctgcagtgactcagagtggaggaatactgacatggacgcctccatccgcccaaatccatggctacatccttacataccaatttccagacggaacagtgaaagaaatgcaacttggcagagaagaccagcggttcgccctgcaaggcttggagcagggggcaacctatcctgttagcctggtggcgtttaagggcgggcgtcgttcacgtaacgtgtcaacaaccctttccacagttggcgctcgcttcccccatccatcggactgctcgcaagttcaacagaattctaacgccgcctcagggttatataccatatatcttcacggtgatgcatccaggccgttacaagtctactgcgatatggaaactgacggaggtggttggattgtctttcagagacgaaatactggccagctcgacttcttcaagcgttggaggagttatgtggaggggttcggcgatcccatgaaagaattttggcttggacttgacaaactccataatctgaccactggaaccccggccagatacgaggtgagagtcgacctgcagacagccaatgaaagtgcttacgccatatatgattttttccaagtcgcctcaagtaaagagagatataaattgacagtcggaaagtatcgagggaccgctggcgatgccttgacttaccataatgggtggaagtttactacatttgaccgcgataacgacatagccctgtcgaattgcgcattaacacatcacggaggatggtggtataaaaattgtcacctggcaaaccccaacggaagatatggggaaaccaaacactctgaaggcgtgaactgggaaccttggaaggggcacgaattttccataccgtacgtggagctcaagattagacctcacggctacagccgggagcctgtgttgggtcggaaaaagagaacattgaggggtagattgcgtacattttag

SEQ ID NO: 298726 - DNA, 3719 bp, Artificial Sequence
  derived and/or modified sequence
ctggagggtctgctccctgtctttccaaggatgagtctccaggagatgttccgcttccctatggggctcctgcttggctctgtgctcctggtggcttcggccccagccactctggagcctcccggctgcagcaacaaggagcaacaggtcactgtcagccacacctacaagatcgatgtgcccaagtctgccttggttcaggttgacgctgaccctcagcccctcagtgacgatggggcttcgctcttggccctgggggaggccagggaggaacagaacatcatcttcaggcacaacatccgccttcagacgccacagaaggactgcgagttggcaggcagtgtccaggacctcctggcccgggtgaagaagctggaggaagagatggtggagatgaaggaacagtgtagtgcccagcgctgctgccagggagtcactgatctaagccgccactgcagcggccacgggaccttctccctggagacctgcagctgccactgcgaagagggcagggagggccccgcctgcgagcggctggcctgccccggggcgtgcagcggccacgggcgttgcgtggacgggcgctgcctgtgccatgagccctacgtgggtgccgactgcggctacccggcctgccctgagaactgcagcggacacggcgagtgcgtgcgcggcgtgtgccagtgccacgaagacttcatgtcggaggactgcagcgagaagcgctgtcccggcgactgcagcggccacggcttctgtgacacgggcgagtgctactgcgaggagggcttcacaggcctggactgtgcccaggtggtcaccccacagggcctgcagctgctcaagaacacggaggattctctgctggtgagctgggagccctccagccaggtggatcactacctcctcagctactaccccctggggaaggagctctctgggaagcagatccaagtgcccaaggagcagcacagctatgagattcttggtttgctgcctggaaccaagtacatagtcaccctgcgtaacgtcaagaatgaagtttctagcagcccacagcatctacttgccaccacagaccttgctgtgcttggcactgcctgggtgacagatgagactgagaactcccttgacgtggagtgggaaaacccctcaactgaggtggactactacaagctgcgatatggccccatgacaggacaggaggtagctgaggtcactgtgcccaagagcagtgaccccaagagccgatatgacatcactggtctgcacccggggactgagtataagatcacggtggtgcccatgagaggagagctggagggcaagccgatcctcctgaatggcaggacagaaattgacagtccaaccaatgttgtcactgatcgagtgactgaagacacagcaactgtctcctgggacccagtgcaggctgtcatagacaagtatgtagtgcgctacacttctgctgatggggacaccaaggaaatggcagtgcacaaggatgagagcagcactgtcctgacgggcctgaagccaggagaggcatacaaggtctacgtgtgggctgaaaggggcaaccaggggagcaagaaagctgacaccaatgccctcacagaaattgacagcccagcaaacctggtgactgaccgggtgactgagaataccgccaccatctcctgggacccggtacaggccaccattgacaggtatgtggtgcgctacacctctgccaaggacggagagaccagggaggttccggtggggaaggagcagagtagcactgtcctgacgggcctgaggccgggtgtggagtacacggtgcacgtgtgggcccagaagggggcccaggagagcaagaaggctgacaccaaggcccagacagacattgacagcccccaaaacctggtcactgactgggtgacagagaatacagccactgtctcctgggacccggtgcaggccaccattgacaggtatgtggtgcactacacgtctgccaacggagagaccagggaggttccagtggggaaggagcagagcagcactgtcctgacgggcctgaggccgggcatggagtacacggtgcacgtgtgggcccagaaggggaaccaggagagcaagaaggctgacaccaaggcccagacagaaattgacggccccaaaaacctagtgactgactgggtgacggagaatatggccactgtctcctgggacccggttcaggccaccattgacaagtacatggtgcgctacacctctgctgacggagagaccagggaggttccggtggggaaggagcacagcagcactgtcctgacgggcctgagaccaggcatggagtacatggtgcacgtgtgggcccagaagggggcccaggagagcaagaaggctgacaccaaggcccagacagaactcgaccctcccagaaaccttcgtccatctgctgtaacgcagtctggtggcatattgacctggacgcccccctctgctcagatccacggctacattctgacttaccagttcccagatggcacagttaaggagatgcagctgggacgggaagaccagaggtttgcgttgcaaggccttgagcaaggcgccacctaccctgtctcccttgttgcctttaagggtggtcgccggagcagaaatgtatccaccaccctctccacagttggtgcccgtttcccacacccttcggactgcagtcaggttcagcagaacagcaatgccgccagtggtctgtacaccatctacctgcatggcgatgccagccggcccctgcaggtgtactgtgacatggaaacggacggaggtggctggattgtcttccagaggcggaacactgggcagctggatttcttcaagcgatggaggagctatgtggaaggctttggggaccccatgaaggagttctggcttggacttgacaagctacacaacctcaccaccggcactccagcgcggtatgaggtgagagtggatttacagactgccaatgaatctgcctatgctatatatgatttcttccaagtggcctccagcaaggagcggtataagctgacagttgggaaatacagaggcacggcaggggatgctcttacttaccacaatggatggaagtttacaacttttgacagagacaatgatatcgcactcagcaactgtgccctgacacatcatggtggctggtggtataagaactgccacttggccaaccctaatggcagatatggggagaccaagcacagtgagggggtgaactgggagccttggaaaggacatgaattctccattccttacgtggagttgaaaatccgccctcatggctacagcagggagcctgtcctgggcagaaagaagcggacgctgagaggaaggctgcgaacgttctgatggcccgtgtgagcagtcctcgcaggagacaccaccagctgtggcagcttggggcggggtgggtagtggtcactgcggtctgggagtgctcagatagcccgcagaacaaatcatgtcaccaagcttcaagccatggaggttccttccctctcacctgcatttttgcccgtctttatgagggtcttgaaaatcaaaatagtagttgcacagtatgtgtaggaaagacagtactggaacggcaaggtttctcagcttatcttcagcaacatatatactggattagggcaagagaaggaatcacccagcacttcaccagttgg

SEQ ID NO: 298727 - DNA, 3369 bp, Artificial Sequence
  derived and/or modified sequence
atgagcctgcaggagatgttcagattccccatgggcctgctgctgggcagcgtgctgctggtggccagcgcccccgccaccctggagccccccggctgcagcaacaaggagcagcaggtgaccgtgagccacacctacaagatcgacgtgcccaagagcgccctggtgcaggtggacgccgacccccagcccctgagcgacgacggcgccagcctgctggccctgggcgaggccagagaggagcagaacatcatcttcagacacaacatcagactgcagaccccccagaaggactgcgagctggccggcagcgtgcaggacctgctggccagagtgaagaagctggaggaggagatggtggagatgaaggagcagtgcagcgcccagagatgctgccagggcgtgaccgacctgagcagacactgcagcggccacggcaccttcagcctggagacctgcagctgccactgcgaggagggcagagagggccccgcctgcgagagactggcctgccccggcgcctgcagcggccacggcagatgcgtggacggcagatgcctgtgccacgagccctacgtgggcgccgactgcggctaccccgcctgccccgagaactgcagcggccacggcgagtgcgtgagaggcgtgtgccagtgccacgaggacttcatgagcgaggactgcagcgagaagagatgccccggcgactgcagcggccacggcttctgcgacaccggcgagtgctactgcgaggagggcttcaccggcctggactgcgcccaggtggtgaccccccagggcctgcagctgctgaagaacaccgaggacagcctgctggtgagctgggagcccagcagccaggtggaccactacctgctgagctactaccccctgggcaaggagctgagcggcaagcagatccaggtgcccaaggagcagcacagctacgagatcctgggcctgctgcccggcaccaagtacatcgtgaccctgagaaacgtgaagaacgaggtgagcagcagcccccagcacctgctggccaccaccgacctggccgtgctgggcaccgcctgggtgaccgacgagaccgagaacagcctggacgtggagtgggagaaccccagcaccgaggtggactactacaagctgagatacggccccatgaccggccaggaggtggccgaggtgaccgtgcccaagagcagcgaccccaagagcagatacgacatcaccggcctgcaccccggcaccgagtacaagatcaccgtggtgcccatgagaggcgagctggagggcaagcccatcctgctgaacggcagaaccgagatcgacagccccaccaacgtggtgaccgacagagtgaccgaggacaccgccaccgtgagctgggaccccgtgcaggccgtgatcgacaagtacgtggtgagatacaccagcgccgacggcgacaccaaggagatggccgtgcacaaggacgagagcagcaccgtgctgaccggcctgaagcccggcgaggcctacaaggtgtacgtgtgggccgagagaggcaaccagggcagcaagaaggccgacaccaacgccctgaccgagatcgacagccccgccaacctggtgaccgacagagtgaccgagaacaccgccaccatcagctgggaccccgtgcaggccaccatcgacagatacgtggtgagatacaccagcgccaaggacggcgagaccagagaggtgcccgtgggcaaggagcagagcagcaccgtgctgaccggcctgagacccggcgtggagtacaccgtgcacgtgtgggcccagaagggcgcccaggagagcaagaaggccgacaccaaggcccagaccgacatcgacagcccccagaacctggtgaccgactgggtgaccgagaacaccgccaccgtgagctgggaccccgtgcaggccaccatcgacagatacgtggtgcactacaccagcgccaacggcgagaccagagaggtgcccgtgggcaaggagcagagcagcaccgtgctgaccggcctgagacccggcatggagtacaccgtgcacgtgtgggcccagaagggcaaccaggagagcaagaaggccgacaccaaggcccagaccgagatcgacggccccaagaacctggtgaccgactgggtgaccgagaacatggccaccgtgagctgggaccccgtgcaggccaccatcgacaagtacatggtgagatacaccagcgccgacggcgagaccagagaggtgcccgtgggcaaggagcacagcagcaccgtgctgaccggcctgagacccggcatggagtacatggtgcacgtgtgggcccagaagggcgcccaggagagcaagaaggccgacaccaaggcccagaccgagctggacccccccagaaacctgagacccagcgccgtgacccagagcggcggcatcctgacctggaccccccccagcgcccagatccacggctacatcctgacctaccagttccccgacggcaccgtgaaggagatgcagctgggcagagaggaccagagattcgccctgcagggcctggagcagggcgccacctaccccgtgagcctggtggccttcaagggcggcagaagaagcagaaacgtgagcaccaccctgagcaccgtgggcgccagattcccccaccccagcgactgcagccaggtgcagcagaacagcaacgccgccagcggcctgtacaccatctacctgcacggcgacgccagcagacccctgcaggtgtactgcgacatggagaccgacggcggcggctggatcgtgttccagagaagaaacaccggccagctggacttcttcaagagatggagaagctacgtggagggcttcggcgaccccatgaaggagttctggctgggcctggacaagctgcacaacctgaccaccggcacccccgccagatacgaggtgagagtggacctgcagaccgccaacgagagcgcctacgccatctacgacttcttccaggtggccagcagcaaggagagatacaagctgaccgtgggcaagtacagaggcaccgccggcgacgccctgacctaccacaacggctggaagttcaccaccttcgacagagacaacgacatcgccctgagcaactgcgccctgacccaccacggcggctggtggtacaagaactgccacctggccaaccccaacggcagatacggcgagaccaagcacagcgagggcgtgaactgggagccctggaagggccacgagttcagcatcccctacgtggagctgaagatcagaccccacggctacagcagagagcccgtgctgggcagaaagaagagaaccctgagaggcagactgagaaccttctag

SEQ ID NO: 298728 - DNA, 3369 bp, Artificial Sequence
  derived and/or modified sequence
atgtccctccaagagatgtttagattcccaatgggccttctgcttggttctgtactgctggttgccagtgcccccgctaccctggagccacccggatgtagtaataaagagcagcaggtgactgtaagtcatacatacaaaatagatgttcccaagtctgccctggtgcaggttgatgctgacccccaacctctgtctgatgatggggcctccctgttggcactaggagaggcgagagaggaacagaatatcatctttaggcataacatccgcctacagactccgcagaaagattgtgagcttgccggatccgtccaggatcttctggctcgtgtgaaaaaactggaagaggaaatggtggaaatgaaagagcagtgcagcgcccagaggtgctgtcaaggcgttacggatctgtcaagacattgcagcggacatggaactttttccttggaaacatgctcatgtcactgtgaggaagggagagaaggaccagcttgcgaaaggctcgcttgtcctggggcatgtagcgggcacggccgctgtgtcgatgggagatgcctatgtcatgagccatatgtcggcgccgattgtggataccccgcctgtcctgaaaattgctccggccacggcgagtgtgtccgaggcgtctgtcaatgccatgaggattttatgtctgaggattgttcagaaaaacgatgtcccggagattgttcgggacacggtttttgtgatactggagagtgttattgcgaggagggcttcacaggtctggactgtgcccaggtagtgacgcctcagggtctgcagctgctgaaaaatacggaggactccctcctggttagctgggagcccagctctcaggtggatcactatctactttcttactatcccctgggaaaggagctctctggtaagcagatccaggtccccaaggaacaacactcttatgagatcctcggtcttctgccaggcacaaagtatattgtcaccctgagaaacgttaagaacgaggtctccagctctccacagcacctgctcgccaccaccgatctggctgtactgggaaccgcctgggtgacggacgagactgagaactcgctcgatgtagagtgggaaaatccgtctacagaagtcgattattataaattgagatatggccccatgactggacaagaagtggctgaagtgactgtacccaaaagctcagaccctaaatcccgatacgacataaccgggttacatccagggacagagtataaaattaccgttgtgccaatgaggggcgaactcgaagggaagcctatcctgctgaatggtcgcaccgagatcgatagccctaccaacgttgtgactgatagagtgactgaagataccgcaactgtatcctgggatcctgtgcaagcagtcatcgacaagtacgtggtgcggtatacctccgctgatggcgatactaaggaaatggcagtgcacaaagacgagagctcgacagttctgaccggcctcaaaccgggagaagcatacaaagtttacgtatgggcagaacggggaaatcaggggagtaaaaaggcggacaccaatgccctgactgaaattgattctcctgctaatctcgtgacagaccgggtgaccgagaacaccgcaacgataagctgggatcctgtacaagctacgatcgataggtacgttgttaggtacacttccgcaaaggacggcgaaactcgggaagtccccgtgggcaaggaacagtcttctactgttctgacaggcctccgcccgggggttgaatacacagtgcatgtatgggctcagaagggagcccaagaatccaagaaagctgatactaaggcacagacagatattgacagcccgcagaacctggtcacagactgggtgacggagaataccgccacggttagttgggatccggtgcaggcaactatagatcgatatgttgtacactacacctccgccaatggagagaccagagaggtgcctgtgggaaaggagcaatcgagcactgtattgactggcctgaggccaggtatggagtacacagttcacgtttgggcccagaagggcaaccaggagtccaagaaggcggataccaaagcacagacggagatcgacggccccaaaaacctggtaaccgattgggttaccgaaaacatggccacagtaagttgggaccctgtacaagccaccatcgacaagtacatggttcgttacacctccgcagacggggagaccagggaagtccctgtaggtaaagagcactcatctaccgttctgactggcctccggcccggcatggagtatatggtccatgtgtgggctcagaagggagctcaggagagcaagaaggccgacacgaaggcccagacggagcttgacccccctcggaatctaagaccctctgccgtgacgcagagtggcggaatactcacttggactcctcctagcgcacagatacacggctacattttgacttaccagtttcccgacggtactgtgaaggagatgcagctcggaagggaagaccaacggtttgccctgcagggacttgagcagggcgccacttaccccgtgtctttagtcgccttcaagggtggtagacggtcacggaatgtgagcaccactctgtccaccgtgggagcccgtttcccccatccatccgattgctcccaggttcagcagaatagtaatgctgccagcggtttgtatacgatttacctccacggagatgcgagcaggccactgcaggtctactgcgacatggagactgatgggggaggatggatagtgttccagaggcggaacaccggtcagttggatttctttaagcggtggcgatcttacgtggagggttttggagaccctatgaaagaattctggctgggactagacaaattacacaatctgactacaggtactcctgccaggtatgaagtcagggtggacctccagaccgctaatgaaagcgcctatgccatatatgattttttccaggttgcaagctccaaagagcggtacaagttaacagtggggaagtaccgcgggaccgcgggcgacgctctgacatatcacaacggttggaaattcacaacctttgatagggataacgacatagccttatcaaactgtgcactgacccatcacggcggctggtggtacaagaattgtcacctggccaacccaaacggaagatatggcgaaactaaacacagtgaaggagttaattgggagccatggaagggacatgagttttccattccttacgtcgagctgaaaatccggcctcatggttacagccgtgagcccgtgctcggcaggaagaaaaggaccctgcgaggcaggctgcgcacattttag

SEQ ID NO: 298729 - DNA, 3369 bp, Artificial Sequence
  derived and/or modified sequence
atgagcctgcaggagatgttccgcttccccatgggcctgctgctgggctctgtgctgctggtggccagcgccccagccaccctggagcccccaggctgcagcaacaaggagcagcaggtgacagtgagccacacctacaagattgatgtgcccaagagcgccctggtgcaggtggatgctgacccccagcccctgagtgatgatggagccagcctgctggccctgggggaggcccgggaggagcagaacatcatcttccgccacaacatccggctgcagaccccccagaaggactgtgagctggccggctctgtgcaggacctgctggcccgggtgaagaagctggaggaggagatggtggagatgaaggagcagtgcagcgcccagcgctgctgccagggcgtgacagacctgagccgccactgcagcggccacggcaccttcagcctggagacctgcagctgccactgtgaggagggccgggagggccctgcctgtgagcggctggcctgccctggggcctgcagcggccacggccgctgtgtggatggccgctgcctgtgccacgagccctacgtgggcgctgactgtggctacccagcctgcccagagaactgcagcggccatggagaatgtgtgcggggcgtgtgccagtgccacgaggacttcatgtctgaggactgcagcgagaagcgctgccctggggactgcagcggccacggcttctgtgacacaggagagtgctactgtgaggagggcttcaccggcctggactgtgcccaggtggtgaccccccagggcctgcagctgctgaagaacacagaggacagcctgctggtgtcctgggagcccagcagccaggtggaccactacctgctgagctactaccccctgggcaaggagctgagcggcaagcagatccaggtgcccaaggagcagcacagctatgagatcctgggcctgctgcccggcaccaagtacatcgtgaccctgagaaatgtgaagaatgaggtgagcagcagcccccagcacctgctggccaccacagacctggccgtgctgggcacagcctgggtgacagatgaaacagagaacagcctggatgtggagtgggagaaccccagcacagaggtggactactacaagctgcgctatggccccatgacaggccaggaggtggccgaggtgacagtgcccaagagcagtgaccccaagagccgctatgacatcaccggcctgcaccctggaacagagtacaagatcaccgtggtgcccatgagaggagagctggagggcaagcccatcctgctgaatggccgcacagaaattgacagccccaccaacgtggtgacagacagagtgacagaggacacagccaccgtgtcctgggaccctgtgcaggccgtcatcgacaagtatgtggtgcgctacaccagcgcagatggagacaccaaggagatggctgtgcacaaggatgagagcagcacagtgctgaccggcctgaagccaggagaggcctacaaggtgtatgtgtgggccgagcggggcaaccagggcagcaagaaggctgacaccaatgccctgacagaaattgacagccctgccaacctggtgacagacagagtgacagagaacacagccaccatctcctgggaccctgtgcaggccaccatcgacagatatgtggtgcgctacaccagcgccaaggatggagagacccgggaggtgcctgtgggcaaggagcagagcagcacagtgctgaccggcctgcggcctggggtggagtacacagtgcacgtgtgggcccagaagggggcccaggagagcaagaaggctgacaccaaggcccagacagacatcgacagcccccagaacctggtgacagactgggtgacagaaaatacagccaccgtgtcctgggaccctgtgcaggccaccatcgaccgctacgtggtgcactacaccagcgccaacggggagacccgggaggtgcctgtgggcaaggagcagagcagcacagtgctgaccggcctgcggcccggcatggagtacacagtgcacgtgtgggcccagaagggcaaccaggagagcaagaaggctgacaccaaggcccagacagaaattgatggccccaagaacctggtgacagactgggtgacagagaacatggccaccgtgtcctgggaccctgtgcaggccaccatcgacaagtacatggtgcgctacaccagcgcagatggagagacccgggaggtgcctgtgggcaaggagcacagcagcacagtgctgaccggcctgcggcccggcatggagtacatggtgcacgtgtgggcccagaagggggcccaggagagcaagaaggctgacaccaaggcccagacagagctggacccccccaggaacctgcggcccagcgctgtgacccagagcggcggcatcctgacctggaccccacccagcgcccagatccacggctacatcctgacctaccagttcccagatggcaccgtgaaggagatgcagctgggccgggaggaccagagatttgccctgcagggcctggagcagggcgccacctaccctgtgtccctggtggccttcaagggcggcagaagaagcagaaatgtgtccaccaccctgagcacagtgggcgcccgcttcccccaccccagcgactgcagccaggtgcagcagaacagcaatgctgccagcggcctgtacaccatctacctgcatggagatgccagccggcccctgcaggtgtactgtgacatggagacagatggcggcggctggatcgtgttccagaggaggaacacaggccagctggacttcttcaagcgctggaggagctatgtggagggctttggagaccccatgaaggagttctggctgggcctggacaagctgcacaacctgaccaccggcaccccagcccgctatgaggtgcgggtggacctgcagacagccaatgaaagtgcctatgccatctatgacttcttccaggtggccagcagcaaggagcgctacaagctgactgtgggcaagtaccggggcacagctggagatgccctgacctaccacaacggctggaagttcaccacctttgaccgggacaatgacatcgccctgagcaactgtgccctgacccaccacggcggctggtggtacaagaactgccacctggccaaccccaacggccgctatggagagaccaagcacagcgagggcgtgaactgggagccctggaagggccacgagttcagcatcccctacgtggagctgaagatccggccccacggctacagccgggagcctgtgctgggcaggaagaagaggaccctgcggggccgcctgcggaccttctag

SEQ ID NO: 298730 - RNA, 3369 nt, Artificial Sequence
  derived and/or modified sequence
augucccuacaggagauguuccgcuucccaaugggcuuguuacuuggcucuguauuacugguugccucagcaccugcaaccuuggagccgcccgguugcaguaacaaggaacagcaggugacuguuucccacaccuacaagauagaugugccaaaguccgcccuggugcagguggacgcagacccucagccccugucagacgacggcgcgucauugcuggcucugggcgaagcacgggaggaacagaacauuauuuuucgccacaacauaaggcugcagacuccacagaaggauugugaauuagccggcagcguccaggaucuucuugcuagggugaagaaauuggaagaagagaugguggagaugaaagagcagugcucagcccaaagaugcugucagggcgugacggaccugucccggcauugcuccggucacgguacauucucccucgagaccuguaguugccacugugaggaagggcgagaggguccggcaugcgaacggcuggccugucccggagccugcagcggucacgggagaugcguagauggucgcugucucugucacgaaccauacguaggcgcugacuguggauaucccgccugccccgagaauuguagcggacacggcgaguguguccgggggguaugucaaugucaugaagacuucauguccgaagacuguucagaaaagcggugccccggcgacuguuccgggcacggguuuugcgauaccggugaaugcuauugugaagaaggcuuuacaggacuggacugcgcgcagguugugacaccacagggccuccagcuguugaaaaacacggaagacagccugcuuguguccugggagcccucgucgcaggucgaccauuaucuguuaagcuacuauccccuaggcaaagaacuguccgguaaacagauccaggucccaaaagaacagcacuccuacgagauuuuaggccuccugccuggcacaaaauacauugucacucugagaaacgucaagaaugagguguccagcucuccucaacacuugcucgcgacgaccgaucucgcuguucucggaacugcaugggugacugaugagacagaaaauucucuggacgucgaaugggaaaaccccucgacugaagucgacuauuacaagcugagauacggcccuaugaccggccaggagguggccgaggugaccguacccaaauccagcgauccaaagucccgguaugauaucaccggacugcacccagggacugaguauaaaaucacagucgucccuaugcgcggcgaacuggaagguaaaccaauccucuuaaacggccgcacagagaucgauuccccuacaaauguagugaccgaccgcgugacggaggauacagcaacuguuuccugggacccagugcaagccgugauagacaaguauguugugcgcuacaccagcgcagacggagacacaaaggagauggcaguccacaaggacgaaucuuccacagugcugacaggcuugaagccuggcgaagcuuacaaaguguauguuugggcugagagaggcaaccaaggaaguaagaaggccgauacaaacgcccugaccgagaucgacagccccgcuaaccugguuacagauagagucacagagaauacugccacaauuuccugggaucccguccaggccaccaucgaucgguacguuguacgguacacuucggcgaaagauggcgaaaccagggaggugccagucgggaaagagcagaguucgacaguacugacuggccugcggccaggcguggaauauacaguucaugucugggcacagaagggugcccaagaguccaagaaggcugacacuaaggcccaaacagacauagauagcccucagaaucugguuacagacugggucacugagaacacagcgaccgugucaugggacccaguccaggccacuauugaucgauacgucgugcauuacacauccgcaaacggugaaacuagggaagugccgguggguaaggaacagagcaguacuguucuaacagggcuacggccaggcauggaauauacggugcaugugugggcccagaaaggcaaucaagagagcaaaaaagcugauaccaaggcucagacggagaucgacgggccuaagaaucucguaaccgauugggucacugaaaauauggccaccguguccugggaccccguucaggcaacuaucgacaaauauaugguacgcuacacuagcgcagauggggaaaccagggaggucccugugggaaaagaacauuccucaacugucuugaccgguuugcggccagggauggaguauauggugcacgucugggcucaaaaaggggcccaagagagcaagaaggcugacacuaaggcccagacugagcuggauccuccuaggaaucuccgaccuuccgcagugacccagagcgggggcauuuuaacuuggacgcccccguccgcucaaauccacggcuauauacuaacguaucaauuuccagauggaacugucaaagagaugcagcucgguagggaggaccagcgcuucgcucugcaaggacuggaacagggugcaacauacccagugucacuugucgcauuuaaggguggaagaaggaguagaaaugucucaaccacacugucaacagugggugcgcgcuuuccgcacccuuccgauuguagucaggugcagcagaacucuaacgccgccucaggguuauauaccauauaucuucacggugaugcauccaggccguuacaagucuacugcgauauggaaacugacggaggugguuggauugucuuucagagacgaaauacuggccagcucgacuucuucaagcguuggaggaguuauguggagggguucggcgaucccaugaaagaauuuuggcuuggacuugacaaacuccauaaucugaccacuggaaccccggccagauacgaggugagagucgaccugcagacagccaaugaaagugcuuacgccauauaugauuuuuuucaggucgccagcucuaaagagagauacaaguugaccguaggaaaauauagaggcacugccggcgacgccuuaacauaccauaauggguggaaguuuacaacuuucgaccgcgauaacgacauagcccuuucaaauugcgcacugacucaucauggaggguggugguacaaaaacugccaccucgcgaacccaaacgggcgcuacggagaaacaaagcauucugagggagugaauugggaacccuggaagggccacgaguucucaaucccuuauguagagcugaagauaaggccacacggguacucucgagagcccguccuuggaaggaagaaacgaacacuacgcggaagacugaggacauucuag

SEQ ID NO: 298731 - RNA, 3369 nt, Artificial Sequence
  derived and/or modified sequence
augagucuacaagagauguuccgcuuucccaugggacugcuccuuggcucaguucugcuggucgccucagcccccgccacccuggaaccacccggauguucuaauaaggaacagcaaguuacugugagucauaccuacaagauagacgugccuaaaucagcccuggugcagguagacgcggauccccagccccuaagcgacgacggcgccuccuuguuggccuugggcgaagcucgcgaagaacagaacauaaucuuuaggcacaacaucagacugcagacuccccagaaagauugcgagcuggcaggcagcgugcaagaccugcucgcuagggugaagaaacuggaggaggaaaugguggagaugaaagagcaauguuccgcccagagauguugucagggugucacggauuugucucgccacugcucaggacaugguacuuuuagcuuggaaacuuguagcugucacugcgaagaaggaagagagggcccagcuugcgagcggcuggccugcccuggggcguguucagggcaugggagguguguggacggccguugucucugucaugaacccuaugugggggcugauuguggauaucccgccuguccagaaaauuguucgggucauggagagugcguaaggggcgugugucagugucacgaagacuuuaugucugaggacuguagcgaaaagagaugccccggcgauuguaguggacacggauucugugacaccggggaaugcuauugugaggaggguuucaccggacuagacugcgcacaaguagugacuccccaggggcuacaacuguugaaaaauaccgaagacucacugcucguuagcugggagccaagcucacagguugaccacuaucucuuaucuuauuacccccugggaaaggaguuguccgggaagcaaauccaagugccaaaagaacagcauuccuacgagauacugggacuccucccaggcaccaaauacauugucacguugcgaaaugucaagaacgaagugagcucuagcccccagcacuugcuugccacaacagauuuggccguguuggguacagccugggucacggacgaaaccgagaauucccuggauguggagugggaaaacccaaguaccgaggucgacuacuacaaacugcgcuauggcccaaugaccggucaggagguugcugaggucacuguuccgaagucuuccgauccuaaguccagguaugauauaacaggucugcaccccggaacugaauauaagaucaccguugugccaaugaggggagagcuugagggcaagcccauacuccugaaugggaggacagaaauagauagcccgaccaauguugugacugaccgcgucaccgaggauacagcuacagucucuugggacccagugcaggcagugaucgacaaguaugugguaagauacacuucagcugacggagauacaaaggaaauggccgugcacaaggaugagucaaguaccgugcuaacgggacuuaaaccaggcgaagcuuauaagguuuacgugugggcagagaggggaaaccaaggcucaaagaaagcugacaccaacgcacuuacugaaauagacucccccgccaaucuggugaccgaucggguaacugaaaacacugccacaaucucuugggauccuguacaagcuaccaucgacagauacguggugagauauacuuccgcuaaagacggagagacccgugaggugcccguggggaaagaacaguccagcacugucuugaccggccugagacccggaguagaauauacaguccauguaugggcacaaaaaggcgcucaggaaaguaagaaggccgauacgaaagcacagacugauauugacucaccucaaaaucucgugacugauugggucacagagaacacugcaacggucaguugggauccugugcaggcuaccaucgaucgauauguaguccauuauacaucugccaauggagagacacgcgaaguacccgucgggaaggaacaaagcagcacaguacuuacagggcuuagaccggggauggaguacacaguccaugucugggcacaaaaaggaaaucaggaaaguaaaaaagcugacaccaaagcucagaccgagaucgaugguccaaaaaaucuugucacagauugggucacugagaacauggcaacuguauccugggaccccguucaggccacaauagacaaauacauggugagauauaccucagcugacggugagacaagagaagugcccgugggcaaagagcacucuucuacaguucuuaccggccuuagaccagggauggaauacauggugcacguuugggcgcaaaaaggagcacaggagaguaagaaagcagacacgaaagcccaaacggagcucgaccccccgaggaaucuccggccuucugcagugacucagaguggaggaauacugacauggacgccuccauccgcccaaauccauggcuacauccuuacauaccaauuuccagacggaacagugaaagaaaugcaacuuggcagagaagaccagcgguucgcccugcaaggcuuggagcagggggcaaccuauccuguuagccugguggcguuuaagggcgggcgucguucacguaacgugucaacaacccuuuccacaguuggcgcucgcuucccccauccaucggacugcucgcaaguucaacagaauucuaacgccgccucaggguuauauaccauauaucuucacggugaugcauccaggccguuacaagucuacugcgauauggaaacugacggaggugguuggauugucuuucagagacgaaauacuggccagcucgacuucuucaagcguuggaggaguuauguggagggguucggcgaucccaugaaagaauuuuggcuuggacuugacaaacuccauaaucugaccacuggaaccccggccagauacgaggugagagucgaccugcagacagccaaugaaagugcuuacgccauauaugauuuuuuccaagucgccucaaguaaagagagauauaaauugacagucggaaaguaucgagggaccgcuggcgaugccuugacuuaccauaauggguggaaguuuacuacauuugaccgcgauaacgacauagcccugucgaauugcgcauuaacacaucacggaggauggugguauaaaaauugucaccuggcaaaccccaacggaagauauggggaaaccaaacacucugaaggcgugaacugggaaccuuggaaggggcacgaauuuuccauaccguacguggagcucaagauuagaccucacggcuacagccgggagccuguguugggucggaaaaagagaacauugagggguagauugcguacauuuuag

SEQ ID NO: 298732 - protein, 220 aa, Artificial Sequence
  derived and/or modified sequence
MIPWPASDRKKSECAFKKKSNETQCFNFIRVLVSYNVTHLYTCGTFAFSPACTFIELQDSYLLPISEDKVMEGKGQSPFDPAHKHTAVLVDGMLYSGTMNNFLGSEPILMRTLGSQPVLKTDNFLRWLHHDASFVAAIPSTQVVYFFFEETASEFDFFERLHTSRVARVCKNDVGGEKLLQKKWTTFLKAQLLCTQPGQLPFNVIRHAVLLPADSPTAPH

SEQ ID NO: 298733 - DNA, 975 bp, Artificial Sequence
  derived and/or modified sequence
cccctgaacccaggtggtgacatgtgcacggtggtgcctgctgaaggtgggcaagggagctgagcagggaccgggggctactgtacctccttttcacctcctcccgcatctggagcccctcctcctccacatgtgcgaatccaggagccacagaaggggatgaacgtagggcacttagcttcttccaccagaagggcctccaggattttgacactctgctcctgagtggtgatggaaatactctctacgtgggggctcgagaagccattctggccttggatatccaggatccaggggtccccaggctaaagaacatgataccgtggccagccagtgacagaaaaaagagtgaatgtgcctttaagaagaagagcaatgagacacagtgtttcaacttcatccgtgtcctggtttcttacaatgtcacccatctctacacctgcggcaccttcgccttcagccctgcttgtaccttcattgaacttcaagattcctacctgttgcccatctcggaggacaaggtcatggagggaaaaggccaaagcccctttgaccccgctcacaagcatacggctgtcttggtggatgggatgctctattctggtactatgaacaacttcctgggcagtgagcccatcctgatgcgcacactgggatcccagcctgtcctcaagaccgacaacttcctccgctggctgcatcatgacgcctcctttgtggcagccatcccttcgacccaggtcgtctacttcttcttcgaggagacagccagcgagtttgacttctttgagaggctccacacatcgcgggtggctagagtctgcaagaatgacgtgggcggcgaaaagctgctgcagaagaagtggaccaccttcctgaaggcccagctgctctgcacccagccggggcagctgcccttcaacgtcatccgccacgcggtcctgctccccgccgattctcccacagctccccaca

SEQ ID NO: 298734 - protein, 761 aa, Artificial Sequence
  derived and/or modified sequence
MALPALGLDPWSLLGLFLFQLLQLLLPTTTAGGGGQGPMPRVRYYAGDERRALSFFHQKGLQDFDTLLLSGDGNTLYVGAREAILALDIQDPGVPRLKNMIPWPASDRKKSECAFKKKSNETQCFNFIRVLVSYNVTHLYTCGTFAFSPACTFIELQDSYLLPISEDKVMEGKGQSPFDPAHKHTAVLVDGMLYSGTMNNFLGSEPILMRTLGSQPVLKTDNFLRWLHHDASFVAAIPSTQVVYFFFEETASEFDFFERLHTSRVARVCKNDVGGEKLLQKKWTTFLKAQLLCTQPGQLPFNVIRHAVLLPADSPTAPHIYAVFTSQWQVGGTRSSAVCAFSLLDIERVFKGKYKELNKETSRWTTYRGPETNPRPGSCSVGPSSDKALTFMKDHFLMDEQVVGTPLLVKSGVEYTRLAVETAQGLDGHSHLVMYLGTTTGSLHKAVVSGDSSAHLVEEIQLFPDPEPVRNLQLAPTQGAVFVGFSGGVWRVPRANCSVYESCVDCVLARDPHCAWDPESRTCCLLSAPNLNSWKQDMERGNPEWACASGPMSRSLRPQSRPQIIKEVLAVPNSILELPCPHLSALASYYWSHGPAAVPEASSTVYNGSLLLIVQDGVGGLYQCWATENGFSYPVISYWVDSQDQTLALDPELAGIPREHVKVPLTRVSGGAALAAQQSYWPHFVTVTVLFALVLSGALIILVASPLRALRARGKVQGCETLRPGEKAPLSREQHLQSPKECRTSASDVDADNNCLGTEVA

SEQ ID NO: 298735 - protein, 723 aa, Artificial Sequence
  derived and/or modified sequence
MPRVRYYAGDERRALSFFHQKGLQDFDTLLLSGDGNTLYVGAREAILALDIQDPGVPRLKNMIPWPASDRKKSECAFKKKSNETQCFNFIRVLVSYNVTHLYTCGTFAFSPACTFIELQDSYLLPISEDKVMEGKGQSPFDPAHKHTAVLVDGMLYSGTMNNFLGSEPILMRTLGSQPVLKTDNFLRWLHHDASFVAAIPSTQVVYFFFEETASEFDFFERLHTSRVARVCKNDVGGEKLLQKKWTTFLKAQLLCTQPGQLPFNVIRHAVLLPADSPTAPHIYAVFTSQWQVGGTRSSAVCAFSLLDIERVFKGKYKELNKETSRWTTYRGPETNPRPGSCSVGPSSDKALTFMKDHFLMDEQVVGTPLLVKSGVEYTRLAVETAQGLDGHSHLVMYLGTTTGSLHKAVVSGDSSAHLVEEIQLFPDPEPVRNLQLAPTQGAVFVGFSGGVWRVPRANCSVYESCVDCVLARDPHCAWDPESRTCCLLSAPNLNSWKQDMERGNPEWACASGPMSRSLRPQSRPQIIKEVLAVPNSILELPCPHLSALASYYWSHGPAAVPEASSTVYNGSLLLIVQDGVGGLYQCWATENGFSYPVISYWVDSQDQTLALDPELAGIPREHVKVPLTRVSGGAALAAQQSYWPHFVTVTVLFALVLSGALIILVASPLRALRARGKVQGCETLRPGEKAPLSREQHLQSPKECRTSASDVDADNNCLGTEVA

SEQ ID NO: 298736 - protein, 321 aa, Artificial Sequence
  derived and/or modified sequence
MALPALGLDPWSLLGLFLFQLLQLLLPTTTAGGGGQGPMPRVRYYAGDERRALSFFHQKGLQDFDTLLLSGDGNTLYVGAREAILALDIQDPGVPRLKNMIPWPASDRKKSECAFKKKSNETQCFNFIRVLVSYNVTHLYTCGTFAFSPACTFIELQDSYLLPISEDKVMEGKGQSPFDPAHKHTAVLVDGMLYSGTMNNFLGSEPILMRTLGSQPVLKTDNFLRWLHHDASFVAAIPSTQVVYFFFEETASEFDFFERLHTSRVARVCKNDVGGEKLLQKKWTTFLKAQLLCTQPGQLPFNVIRHAVLLPADSPTAPHIY

SEQ ID NO: 298737 - protein, 236 aa, Artificial Sequence
  derived and/or modified sequence
MALPALGLDPWSLLGLFLFQLLQLLLPTTTAGGGGQGPMPRVRYYAGDERRALSFFHQKGLQDFDTLLLSGDGNTLYVGAREAILALDIQDPGVPRLKNMIPWPASDRKKSECAFKKKSNEELQDSYLLPISEDKVMEGKGQSPFDPAHKHTAVLVDGMLYSGTMNNFLGSEPILMRTLGSQPVLKTDNFLRWLHHDASFVAAIPSTQVVYFFFEETASEFDFFERLHTSRVARVC

SEQ ID NO: 298738 - DNA, 2286 bp, Artificial Sequence
  derived and/or modified sequence
atggccttacctgcactggggttggacccatggtcactcctgggactgttcctgtttcaactgctccagctgttgttacctaccacaaccgctggaggtgggggccagggaccaatgccaagagtgcgctactatgcaggcgacgagagaagggccctttcattcttccatcaaaagggactgcaggacttcgacactttactgctgtccggagacggaaacactttgtacgtgggcgcacgggaggccatcctggctctggatattcaggatcccggtgtgcctcggctgaagaatatgatcccttggcccgccagtgatcggaagaaaagtgagtgtgcttttaaaaagaagtcaaatgagactcagtgtttcaattttataagggtgctggtgtcctacaacgtgacgcacctgtatacatgtggcacattcgctttctcacccgcatgcacatttatcgaactgcaggactcctacttactacccatcagtgaagacaaggtgatggagggaaaggggcagtccccattcgaccccgcacacaagcatacagcggtgctggttgacgggatgctctactcaggcacaatgaataacttcctcgggagtgagccaatattgatgagaacactgggcagtcagcccgtgctaaagacagacaatttcctgaggtggctccaccatgatgcaagctttgtcgccgctataccgtcaactcaagtggtgtattttttctttgaggaaactgcttccgagtttgatttttttgagcgacttcacacaagtagagtcgcccgcgtgtgcaagaatgatgtggggggagagaagttgctgcagaagaaatggacgacttttctgaaagctcaattgctgtgtacacagccaggccagctgcccttcaatgtaattcgtcacgcggtcctgctaccagctgattcaccaaccgccccacatatatacgcagtgttcacttcacagtggcaagttggtggcaccagatctagcgcggtgtgtgccttttctctcttggacattgaaagagtctttaaggggaagtataaggagctgaacaaggagaccagccgctggaccacctataggggccctgaaaccaatcctcgaccaggtagttgctccgtaggccctagcagtgacaaagcactgactttcatgaaggatcatttccttatggatgaacaggtcgtcggcacaccactcttggtcaagtctggggtggagtatacaaggctggctgtggaaacagctcagggtctggatggtcattcgcatttggtaatgtacctggggactaccaccggctctttgcataaggccgttgtcagcggagattcttctgcacatctggtggaggaaatccaacttttccccgaccccgaaccagttaggaacctacaactggcgccaacccagggcgccgtgtttgtggggttctccggaggagtctggagggtcccacgggccaattgtagcgtctacgaatcctgcgtcgattgcgtactggccagggatcctcactgtgcctgggacccagagtctcgtacttgttgcctgctgtctgcacccaaccttaacagctggaagcaggatatggaaagaggaaatccagagtgggcctgcgcttcaggtccaatgagtcgcagtctgagacctcagagcaggcctcagataattaaagaggtgctcgccgtgcctaactctatcttagaattgccatgcccccacctatctgccctggcgagctactactggtcccacggacccgctgcagtgccagaagcctctagcacagtgtataacgggtcacttctcctcatcgtgcaggacggggtggggggcctttatcaatgctgggcgaccgaaaacgggttcagctaccccgtgatcagctactgggtggattcccaggatcagactctggcgctggatccagagctggcaggaattcctcgcgaacacgtcaaggtgccactgacaagagtgtccgggggggcagccctggctgcgcaacagtcctactggcctcacttcgtgaccgtcactgtgctgtttgccctggtgctgtcaggcgccctcattatcctggtggcgtcccccctgcgcgctctccgagctcgtggaaaagtgcagggttgcgagaccctgcggcctggcgagaaagcccctctgtcccgagagcagcacctgcagtctccaaaggagtgtcgcacttccgcttccgacgtggatgcagataacaattgtcttggtaccgaggtggcatag

SEQ ID NO: 298739 - DNA, 2286 bp, Artificial Sequence
  derived and/or modified sequence
atggctcttccagccctcggattggacccatggagtttgctgggtctttttctctttcagctgctgcagttacttctcccaaccaccacagcaggagggggcgggcagggccctatgcctagagtgagatattacgccggggacgaacgccgcgcattgagtttttttcatcaaaaggggctgcaagactttgataccctactgctcagcggcgacgggaacactctatatgtgggggcccgtgaagcaatcctagcacttgatatccaggaccccggtgttcctaggctgaaaaacatgattccctggcctgcatcagaccgcaaaaagagtgaatgtgcctttaaaaagaagtctaatgaaacccagtgtttcaactttattagggttctggtttcctataacgtgacacatctgtacacttgcggtacatttgcattcagcccagcctgcacgttcatcgagctgcaggattcctatctgctgcccatttccgaggacaaagtgatggagggcaagggccagagcccgtttgatcctgctcacaagcacaccgcagttctcgttgacggcatgctttattctgggaccatgaacaattttctaggaagcgaacctatactcatgagaacgctgggctcccaacctgttcttaaaaccgacaacttcctacggtggctgcaccacgacgcctctttcgtggccgcaatccctagtacacaggtggtttattttttttttgaagaaactgccagtgaattcgactttttcgaacgtctgcacacgtcgagggttgccagagtgtgtaagaacgatgtggggggcgaaaagttacttcagaagaaatggaccaccttccttaaagcccaactgctatgcacgcaaccgggacagcttccctttaatgttattcgtcacgccgtgcttctgcccgcggacagtcctacagcgcctcatatatacgccgtcttcactagccaatggcaggtgggtggtacccgaagttccgcggtttgcgccttttcactgctcgacatcgaaagagtgtttaaagggaagtacaaagaacttaacaaggaaaccagccgttggacaacctacagggggcctgaaaccaatccccgtcccggctcatgttctgtgggaccgtcctcagataaagccttaacattcatgaaggaccactttctgatggatgagcaagtggtcggcaccccgctgctggtgaagagcggtgtggagtacaccaggcttgctgtggaaacggctcagggcctagatgggcattcgcacctggtgatgtacctgggtacaacgactgggtccctgcacaaggcggtggtaagcggagactccagtgcacacctagtagaggaaattcaactgttccccgatccagagccagtgcgtaacctgcaactggcccctacccagggagccgtgttcgtggggtttagtggcggtgtgtggcgcgttccgcgcgcaaactgcagtgtctacgagtcgtgtgtcgactgcgtgttggcgcgggacccccactgcgcatgggaccctgaaagtcgcacctgttgtttgcttagtgcccctaatctgaattcttggaagcaggacatggagcggggaaaccccgaatgggcatgcgcaagcgggccgatgagcaggagcttgcgcccacagagtcgtccccagatcatcaaggaggtactcgccgttcccaattctatcctcgagctcccctgcccccatctgtccgccctcgcctcctactactggagtcacggaccagctgccgtgccagaggccagcagcactgtatacaacgggagccttctcctgattgtgcaggacggggtcggcgggctatatcagtgctgggccaccgagaacggattcagctatccagtgatcagttactgggttgactctcaggaccaaactctagcgcttgaccccgaactggccggtatccccagagaacatgttaaggtgcccctcactcgtgtgagcggaggcgccgccttggcagcccaacagagctactggcctcatttcgttactgtgacagtcctgttcgccttggttcttagtggggctctcatcatactggtagcctcgcccctcagagcccttagagcacgcggaaaagtccagggctgcgagacactcagacctggcgagaaggctcccttaagcagagaacagcatctgcagtctccgaaggagtgtagaacctcagcttctgacgttgatgcggacaataactgtctcggcaccgaagtcgcatag

SEQ ID NO: 298740 - DNA, 2172 bp, Artificial Sequence
  derived and/or modified sequence
atgcccagggttcggtactatgccggagatgaacgtagagccctgtctttcttccaccagaaaggccttcaggacttcgataccctgcttctgtccggggatggaaacaccttgtatgtgggagcccgggaggctattcttgccctcgacatccaggaccctggtgtgccgcggctgaagaacatgatcccttggcctgccagtgatagaaaaaaaagcgaatgtgcgttcaagaagaaaagcaacgagactcagtgcttcaacttcatccgggtactggtgtcctacaatgtgacccacctgtatacttgcggcacattcgcattttctcccgcttgtacattcatagaactccaggactcctatctactgcctatctcagaagacaaagtcatggagggtaagggccagtctccattcgaccctgcccataagcacaccgctgtgctcgtggacggaatgctttatagtggtacaatgaataatttcctgggctccgaaccaatcctgatgcgcactctggggtctcagccagtcctgaaaacagataattttcttagatggttgcatcacgacgcttcgttcgtggctgccatcccgtctactcaggtggtttacttcttttttgaagaaacggcatcggagttcgatttttttgaaagactccacacgagcagggtggcacgcgtctgtaaaaatgatgtcggaggggagaagctgctccaaaaaaaatggacaaccttcctgaaggcccagctgctctgtacccagcctggccagctgccctttaacgttatacggcatgccgtcctccttccggctgactcaccaaccgcacctcacatctacgctgtgttcacatcgcagtggcaagtcggggggacaaggtcgagtgccgtctgtgccttttctcttttggatatcgaacgggtcttcaagggcaagtataaagagttgaataaggagaccagtaggtggaccacctaccgtggccccgagaccaaccctcggcctggatcatgctctgtggggcccagcagtgacaaagcgttaacttttatgaaagatcacttcctgatggatgaacaggtcgttggaacccctctcctggtgaagagcggagtcgagtatactcggctggcagtggaaaccgctcagggacttgatggccacagccacctcgtgatgtacctgggcacgacaactggatctctgcacaaggccgtagtaagtggcgacagttcagcccacctcgtcgaagagatacaactctttccagatccggagcctgtgagaaatctacaactggctcccactcagggcgccgttttcgtcggattttctggaggggtttggcgggtcccaagagcaaactgtagcgtgtacgaaagttgcgtggattgtgtgctggcgcgggacccacattgtgcatgggacccagagtcacgcacctgctgtcttttgagtgctcccaaccttaacagttggaagcaagacatggaaagaggcaaccccgagtgggcttgcgcctctggaccaatgtcacggtctctaagaccccagtcccgccctcaaatcatcaaagaagtgttggcagtaccgaactctattctggagctgccatgtcctcatctctccgccttggcgtcctattactggagtcacggcccagcagccgtacccgaagcctctagcaccgtgtacaacgggtcccttttgttaattgtccaggacggcgtgggcggactgtatcaatgttgggctaccgagaacggcttttcctatccagttatttcttactgggtggatagccaggatcagactctggcactggatccagagctcgccggaattccgagagaacacgttaaggtccccttaactcgggtttctggcggggccgccctggcagcccagcagagctactggccacactttgtgacagtcacagtcttatttgccctggtactctccggggccctcatcatcttggtggcatctcctctacgagctctgcgggcccggggaaaggtgcaggggtgcgagaccctgcggcctggcgaaaaggcaccactgagccgtgagcagcacctgcagtcacctaaggaatgcaggaccagcgctagtgatgtggatgcagataacaattgtctcgggactgaggtagcctag

SEQ ID NO: 298741 - DNA, 2286 bp, Artificial Sequence
  derived and/or modified sequence
atggcgctgccagcattgggcctagacccatggagcctgttaggcctcttcctgtttcaactcctgcagttgcttttacccacgaccacagccggggggggcgggcaaggccctatgccccgggtgagatattatgccggggatgaacgacgggccttgtcattcttccatcaaaaggggctacaggatttcgatacgttgctgcttagcggggacggcaacactctttatgtcggcgcccgggaagccatcctggccctcgacatacaggatcccggggtgcctaggctgaagaatatgattccctggcctgcctctgataggaaaaagtccgaatgcgcattcaaaaagaagtccaatgagacacagtgttttaatttcattcgggtgctcgtatcctataacgtgacacacctgtacacttgcggaacatttgcattttctcccgcctgcacctttatagaattgcaggatagctacctattgccaattagcgaggataaagttatggaggggaaagggcagagtccattcgaccccgcccacaagcatacagcggtgttagtcgacggcatgttgtactccggtaccatgaataactttcttggctccgaacctatcctcatgcggacactcggatctcagccagttctgaagaccgacaacttcctccggtggcttcaccatgatgcatcattcgtggctgccatacccagcacccaggtcgtttacttcttctttgaagagaccgctagtgaatttgacttctttgaaagactccacacaagccgcgtcgcacgggtttgtaaaaatgacgtgggaggagagaagttgctgcagaaaaaatggactacttttctgaaagctcagctgctgtgcactcagcccggccagctcccattcaacgtgataaggcatgcggtgctcttaccagctgattccccaacagcccctcacatatacgctgtgttcacctcccagtggcaggtcggcggcaccaggagtagcgccgtttgcgcctttagtttgcttgacattgagcgagttttcaaggggaaatataaggagctaaataaggagactagtagatggacaacataccggggcccagaaaccaatccaaggcccgggtcctgcagcgtgggtccatcttccgacaaggcccttacatttatgaaggaccacttcctgatggacgagcaggtggtcggaactcctcttttagtgaagtctggggtggaatatacccgactcgccgtagagaccgcccaaggtttggatggccactcacacctagtgatgtaccttggcacaacgactggaagcctccacaaagcagtggtctctggtgactcttctgcccacctggttgaagagatccaactttttccagaccctgagccagtacgcaacctccaactagctcccactcaaggcgccgtcttcgtcggcttcagcggaggggtctggcgcgtgccccgggcaaattgttccgtgtacgagtcttgcgtcgattgcgttctggcccgggatccacactgcgcctgggatcctgaatcacgcacttgctgtctgctatcggcgccaaatctgaactcttggaaacaggatatggaacgaggtaatcctgagtgggcctgtgccagcggacccatgtctcgctccctacgcccccaatcgagacctcagataattaaggaagtgttggccgtgcctaacagtattctcgagctgccttgcccacacttgagtgcgctggctagttattactggtctcacgggccagcggctgtcccggaggcatctagtacagtgtataacggaagcctgctccttattgtgcaggacggcgtgggagggctttatcagtgctgggcgaccgagaatggattcagctacccagtcatttcctattgggtcgatagtcaggatcaaacgctcgctctggaccctgagctagctggaattcccagggagcatgtaaaggtccccttaacaagggtatccggcggtgctgcgctggcagctcaacaatcatattggccacactttgtgacagttactgtcctattcgcgctcgtactgtccggcgcactcataatcttagttgcctcgccactacgggccctacgcgcccgcggcaaggtgcaaggatgtgaaaccttaaggcctggggaaaaagcaccactaagccgggaacagcacctacagagcccgaaggaatgccgcacaagtgccagcgacgtggatgcagataacaactgtctggggaccgaagtggcttag

SEQ ID NO: 298742 - DNA, 966 bp, Artificial Sequence
  derived and/or modified sequence
atggcactgccggccctagggttggatccgtggtcactcctgggactctttttgtttcagctgctccagttgttattgccgacgacaacggcgggggggggaggtcaagggccaatgccgagagtacgatactatgccggcgatgagagaagggccctgtctttttttcaccagaaaggcctacaagactttgacactttgctcctctccggagatggcaacactctctacgtcggcgccagggaagccatactggccctagacattcaggatccaggtgttcccaggctcaagaatatgatcccttggccagcaagtgatcgcaaaaagagcgagtgtgcgttcaagaaaaagtccaatgaaacacaatgcttcaacttcatccgggtgttagtgtcatacaatgtcactcacttgtacacatgtggaacatttgccttcagtccagcctgcacttttattgaactgcaggacagctaccttctgcctatttccgaggataaagttatggagggaaaaggccagtcccccttcgacccggcacataagcacaccgctgtgctcgtggacgggatgctctattctggcactatgaataactttctgggcagcgagcccatcctgatgagaaccctcggctcccaaccggtcctaaagaccgacaactttttacggtggttgcaccatgatgccagcttcgtcgctgccatcccctcaacacaggtggtgtacttcttctttgaggagacggctagtgagtttgatttttttgaacggctccacacgagccgggtagcaagagtctgcaaaaacgatgtaggaggagagaagttgctacaaaaaaagtggaccacctttctgaaagctcagctgttatgcacacagccgggtcagctgcctttcaacgtcattcgccacgctgttctcctccccgcagatagccctaccgctccccacatttactag

SEQ ID NO: 298743 - DNA, 711 bp, Artificial Sequence
  derived and/or modified sequence
atggcgctgccagctttaggtctcgacccttggagtctgctggggctgttcctgtttcagttgcttcaattgctgctgccgaccactacggctggtgggggcggccaaggacccatgccccgggttcgctactatgcaggagacgagaggcgagccctgagcttcttccaccagaaggggctccaggacttcgatacactgctcctgtccggcgacggaaacaccctgtacgtcggcgctagagaggcaattctggccctggacatccaggatcccggtgtgcctagactaaagaatatgatcccctggccagcctcagatagaaaaaaatcggaatgtgcttttaaaaaaaagtcaaatgaggagcttcaggactcttacttgctgcctatctcggaggacaaagtaatggagggtaagggacaatcacctttcgaccctgcgcacaagcacaccgcggtgcttgtggatggcatgctctattcaggtaccatgaacaacttccttggtagtgaacctatcctaatgaggaccttgggctcccagccagttctgaagaccgataatttcttgcggtggctccatcatgacgctagttttgtggccgctatccccagcactcaggttgtttatttcttcttcgaggagaccgcctccgagtttgatttttttgagcggttgcacacaagtagagtggctcgagtatgttag

SEQ ID NO: 298744 - DNA, 2172 bp, Artificial Sequence
  derived and/or modified sequence
atgccaagagtgcggtattacgccggcgatgagcgaagagccctgtccttcttccaccagaagggacttcaggatttcgataccctcctgcttagtggagatgggaacaccctctatgtcggggcccgagaggccattcttgcattggatatccaggatccaggcgttcctagacttaagaacatgatcccatggccagcttcagacaggaaaaaaagcgagtgcgcctttaagaagaagagcaatgaaactcagtgtttcaatttcatacgggtattagtgtcctataacgtaactcacctttatacatgtggaacttttgccttttctccagcgtgcaccttcatcgagcttcaagattcctatctgctgccgatcagcgaggataaagtgatggaagggaaaggacagtctcccttcgaccccgcccacaagcatacggccgtgttggtggacggcatgctatattctggaaccatgaataacttccttggctccgaaccgatccttatgcgtactcttggctcacagcccgtcctcaagacagacaactttttgcgctggctgcaccatgatgccagttttgttgcagctataccctcaacacaagttgtgtactttttcttcgaagaaaccgcaagtgagttcgacttttttgaacggcttcatacctcacgcgtcgcacgagtgtgcaagaacgatgttggcggtgaaaagctcctgcagaaaaaatggaccactttcctcaaagcccaactcctgtgcacacaacccggccagttgccgtttaacgtgatcagacacgccgtgttgctacctgccgattctccgactgccccccatatctacgcggtattcaccagccaatggcaggtcggaggcacccgttcttcagcagtgtgtgctttcagtttgcttgacattgagagagtctttaaggggaagtacaaggagctgaataaggagacgagccgttggacgacatacagagggcctgagactaatcctcgcccgggctcctgctcggtaggcccatcctccgacaaggccctgacgtttatgaaagatcacttcctgatggatgagcaggtagtgggcacccctctccttgtgaaatcaggggtcgagtatacacggctagctgtcgaaaccgctcaggggctcgatggccatagccacctggtgatgtacctgggcacgacgactggcagcttacataaggctgtcgtgagtggggactccagcgcacacctcgttgaggagatccagcttttccctgaccctgagcccgttcggaatctgcagctagccccaacacaaggggccgtgttcgtgggattcagcgggggcgtctggagggtgcctcgagcaaactgcagcgtgtatgagtcgtgcgttgactgtgtcctggctagggatcctcactgtgcttgggaccctgaaagcagaacttgttgtttactgtccgcaccaaacttgaactcatggaaacaagatatggagcgagggaaccccgagtgggcctgcgccagcggccccatgtcccgcagcctacgcccccagtcgcgacctcagattattaaagaggtgcttgctgtccctaattccatcctggagcttccctgcccccaccttagtgcactggcaagttactattggtctcatggtccagccgctgtcccagaagcctcttccacggtctataatgggtccctactgctgatcgtgcaagatggagtcggggggctgtatcagtgctgggcaacagagaacgggttcagctatcccgtgatttcttattgggtggattctcaggatcagacactggcgctggaccctgaactggctggaattccaagggagcatgtgaaagtgccgctgacccgtgtaagcggcggagccgcccttgctgcacagcagtcatactggcctcacttcgtcacggttacggtcctgttcgcattggtattgtctggcgcgttaattatattggtggcatcccctctccgggcccttagggcacgcggaaaggttcaaggttgcgaaaccctgcggcccggtgagaaagcgcctctatcccgggagcagcacctgcagtcacctaaggagtgcagaacttccgcaagtgacgttgatgccgataacaattgcctggggactgaggtggcatag

SEQ ID NO: 298745 - DNA, 2286 bp, Artificial Sequence
  derived and/or modified sequence
atggccctgcctgccctgggcctggacccctggagcctgctgggcctcttcctgttccagctgctgcagctgctgctgcccaccaccacagctgggggcggcggccagggccccatgccccgggtgcgctactatgctggagatgagcggcgggccctgtccttcttccaccagaagggcctgcaggactttgacaccctgctgctgtctggagatggcaacaccctgtatgtgggcgcccgggaggccatcctggccctggacatccaggaccccggggtgccccggctgaagaacatgatcccctggccagccagtgacaggaagaagtcagaatgtgccttcaagaagaagagcaatgagacccagtgcttcaacttcatccgggtgctggtgtcctacaacgtgacccacctgtacacctgtggcacctttgccttctccccagcctgcaccttcatcgagctgcaggacagctacctgctgcccatcagcgaggacaaggtgatggagggcaagggccagagcccctttgatcctgcccacaagcacacagctgtgctggtggatggcatgctgtacagcggcaccatgaacaacttcctgggcagcgagcccatcctgatgaggaccctgggcagccagcctgtgctgaagacagacaacttcctgcgctggctgcaccatgatgccagctttgtggccgccatccccagcacccaggtggtgtacttcttctttgaggagacagccagcgagtttgacttctttgagcggctgcacaccagccgggtggcccgggtgtgcaagaatgatgtgggcggggagaagctgctgcagaagaagtggaccaccttcctgaaggcccagctgctgtgcacccagcccggccagctgcccttcaacgtcatcagacatgctgtgctgctgcctgctgacagccccacagccccccacatctatgctgtgttcaccagccagtggcaggtgggcggcaccaggagcagcgctgtgtgtgccttcagcctgctggacatcgagagggtcttcaagggcaagtacaaggagctgaacaaggagaccagccgctggaccacctaccggggccctgagaccaacccccggcccggcagctgcagcgtgggccccagcagtgacaaggccctgaccttcatgaaggaccacttcctgatggatgagcaggtggtgggcacccccctgctggtgaagtctggagtggagtacacccggctggccgtggagacagcccagggcctggatggccacagccacctggtgatgtacctgggcaccaccaccggcagcctgcacaaggctgtggtgtctggggacagcagcgcccacctggtggaggagatccagctgttcccagaccctgagcctgtgaggaacctgcagctggcccccacccagggcgctgtgtttgtgggcttcagcggcggcgtgtggagggtgccccgggccaactgcagcgtgtatgagagctgtgtggactgtgtgctggcccgggacccccactgtgcctgggaccctgagagcaggacctgctgcctgctgagcgcccccaacctgaacagctggaagcaggacatggagcggggcaaccctgagtgggcctgtgccagcggccccatgagccgcagcctgcggccccagagccggccccagatcatcaaggaggtgctggccgtgcccaacagcatcctggagctgccctgcccccacctgagcgccctggccagctactactggagccacggccctgctgctgtgcctgaggccagcagcacagtgtacaacggcagcctgctgctgattgtgcaggatggagtgggcggcctgtaccagtgctgggccacagaaaatggcttctcctaccctgtgatctcctactgggtggacagccaggaccagaccctggccctggaccctgagctggccggcatcccccgggagcacgtgaaggtgcccctgaccagggtgtctggaggagctgccctggccgcccagcagagctactggccccactttgtgacagtgacagtgctgtttgccctggtgctgagcggggccctgatcatcctggtggccagccccctgcgggccctgcgggcccggggcaaggtgcagggctgtgagaccctgcggcctggagagaaggcccccctgagccgggagcagcacctgcagagccccaaggaatgtaggaccagcgccagtgatgtggatgctgacaacaactgcctgggcacagaggtggcctag

SEQ ID NO: 298746 - DNA, 2172 bp, Artificial Sequence
  derived and/or modified sequence
atgccccgggtgcgctactatgctggagatgagcggcgggccctgtccttcttccaccagaagggcctgcaggactttgacaccctgctgctgtctggagatggcaacaccctgtatgtgggcgcccgggaggccatcctggccctggacatccaggaccccggggtgccccggctgaagaacatgatcccctggccagccagtgacaggaagaagtcagaatgtgccttcaagaagaagagcaatgagacccagtgcttcaacttcatccgggtgctggtgtcctacaacgtgacccacctgtacacctgtggcacctttgccttctccccagcctgcaccttcatcgagctgcaggacagctacctgctgcccatcagcgaggacaaggtgatggagggcaagggccagagcccctttgatcctgcccacaagcacacagctgtgctggtggatggcatgctgtacagcggcaccatgaacaacttcctgggcagcgagcccatcctgatgaggaccctgggcagccagcctgtgctgaagacagacaacttcctgcgctggctgcaccatgatgccagctttgtggccgccatccccagcacccaggtggtgtacttcttctttgaggagacagccagcgagtttgacttctttgagcggctgcacaccagccgggtggcccgggtgtgcaagaatgatgtgggcggggagaagctgctgcagaagaagtggaccaccttcctgaaggcccagctgctgtgcacccagcccggccagctgcccttcaacgtcatcagacatgctgtgctgctgcctgctgacagccccacagccccccacatctatgctgtgttcaccagccagtggcaggtgggcggcaccaggagcagcgctgtgtgtgccttcagcctgctggacatcgagagggtcttcaagggcaagtacaaggagctgaacaaggagaccagccgctggaccacctaccggggccctgagaccaacccccggcccggcagctgcagcgtgggccccagcagtgacaaggccctgaccttcatgaaggaccacttcctgatggatgagcaggtggtgggcacccccctgctggtgaagtctggagtggagtacacccggctggccgtggagacagcccagggcctggatggccacagccacctggtgatgtacctgggcaccaccaccggcagcctgcacaaggctgtggtgtctggggacagcagcgcccacctggtggaggagatccagctgttcccagaccctgagcctgtgaggaacctgcagctggcccccacccagggcgctgtgtttgtgggcttcagcggcggcgtgtggagggtgccccgggccaactgcagcgtgtatgagagctgtgtggactgtgtgctggcccgggacccccactgtgcctgggaccctgagagcaggacctgctgcctgctgagcgcccccaacctgaacagctggaagcaggacatggagcggggcaaccctgagtgggcctgtgccagcggccccatgagccgcagcctgcggccccagagccggccccagatcatcaaggaggtgctggccgtgcccaacagcatcctggagctgccctgcccccacctgagcgccctggccagctactactggagccacggccctgctgctgtgcctgaggccagcagcacagtgtacaacggcagcctgctgctgattgtgcaggatggagtgggcggcctgtaccagtgctgggccacagaaaatggcttctcctaccctgtgatctcctactgggtggacagccaggaccagaccctggccctggaccctgagctggccggcatcccccgggagcacgtgaaggtgcccctgaccagggtgtctggaggagctgccctggccgcccagcagagctactggccccactttgtgacagtgacagtgctgtttgccctggtgctgagcggggccctgatcatcctggtggccagccccctgcgggccctgcgggcccggggcaaggtgcagggctgtgagaccctgcggcctggagagaaggcccccctgagccgggagcagcacctgcagagccccaaggaatgtaggaccagcgccagtgatgtggatgctgacaacaactgcctgggcacagaggtggcctag

SEQ ID NO: 298747 - DNA, 966 bp, Artificial Sequence
  derived and/or modified sequence
atggccctgcctgccctgggcctggacccctggagcctgctgggcctcttcctgttccagctgctgcagctgctgctgcccaccaccacagctgggggcggcggccagggccccatgccccgggtgcgctactatgctggagatgagcggcgggccctgtccttcttccaccagaagggcctgcaggactttgacaccctgctgctgtctggagatggcaacaccctgtatgtgggcgcccgggaggccatcctggccctggacatccaggaccccggggtgccccggctgaagaacatgatcccctggccagccagtgacaggaagaagtcagaatgtgccttcaagaagaagagcaatgagacccagtgcttcaacttcatccgggtgctggtgtcctacaacgtgacccacctgtacacctgtggcacctttgccttctccccagcctgcaccttcatcgagctgcaggacagctacctgctgcccatcagcgaggacaaggtgatggagggcaagggccagagcccctttgatcctgcccacaagcacacagctgtgctggtggatggcatgctgtacagcggcaccatgaacaacttcctgggcagcgagcccatcctgatgaggaccctgggcagccagcctgtgctgaagacagacaacttcctgcgctggctgcaccatgatgccagctttgtggccgccatccccagcacccaggtggtgtacttcttctttgaggagacagccagcgagtttgacttctttgagcggctgcacaccagccgggtggcccgggtgtgcaagaatgatgtgggcggggagaagctgctgcagaagaagtggaccaccttcctgaaggcccagctgctgtgcacccagcccggccagctgcccttcaacgtcatcagacatgctgtgctgctgcctgctgacagccccacagccccccacatctactag

SEQ ID NO: 298748 - DNA, 711 bp, Artificial Sequence
  derived and/or modified sequence
atggccctgcctgccctgggcctggacccctggagcctgctgggcctcttcctgttccagctgctgcagctgctgctgcccaccaccacagctgggggcggcggccagggccccatgccccgggtgcgctactatgctggagatgagcggcgggccctgtccttcttccaccagaagggcctgcaggactttgacaccctgctgctgtctggagatggcaacaccctgtatgtgggcgcccgggaggccatcctggccctggacatccaggaccccggggtgccccggctgaagaacatgatcccctggccagccagtgacaggaagaagtcagaatgtgccttcaagaagaagagcaatgaggagctgcaggacagctacctgctgcccatcagcgaggacaaggtgatggagggcaagggccagagcccctttgatcctgcccacaagcacacagctgtgctggtggatggcatgctgtacagcggcaccatgaacaacttcctgggcagcgagcccatcctgatgaggaccctgggcagccagcctgtgctgaagacagacaacttcctgcgctggctgcaccatgatgccagctttgtggccgccatccccagcacccaggtggtgtacttcttctttgaggagacagccagcgagtttgacttctttgagcggctgcacaccagccgggtggcccgggtgtgctag

SEQ ID NO: 298749 - DNA, 2286 bp, Artificial Sequence
  derived and/or modified sequence
atggccctgcccgccctgggcctggacccctggagcctgctgggcctcttcctcttccagcttttgcaactcctgctacccacaaccacggcagggggaggcgggcagggtccgatgcccagagtccgctattacgcaggtgatgaaaggagagctctgtcattctttcatcagaagggactgcaggattttgatacgctgttgttgtctggggatggtaatacactgtacgtgggcgcccgagaggccatccttgccctggatattcaggatcctggggtgcctcgactcaagaacatgataccctggcccgcctcggacagaaaaaagagcgagtgcgcattcaagaagaagtctaatgaaacacagtgcttcaattttatccgagtcctggtgtcttacaatgtgactcacctgtacacctgtgggacgttcgcatttagccccgcctgtacctttatcgagctgcaagactcatatcttttacctatctctgaggacaaagtgatggaggggaagggccagtccccatttgatcccgcccacaaacacactgccgtactggtcgatggcatgctgtactcaggcaccatgaataactttctggggagcgagcccatcctcatgagaacgctggggtcccaaccggttctgaaaactgataattttttgaggtggctgcaccacgacgccagtttcgtcgccgctatcccaagcactcaggttgtctattttttcttcgaggaaacagcctccgagtttgactttttcgaacgcctgcacacgagccgcgtagctcgggtgtgtaagaacgacgttgggggggagaagttactgcagaagaagtggactacctttctgaaggctcaacttctttgcacacagcctggacagttgccgttcaacgtgatccggcacgccgtgctcctgccagccgatagcccgactgccccccacatctacgcggtgtttacctcacagtggcaggtgggaggtactcgcagctcagcagtctgcgcgttctcccttttggatatagagagagtgtttaagggcaaatataaggagctcaacaaggagactagtcgctggacaacatacagaggcccagagactaatccaagaccaggaagctgttcagtcggcccatcttctgataaggcgttaacatttatgaaagatcactttttaatggatgaacaggtggtcggcacaccgctcttggtgaaaagcggcgtagaatacaccagactggcagttgagaccgcacagggcctggacgggcactcccacctggtgatgtatctgggaactacaacggggtctctccataaagccgtggtaagcggagactcatccgcccaccttgttgaggagatacagctgtttcccgatcccgagccggtgcgcaacctgcagctggccccaactcagggggccgtgttcgtgggcttttcaggaggagtttggcgcgtgcctagagcaaattgctccgtgtatgagtcgtgcgttgattgcgtgcttgctcgagaccctcactgcgcctgggaccccgaatctcgcacatgttgccttttatcagcccctaacctcaacagttggaagcaagatatggagcggggaaacccagagtgggcatgcgcaagcggcccaatgtctaggagcctaaggccccagagtaggcctcagattattaaggaggtgctggctgtgccaaattcgattttagaactcccatgcccccatctgtctgccctggcttcctattactggtctcacgggcccgcggccgtgcctgaggcttccagcacagtgtataacggatcgttgttgctgatagtccaggacggagtaggaggattataccaatgctgggccactgagaacggcttttcatatcctgtaatttcttattgggttgattctcaggatcagactttggctctagacccagaactcgccggaatacctagagagcatgtgaaagtccctctcacgcgcgtttcaggcggagccgctttagctgcccagcagagctattggcctcatttcgtgaccgtgacggtgttgttcgcactggtactctccggcgctttgataatcctggtggcctcccctttgcgcgcgctccgggcccggggtaaggttcaagggtgtgaaaccctccggccaggcgaaaaggccccccttagtcgcgagcaacacttgcagtcgcctaaggagtgccgaacttccgcaagcgacgtggacgctgataataactgcctggggaccgaagttgcttag

SEQ ID NO: 298750 - DNA, 2286 bp, Artificial Sequence
  derived and/or modified sequence
atggccctgcccgccctgggcctggacccctggagcctgctgggcctcttcctctttcagctgctgcagctgctgctccctacaaccaccgccggaggagggggacaggggcctatgcctcgggtcaggtattacgccggggacgagcggcgcgcgctctccttcttccatcagaagggattacaggattttgatacactgcttctgagtggcgacggcaacacattgtatgttggcgcacgcgaggcaatcttggctctcgatattcaggacccaggggtcccgcggctgaaaaatatgatcccatggccggctagcgaccggaaaaagtctgagtgtgcatttaaaaagaagagcaatgagacacagtgtttcaactttattagggtgctggtgagctacaacgttactcatctctatacatgtggaactttcgccttcagccctgcctgtacatttatcgaactgcaggattcttatctcctgccaatttctgaggacaaagttatggaaggaaaaggacaaagccctttcgaccccgcacacaaacatactgcggtcctggtggacgggatgctgtactctggaaccatgaacaacttcctggggagcgagcctatcctgatgagaaccttgggcagccagccagtgcttaaaaccgacaattttctgcggtggctgcaccatgatgcctcttttgtggcagccatccccagtactcaggttgtgtacttcttctttgaagaaacggccagcgagtttgatttcttcgagcgcttacatacttcgcgggtagcacgggtatgcaagaacgacgttggtggcgagaagttgttgcagaaaaagtggacaacatttctcaaggcccagttgctctgcactcagcccgggcagctgcccttcaatgtaattcggcacgccgtattgctgcccgccgatagtccgaccgctcctcatatttatgccgtgttcactagccagtggcaagtgggagggaccagatcttccgctgtgtgcgccttttcattgctggatatagagcgagtctttaagggcaaatataaggaattgaacaaagagacctcgaggtggactacatatagagggccagaaactaacccacgtcctggctcttgcagtgtaggcccctcatccgacaaggcgctgacattcatgaaagatcactttttgatggatgagcaggtggtgggaactccactgctcgtgaaatccggggtcgagtacacacgtctggcagttgaaacggcacagggcctggacggacatagtcacctagttatgtatcttggcaccacaacgggttcactgcataaggccgtggtctccggcgacagttccgcccacctggtggaggagatccagctgttcccggaccctgaaccagttaggaatttgcagttggctcccacacaaggggccgtattcgtaggattcagtggcggagtttggcgcgtgcccagggcaaattgtagcgtctacgaatcctgtgtggactgcgtccttgcacgagaccctcactgtgcctgggaccccgagagccgcacgtgttgcctgctaagcgcacccaacttaaacagctggaagcaggatatggagcggggcaacccagaatgggcatgcgcttccggacccatgtccagaagccttaggccgcagtcgaggcctcagattattaaagaggtgttagccgtgcctaattccattctcgagctcccctgcccccacttatctgcactggcaagctactactggtcacatggtccagcagccgtccctgaagcatcttcaactgtgtacaatgggagccttctcctcatcgttcaagatggcgtgggaggcctgtaccagtgttgggcgacagagaatggcttcagctatcccgtgatctcgtattgggtcgactcccaggaccaaacacttgctttagatcctgagctggccgggatccccagggaacacgttaaggtgcctttgacacgcgtgtcaggaggtgctgcccttgctgcccagcagagctactggccccacttcgtgaccgtaacggtcctgttcgcactcgttctaagcggggccctgatcatacttgtggctagtccgctgcgtgcactcagagcaaggggcaaagtccaggggtgcgagacgttgcgacccggagagaaggcccccctgtctagagagcagcacctacagtctccaaaggagtgcagaacctccgcttccgatgtggacgcggataataactgcttaggcacagaggtggcctag

SEQ ID NO: 298751 - DNA, 2172 bp, Artificial Sequence
  derived and/or modified sequence
atgccccgggtgcggtactacgccggcgacgagcggcgggccctgtctttttttcatcagaaaggcctgcaggacttcgataccttgctactatccggagatggtaacacgttgtatgtgggggcccgggaggcaattctggcactagatattcaagacccaggcgtacctcgcctgaagaatatgattccctggcctgcctctgataggaagaaaagtgagtgcgccttcaaaaaaaaatccaacgaaacacagtgcttcaatttcatacgggtcctggtttcttacaacgttactcatctgtacacatgtggcacctttgcctttagtcccgcctgtacttttattgaattacaggatagttacctgcttccaatcagcgaggataaggtcatggaaggaaagggtcaaagtccttttgatcctgctcacaagcacacggccgtcctcgtggatggtatgctgtacagtggtacgatgaataactttcttggtagcgagccaattcttatgaggaccctgggcagtcaacccgttcttaaaaccgacaactttctgaggtggctgcaccacgacgcttcattcgtcgccgcgatccctagcacccaagtcgtctatttttttttcgaggagacggcttcggagtttgatttctttgaaaggctccatacgagcagagtggctcgagtgtgcaagaacgatgtgggaggtgagaaactactgcagaaaaaatggactacttttctcaaggcccagctgctctgcacccagccaggccagcttccattcaatgtgattcggcacgccgtgctcctcccggctgattcgcccacagcacctcatatctatgccgtgtttactagtcagtggcaagtgggtggcaccagatccagcgccgtgtgcgccttctccctgctggacatcgagagagtctttaaaggcaaatataaagagctgaacaaggagacgagccggtggacaacatatcgtgggcccgaaactaatcctaggcctggctcatgctcggtgggaccgtcgtcagataaggcgttgaccttcatgaaagatcactttcttatggatgagcaggttgtgggaacacctttactcgtgaagagcggagtggagtatacgagacttgctgttgaaaccgcccaaggtctcgatgggcatagccacctggtcatgtacctggggaccacaactggttctctgcataaggccgtggtcagcggcgatagctctgctcacctggttgaagagatccagctcttccctgacccggaacccgtgcgaaatttgcagctggctcccacccaaggcgctgtttttgtgggcttttccggcggcgtgtggcgtgtcccccgggcaaactgttcggtttacgagtcctgcgtcgactgtgttttggccagggatccacattgtgcctgggatcctgaatctagaacctgctgcctcctgtccgcccctaatctgaatagctggaagcaagatatggaaagaggtaatccagaatgggcctgcgcctcaggccctatgagccgatcgctgcggcctcagtcgcgcccgcaaattattaaagaagtgctcgccgttccaaactccattctcgagctcccgtgcccccacctctccgccttggctagttattattggagtcatgggccggccgccgtgcccgaggcttcatccactgtatacaacgggagcctcctgttaatcgttcaagacggtgtggggggcctctatcagtgctgggctacagaaaatggcttttcctacccagtgatttcctattgggttgatagtcaggatcagaccctggctttagatccagaattggccggaattccccgagagcatgtcaaggttcctcttacacgcgtatcgggcggcgctgctctggcagcccagcagagctactggccccactttgtgacagtgactgtgttatttgcactggtactctccggagcattaattatcttggtggcatctccactcagagcactccgggctcggggcaaggtgcaggggtgtgagacacttagacccggtgagaaagcacctttatctagggaacagcacctgcagtctcccaaggagtgtcgcacatcagcctcagacgtcgatgcggataataattgcctgggcacagaagtcgcctag

SEQ ID NO: 298752 - DNA, 2286 bp, Artificial Sequence
  derived and/or modified sequence
atggccctgcccgccctgggcctggacccctggagcctgctgggcctgtttttgttccagttgctgcaactgctgctgcccaccactaccgctggaggaggcggacaaggtccaatgcctcgagtgcggtattacgccggtgatgaaaggagggctctgagcttctttcaccaaaaaggcttgcaagattttgacacgctactgttgtccggcgacggaaataccttgtatgttggtgctagagaagccatcttagccttagacatccaggaccccggagttccgagactaaagaatatgataccatggccggccagtgaccgcaaaaaaagcgagtgcgcgtttaagaagaaatccaacgagacccagtgtttcaatttcataagagtgctagtgagttataatgtgacacatctgtatacctgtggcacttttgccttttcccccgcatgtacttttattgaattgcaggactcttatctcctcccaatatcagaggataaggtaatggagggaaaagggcagtccccttttgacccggctcataagcatactgctgtccttgtggacgggatgctgtacagcggcaccatgaataacttcctcggttcagaaccaattctgatgcgtaccctgggctcccaacccgtcctgaaaaccgacaatttcctccgctggctgcatcacgacgcgagcttcgtagcagctataccgagcacacaagtggtatactttttcttcgaggagaccgcttccgaatttgacttcttcgagcgtttgcacacttcacgagttgccagggtctgtaaaaacgatgtggggggggagaagttgctgcagaagaaatggactactttcctcaaagcccagttgctgtgcacacagcccgggcagcttccattcaatgttatacgccatgcggttctgctgcctgccgacagccctacagcgcctcacatctacgccgtgtttactagtcagtggcaagtggggggcacaaggagcagcgcagtgtgcgccttttccctccttgacatcgagcgagtgtttaaaggcaaatacaaagagctgaacaaggagacatcaaggtggacaacctacaggggtcccgagactaacccaagaccaggctcgtgcagcgtggggcctagctcagacaaggcactcacgtttatgaaggaccattttttgatggatgagcaggtggtcgggacccccctgctggtgaagagcggtgtggaatacacgaggctggcagtggaaacagcgcaggggttggacggacacagccacctggttatgtacctcggcaccacaacaggatcactgcacaaggccgtcgtatccggagattctagcgctcacctggtggaggagattcagctatttcccgaccctgagcccgtgagaaacttacagctagcccccacccagggagctgttttcgtgggctttagtgggggcgtgtggagagtgccacgggctaattgtagtgtgtatgagtcgtgtgtggattgcgtgttagcacgcgatccacattgtgcctgggaccctgagagcagaacctgctgtctcctgagcgctcccaatctcaatagttggaaacaggacatggaaaggggtaatccggaatgggcctgtgcgtccggtcctatgagtcgatctctgagaccacagtctcggcctcaaattataaaagaggttctagccgtgcctaatagtattctggaactgccctgccctcatctaagcgccctggcttcctactactggagccatggtcctgctgctgtcccggaggctagctccacagtgtacaacgggtccttgttgctaatcgtgcaggatggagtgggcggactatatcagtgctgggccactgaaaatgggttctcttaccccgtgatctcttattgggtggattctcaagatcaaaccctggctctggatccggaactagccggcattcctcgggaacacgtgaaagttcctctcacccgcgtgtctggaggcgccgcgctggcagcccagcaaagttactggccacactttgtgacggtcactgtgctatttgccttggtcctgtcaggtgccctgatcattcttgtggcctcccccctccgagcactcagagctcgcggaaaagtacaggggtgcgaaactcttagacccggagaaaaggcacctctgagccgggagcagcacctccagagccccaaggagtgtaggacttcagcttctgatgtggacgccgacaacaactgtctgggcaccgaggttgcttag

SEQ ID NO: 298753 - DNA, 966 bp, Artificial Sequence
  derived and/or modified sequence
atggccctgcccgccctgggcctggacccctggagcctgctgggccttttcctcttccagttgctgcaacttctgcttccgactactacagccggcggcggcggccaaggtcccatgccgagagtgcgatattatgcaggcgacgagagacgagcactgtcattcttccaccaaaaaggactgcaggacttcgacacactgctactgagtggagatggcaataccctgtacgtgggcgctcgagaagctatcctggccctggacattcaggacccgggcgtaccacgcctgaaaaatatgatcccctggccagctagcgacaggaagaagtcggagtgcgcgttcaaaaagaaatcaaatgaaactcaatgtttcaactttattagggtccttgtcagctacaacgtcactcatctgtacacatgtggaacctttgccttttcgcctgcttgtacatttatcgaactgcaggattcttaccttcttcctatcagcgaggacaaagtgatggaggggaaggggcagagtcccttcgaccccgctcacaaacacaccgccgtcctagtagatggtatgctatatagcgggactatgaacaacttccttggaagcgaaccaatccttatgcgaaccctggggagccagcccgtactgaagactgataacttcctccggtggctgcaccatgatgcaagcttcgtggccgccattccatccactcaagtggtgtatttttttttcgaagagaccgcatccgagttcgacttttttgaaaggttacacacctccagagtagccagagtgtgcaagaacgacgtgggtggggagaagctgctgcaaaagaagtggaccacctttctgaaggcgcagctcttatgtacccagccgggacaattaccatttaacgttattagacatgctgtccttctgcccgctgatagtcccaccgcccctcatatctattag

SEQ ID NO: 298754 - DNA, 711 bp, Artificial Sequence
  derived and/or modified sequence
atggccctgcccgccctgggcctggacccctggagcctgctgggcttgtttctgttccaattactgcagctcctgcttccaacaacgacagcagggggcggaggccagggcccaatgccccgggtcaggtattatgctggagacgaacgacgcgctctgtcattctttcaccagaaaggcctccaagattttgatacactgctgctgtcaggagatggcaacaccctgtacgtgggcgcgcgagaagcaattcttgctctggacattcaggatcccggcgtgccaagacttaagaatatgatcccgtggccggcttctgaccggaaaaagtccgagtgcgcgttcaagaaaaaatctaacgaagaactgcaggacagctacctgctcccaatctcagaggacaaggtgatggagggcaaaggccaatctccattcgaccctgctcataagcacactgcagttctggtagatggtatgctctactctgggacaatgaacaactttttaggtagtgagcctatccttatgagaacactcggctcgcagcctgtgctgaagaccgataacttcctgagatggctgcaccacgacgcatccttcgtcgcagccataccttccacacaagtagtgtactttttttttgaggaaactgctagtgagtttgactttttcgagcgactgcatacctctcgggtcgccagagtttgttag

SEQ ID NO: 298755 - DNA, 2172 bp, Artificial Sequence
  derived and/or modified sequence
atgccccgggtgcggtactacgccggcgacgagcggcgggccctgtcatttttccaccagaagggtctgcaggattttgacaccctactgttgagtggagacggcaacacattgtatgtgggcgccagagaggcgatcttggccctcgacatccaggatccgggcgtccccagactgaagaatatgattccatggcccgcgagtgacaggaaaaagtctgagtgtgctttcaaaaagaagagcaacgagactcagtgctttaactttattcgcgtgcttgttagctataatgtgactcacctatacacgtgtgggacctttgcgtttagtcccgcttgtacctttattgagttacaggatagctatctcctgcctatcagcgaagataaggtgatggagggcaaaggccagtccccttttgacccggcccacaagcatacagccgtcctggtcgacggaatgctatattctggtacgatgaataacttcttgggtagcgagcctatcctgatgagaacactgggctcccagcccgtgttgaaaacggacaactttctgagatggctgcaccatgacgcaagcttcgtcgcagctataccctcaacccaagtggtgtactttttcttcgaggagacagcttctgaattcgacttctttgaacggctgcacacttcccgggtcgctcgcgtgtgcaaaaatgacgtagggggtgaaaaactgctgcaaaagaaatggacaacgttcctgaaagcccagttactgtgcacacagccaggacagctgccattcaatgtgattcggcacgccgtgttgctgcccgctgatagccccactgccccccatatctatgccgtgttcacctcacagtggcaggtcggcggaacgagatcctctgcggtgtgcgccttttccttgctggatatcgagagagtattcaaaggtaagtataaggagttgaacaaagagaccagccgatggaccacataccgcgggcctgaaactaaccccagaccaggctcttgctctgtcgggcccagcagcgacaaagctttgactttcatgaaggaccacttcttgatggatgagcaggttgttggcacgcccttactcgtcaaatccggggtagagtatacgcgtcttgccgtagaaactgcccagggtttggatggccatagccacctggtgatgtatctggggaccaccaccggttctctgcataaggcagtggtgtctggtgactcctctgcccatctggtagaggagatacagttatttcctgacccagaaccggtcaggaacctccagctcgctcccactcaaggagccgtgttcgtgggtttctccggcggggtgtggagggtgccccgggctaattgttccgtgtacgaatcctgtgtggactgcgtgctggctcgagacccccactgcgcgtgggacccggagtctcgcacttgctgtctcctgtccgctccaaacttgaacagctggaaacaggacatggagagaggcaaccccgagtgggcctgcgctagcggaccgatgagtaggtcccttagaccgcaaagccggccgcagatcataaaggaggtgctggccgtgcccaattctatcctggagttaccttgtccgcatctttctgcccttgcgagctactattggtctcacggaccagccgctgtgcccgaagcctcctcaacagtctacaacgggtccttgctgcttatagtccaggatggagttggcgggttgtaccaatgttgggcaacggagaacggtttcagctacccagttatctcttactgggtggactcacaggatcagacgttggcgctcgatcccgagcttgccggcatcccacgcgagcacgtgaaagtcccattgacgcgcgtctcgggcggagcggcacttgcagcccagcagagctattggccacatttcgtcacagtcaccgttttatttgcactggtgctgagtggggccctgatcattctcgtggccagccctctacgtgctttacgtgcaaggggtaaggtccaggggtgtgagaccctgcggcccggagagaaagccccgcttagtcgagagcaacatctgcagtcgccgaaagagtgccgtacatcggccagtgatgtggatgcagacaacaactgtctaggcaccgaagtggcctag

SEQ ID NO: 298756 - DNA, 2286 bp, Artificial Sequence
  derived and/or modified sequence
atggccctgcccgcactgggcctcgatccttggagtctgctcgggctgttcctgttccagctccttcagctcctattgcccaccacaaccgccggaggcggaggacaggggccaatgcctcgcgtgcggtactatgcaggcgacgagaggcgtgccttaagtttttttcaccagaaagggcttcaagacttcgatacactgttactctcaggcgatggaaatacattgtacgtcggtgcacgcgaagccatcctcgcgttggacatccaggatccaggtgtgccaaggctgaaaaatatgatcccatggccagcctccgaccgaaaaaagtctgagtgtgcttttaaaaagaaatcgaacgaaacacagtgcttcaattttatcagggttttggtatcttacaacgtcacccatctgtatacctgcggcactttcgctttttcgcccgcttgcaccttcatcgaactgcaggacagctatctgcttcctatcagcgaagacaaagtgatggagggtaagggacagtccccttttgaccccgcacacaaacataccgctgtgcttgtcgatgggatgctgtattccggaaccatgaataatttcctgggatccgagccaattctgatgagaactctgggtagccagcccgtcctaaagaccgacaatttccttagatggctgcatcacgatgccagttttgtggcggcaatcccttcaacccaggtcgtttacttcttttttgaggaaacggcttcagaatttgactttttcgagcggctgcacacctcacgggtggcacgcgtctgtaagaacgatgtcgggggagaaaaacttttgcagaaaaaatggacaacatttctgaaggctcagctgctgtgtactcaacctggacaactgccttttaacgttattcgacatgccgttctccttcccgcagactcccccacagcacctcacatttacgctgttttcacgtcccaatggcaggttgggggtacccgctcctcggctgtgtgcgcgtttagcctgttggacattgagagagtcttcaaggggaaatataaggaactgaataaggaaacttctcgctggaccacatatcgtggcccagagactaatcccagacctgggtcatgttccgtgggtccaagtagcgacaaggccctcactttcatgaaagaccattttttgatggacgagcaagtcgtgggcacacccctgctggtcaagtctggcgtggagtatacgcggctcgcagtagagaccgctcagggtttggacggccactcacatctagtgatgtacttagggactacaacaggaagcctccacaaggctgtggtgtcaggagattcttctgcccacctggtggaagagattcagctgtttcctgatcccgagccagtgcggaacctgcagctcgcacctactcagggggcagttttcgtcggcttctcgggaggagtttggcgagtccctcgcgcaaactgctccgtttatgagagctgcgtggattgcgttttggccagggatcctcattgcgcttgggatccggagagcaggacttgctgcttacttagcgcgcctaaccttaactcgtggaagcaggacatggaaagaggaaaccctgaatgggcctgtgcctccgggcctatgagccgctccttaagaccccagtcccggccacagataatcaaggaagtgctggccgtgcccaacagcattctagagcttccctgccctcatctcagcgccttagccagctattactggagccacggaccggctgccgttccggaggcctcaagcacagtatataatgggtctcttttactgatcgtgcaggatggtgtcggcggactgtaccaatgttgggcaaccgagaacggattcagctacccagtgatctcgtactgggtggacagccaggaccagacactggctctcgacccagaacttgccggtattccgcgtgagcacgtaaaggtgcccctcactcgggtgtccgggggagctgctctggccgcacagcagagctattggccccacttcgtaaccgttacagtgctcttcgcactggtgctgtcaggcgctctgatcatcttggtagccagccctctccgcgctctccgtgctaggggcaaggtgcagggatgtgaaacgcttaggcctggggagaaggctcccctatctcgggagcagcatcttcagtcaccaaaagagtgtagaacttcagccagcgacgtggatgccgacaataactgccttggaacggaggtcgcctag

SEQ ID NO: 298757 - DNA, 2286 bp, Artificial Sequence
  derived and/or modified sequence
atggctctgcccgcattaggactggatccatggagcctgctgggcctatttctatttcaactcttgcaactgctgctgcctactaccaccgccggagggggaggccaaggcccaatgcccagagtaaggtactatgccggagatgagaggagagccttatcattttttcaccagaaagggctccaggattttgataccctgttgctgagcggggatggaaatacactttatgtcggggcacgggaagctattttagctctagacatccaggaccctggcgtgcccagactgaaaaacatgatcccctggccagcctctgacagaaaaaaaagtgaatgtgcgtttaaaaagaagagtaacgagacgcagtgtttcaactttatacgggtcttagtgtcctacaatgtgacccacctctacacatgtggaacattcgccttctctccagcctgcactttcattgaactccaggactcctacctgcttccaatttccgaggataaggtaatggaaggcaaggggcagtccccctttgatcccgctcataagcataccgcagtgttggttgacggcatgctgtacagcggtaccatgaataattttttaggcagtgaacctatattgatgcgcacactggggagtcagccagtgttgaagactgacaatttcctgaggtggttacaccacgacgcctcttttgtggctgctattccatcaacccaggtcgtgtactttttctttgaagagactgcatctgagttcgacttctttgagagactgcacacttctcgggtggccagggtatgcaagaacgatgtcggaggagagaaactgctgcaaaagaaatggacaacctttctcaaggcccagttgttatgcacccagcccggacagctcccctttaacgtcatccggcacgcggtgttgctgcctgctgactcccccaccgctccccatatctatgctgtgttcacttctcagtggcaggtgggcggaacaagaagctccgcagtgtgtgcattctcactgctggacattgagcgggtgttcaaaggcaaatacaaagagttgaataaggagaccagccggtggacgacatacaggggccctgagaccaaccccagacctggatcctgcagtgtgggtccgtcttcagataaggcgctgacatttatgaaagaccacttcctcatggatgagcaggtggtgggtaccccattgcttgtcaagtcgggagtggaatacactaggctcgcagtggagacagcccaggggctcgatgggcacagtcatctggtaatgtatctgggcacaacaactggcagtctacataaagctgtggtgagtggcgactcctccgcccacctggtagaggaaatccaactttttccagaccctgagcccgtaaggaacctgcagctcgcccctactcagggggcagtgttcgtaggtttcagcgggggtgtgtggagggtgccaagggccaattgcagcgtttacgagtcctgcgtggattgcgtgctggccagggacccccattgcgcctgggaccccgagtccagaacctgctgcctcttgtctgccccaaatctcaacagctggaaacaggacatggagcggggaaatcccgagtgggcatgcgcatcagggccaatgtctcgatcgcttagaccccaatcccgccctcagatcattaaggaggtgcttgccgtccccaactccattctcgagttgccatgtcctcacctatctgccctggccagttactactggtcccatggcccagcagccgtaccagaggcttcaagtaccgtatacaatgggtctttattgctcatcgtgcaggatggagtggggggactgtaccagtgttgggccacagagaatgggttcagctaccccgtgattagctactgggtcgactctcaggaccaaactctggcgctcgaccctgagctcgccggtatcccgcgagaacatgtgaaagtgccattgacgcgcgtaagcggaggagctgctttagcagcccagcagtcttactggcctcacttcgtgacagtcacggtgcttttcgcgctagtgctgtctggcgctctgatcatcctggtagcatctcctctcagagcgctccgcgcaagaggcaaggtacagggatgtgagacgctgaggccaggagagaaggctcccttgtctagagagcaacatctgcaatcacccaaagaatgccgcactagtgcttcagacgtcgacgccgataataactgtctaggcacagaggtcgcctag

SEQ ID NO: 298758 - DNA, 2172 bp, Artificial Sequence
  derived and/or modified sequence
atgccccgagtcaggtactacgctggcgatgaacgacgtgccctgagctttttccaccagaagggactgcaggactttgatactttgctattgagtggagacggcaacacactttatgtgggtgcgcgtgaggccatattggcactggacattcaggacccgggagtcccgaggttgaagaatatgatcccctggcccgcatcagatcggaagaaaagtgagtgcgccttcaaaaaaaaaagcaatgaaacgcagtgttttaacttcattagggttctggtcagctataatgtgacgcatttatacacatgcgggacattcgccttcagtccagcgtgcacgttcatcgagctgcaagactcctacttgctgccaatctccgaggacaaagtgatggaaggcaagggccaaagtccctttgaccccgctcacaaacatacagccgtgctggttgacggaatgctctatagcggaacaatgaacaatttcctggggtccgagccgattctgatgcgcaccctagggtctcagccagtgctaaagactgacaattttctgcgctggttacaccacgacgcaagttttgtcgcagcaatcccatctacccaagtggtatactttttcttcgaagaaaccgcctcggaatttgacttctttgagcgcctgcatactagcagggtcgccagagtctgtaagaacgacgtaggaggggaaaagctcctgcaaaaaaaatggacaaccttcttgaaggcccaactgctgtgcactcaacccggtcagttgccgttcaacgttatccgacatgccgtgctactcccggcagactcaccaaccgctccccacatctatgcggtgtttactagtcagtggcaggtcggaggcacgcgcagctcagccgtttgcgcattctccttgctagacatcgagcgagtgtttaagggcaaatacaaagagctgaataaggagacatcccgatggactacctacaggggaccagagacgaaccccaggcccggatcctgttctgtagggcctagtagcgacaaggctctcacttttatgaaggaccacttcctgatggacgagcaggtggtcggcacacctcttttagtcaagtcaggagtcgaatacacccggttggccgttgaaacagcacaggggctcgacggacacagtcacctcgtaatgtacttaggaaccactacgggttccctccacaaagcagtggtgagtggagattctagcgctcacctggtcgaggagatccagctgttccctgacccagagccagtgcgaaacctgcaattggctcccacacagggggctgtttttgtgggattcagcggaggggtgtggcgggtgccacgagctaattgcagcgtgtatgagtcttgcgttgactgcgttttagcaagggatccacactgtgcttgggaccctgagtctcgaacctgctgtctgctcagtgccccaaatctcaatagctggaaacaggacatggagagaggtaaccccgagtgggcgtgtgccagtggcccaatgagtagaagtttgaggcctcagagtcgaccacagattattaaagaagtgctcgctgtcccaaattccattctggagttaccctgtccacacttgtccgctctggcctcttattattggagccacggacctgctgccgtgccggaagcttcctcgacagtgtataatggtagcctactgctgatcgttcaggacggtgtgggagggctgtatcagtgttgggccacagaaaacggcttttcgtacccagtgatttcctactgggtcgactctcaggatcaaactctcgcattggacccggagctagccggtatccctagagagcacgtaaaggtgcccttgaccagagtctcagggggtgctgcccttgccgctcagcagtcttactggccacatttcgtgaccgtgacagtccttttcgctctcgtcctgagtggcgctttgattattctggtggcaagcccactaagggcattacgagcacgcggtaaggtgcaagggtgtgagaccctccgccctggcgaaaaagctcccctcagccgcgagcagcatctgcagtcaccaaaagaatgtcggaccagcgcatccgacgtcgacgccgacaacaattgcctgggaacagaggtggcctag

SEQ ID NO: 298759 - DNA, 2286 bp, Artificial Sequence
  derived and/or modified sequence
atggcactgcccgctctcggactggacccctggagcctcctaggactgtttttgttccaactattacagcttcttttgcccacaacaactgccggtgggggagggcagggcccaatgccccgtgtccgatactatgctggtgatgaacgccgtgccctgtccttcttccatcagaagggacttcaagattttgatacgctgttgctgtcgggggatggaaacaccctgtatgtgggcgcaagggaggccatccttgcccttgacatccaggatcctggtgtcccaaggctcaaaaatatgattccttggcctgctagcgaccggaagaaatctgaatgtgccttcaaaaagaaatcaaacgaaacgcaatgtttcaatttcattagggtactagtctcgtataatgttacccacctgtatacttgtggaactttcgcgttttccccggcttgcactttcatcgagttgcaggattcctatctgctgccaatttccgaggataaggtcatggaggggaaaggacaatccccttttgaccctgcacataaacataccgcagtccttgtggacggaatgctttactctggcaccatgaataacttcctggggtcagaaccaatactcatgagaactctgggaagccaacccgttttgaagaccgacaacttcctgcgctggctccaccacgatgcttcgttcgttgctgcgatcccctcaacacaagtggtatactttttctttgaggaaacggccagcgaattcgatttcttcgagcgcctgcacacctcacgggtagccagagtgtgtaaaaatgacgtgggcggagaaaagctgctgcagaaaaagtggacaacctttctaaaagcacagcttctgtgtacccaacccggtcaactccctttcaacgtgatcaggcacgcagtccttctccctgccgattcacccaccgcccctcacatctacgccgtctttactagtcagtggcaggtggggggtacacggtcaagcgccgtttgcgccttttctcttctggacatcgaacgtgtgttcaagggcaagtacaaggagctgaacaaagaaacctctagatggacaacctaccgcggtcctgaaaccaacccacggcctggctcttgtagtgtgggcccaagctcagataaggctctgacttttatgaaggatcacttcctaatggatgaacaagtcgtgggcactcctttgctagttaagtcaggggtcgagtacactagactggcggtcgagactgctcagggattggacggacactctcacctggtgatgtatctcggaaccacgactggcagcttgcataaagccgtggtctccggcgattcctcagcccacttggtggaggagatacagctatttcccgatcccgaaccagtccggaatctgcagcttgcacccactcagggagccgtgtttgtgggattcagcggcggtgtgtggcgagtcccacgcgctaattgcagcgtgtacgagagctgtgtggattgtgtgcttgcacgggacccacattgcgcctgggatcctgaatcaaggacatgttgtctgttatctgccccaaacttgaactcatggaagcaggacatggaaagaggtaatcctgaatgggcctgtgcttccgggcctatgtcccgaagcctcagaccacagagcagaccccagattataaaagaggtgctggccgtgcctaactctatattagaacttccatgtccacacctgtccgctttggcatcttactactggtcccatggaccagctgcggtgcctgaggcaagcagtacagtctataatgggtccctgcttctcatcgtgcaagatggcgtggggggattgtatcagtgctgggcgacggaaaatggctttagctacccagtgatttcatattgggttgacagtcaagatcagaccctggcgttagaccctgagttggccggaattccccgagagcacgtcaaagtgcccctcactagagtgtctggaggcgctgcgctggcagcccaacaatcttactggccccactttgtaactgtaactgtgctgtttgccctcgtgttaagcggggctctgattatactggtggcatcacctctgcgggctctgagagcccgaggcaaggtacagggctgtgagaccctgcggcctggcgagaaggcaccactgtcaagagagcagcatcttcagtcaccaaaagaatgccgtacctctgctagcgatgtggatgcagacaacaactgtctcgggactgaggtcgcttag

SEQ ID NO: 298760 - DNA, 966 bp, Artificial Sequence
  derived and/or modified sequence
atggctcttcccgcattgggactcgacccttggagcctgttagggctgttcctcttccagctgttacaactcttgcttcccacaaccacagccggagggggtggacagggccctatgcctcgtgtgagatattacgccggagatgaacgacgggctctgagtttcttccaccagaagggattgcaggacttcgataccctgctgctgtctggcgacggaaacaccctttatgtcggtgctcgcgaggcaatcctggcactggacattcaggaccctggcgtcccacggctaaagaatatgattccgtggcccgcatccgaccggaaaaagtcagaatgtgctttcaaaaagaagtctaatgagacacaatgcttcaacttcataagggtgctcgtatcttacaatgtcactcatctgtacacctgcggcaccttcgcattttcccctgcatgcaccttcatcgagttacaggattcttaccttttaccgatatctgaagataaagtgatggaaggaaaagggcaaagtcccttcgacccagcacacaagcatacagcagtgctggtggatggtatgctttatagtggaacaatgaacaattttcttgggtctgagcctattctcatgcggactctggggtctcaaccggtgcttaaaaccgacaacttcttgcggtggctgcatcacgatgccagctttgtggcagctatccccagcacacaagtggtctacttttttttcgaagaaacggccagtgagttcgacttcttcgagcggctgcatacaagccgggtcgcaagagtgtgcaaaaacgatgtcggcggtgaaaagctcctccagaaaaagtggacaacattcctcaaagctcagttgctgtgcactcagcctggccagctccccttcaacgtgattagacatgcggtgcttttacctgctgatagtcctactgccccacacatttattag

SEQ ID NO: 298761 - DNA, 711 bp, Artificial Sequence
  derived and/or modified sequence
atggccctgcctgccctgggcctcgatccctggtccctgcttggactgtttctgttccagctgctgcagctgctcctgccgacaactaccgcgggaggagggggacagggacctatgcctcgagtgcgatactacgccggtgacgagagaagagcacttagcttttttcaccagaagggcctccaagacttcgatactttactcctgtctggagatggcaacaccctgtacgttggcgctcgggaagctatcctggcgcttgatattcaggatcccggagtgcccaggctgaagaatatgattccatggcccgctagtgatcgcaaaaaatccgagtgcgctttcaagaagaaatcaaatgaggagcttcaagactcatatctactgccaatcagcgaagacaaagtcatggagggcaagggccagagcccctttgatcccgcacataaacacactgccgttctcgtcgatggaatgctgtatagcggtactatgaacaatttcctagggtcggagccaattttaatgcggaccctcggtagccagccagtgctcaagaccgacaatttcctgcgatggctgcatcacgatgcttctttcgttgccgcaatcccctcgacacaggtcgtctacttttttttcgaagagactgcaagtgaattcgattttttcgagcgcttacatacatcccgagtggctagagtgtgctag

SEQ ID NO: 298762 - DNA, 2172 bp, Artificial Sequence
  derived and/or modified sequence
atgcccagagtgagatattacgccggagatgaaagacgggctctgtccttctttcatcagaagggccttcaggactttgataccctgctactctccggcgatggcaacacactttatgtgggggctagagaagctatcctagccctggacattcaggacccaggcgtgccacgactgaagaacatgataccatggcctgcgtcagatcgcaaaaagtcggagtgtgcattcaagaaaaagtctaacgaaacgcagtgcttcaacttcattcgggtactagtaagctataacgtcacccacctgtatacatgcgggactttcgcctttagtccggcatgcactttcatagagctccaagacagctacttgcttccaatctcagaggataaggtgatggagggaaagggccaatctccattcgatcccgcacataaacacacagccgtgctcgttgacggtatgctctacagtggcaccatgaacaactttctcggatctgagcccatcctaatgcgcaccctggggtcgcagcccgtgctgaaaactgataactttctccgatggctgcaccacgatgccagctttgttgctgccatcccctccacccaggttgtctatttcttctttgaagaaaccgcgtccgagtttgattttttcgagcgacttcacaccagccgcgttgctagggtttgcaagaacgacgtaggcggagagaaactgctgcagaagaaatggaccacatttctgaaggctcagcttctctgcactcagccaggtcaattgccattcaacgtcatcagacacgctgtgcttctgcctgcagattcacctacagctcctcatatctacgctgtgttcacttcccagtggcaggtgggtggaactcggagctccgcggtctgcgcattttccttactcgatattgagagggtcttcaaaggaaaatataaggagctgaacaaagaaactagtcgatggacaacttaccggggaccggagaccaatcccaggcctggtagctgttctgtagggccatcaagcgacaaggctctgaccttcatgaaggatcactttctaatggacgaacaagtcgtcggaacaccactgctggttaaatctggagtggagtatactaggctcgccgttgagacagctcaggggctagacggtcacagtcacctggttatgtatctgggaactactaccggatccctgcacaaggccgttgtgtccggcgactcatccgcacaccttgtggaggaaattcagcttttccctgatcctgagcccgtgaggaatttgcagctggccccaactcaaggagccgttttcgtaggattcagtggtggcgtgtggcgagtgccccgagctaattgtagtgtgtatgagtcttgtgtggattgtgtcttagcccgtgacccacactgcgcatgggaccccgagtcacgaacctgttgtctgcttagtgcccctaacctgaacagttggaaacaggatatggaaaggggaaaccccgagtgggcctgcgcttctgggccaatgagtaggtctctccgtccacagtcaagaccacagattatcaaagaagttttggccgtgccaaattccatcctagagctgccctgcccacacctgtccgctttggcgagctactattggtctcacggccctgccgcagtgcctgaagcatctagtacagtgtacaatggatccctccttctgattgtccaagacggagtcgggggactctatcagtgttgggccactgagaatggcttcagctatcctgttatctcttattgggttgattcccaggatcaaacgctggccctggatccggagctggctggcatcccgcgagaacacgtgaaagtgcctctaacacgagttagtggaggggctgccctcgctgcccaacagtcttactggccccactttgtcacagtcactgtgttgttcgctctggtgttaagcggcgcactcatcattctcgtagcctcaccgctgcgggcactccgagcccgaggaaaggtgcaggggtgtgagaccctgagaccgggagagaaggctccactctctcgggagcaacacctccagtcccctaaagaatgtcgtacatcagccagcgacgtggatgccgataacaactgtctgggaaccgaggtcgcctag

SEQ ID NO: 298763 - DNA, 3137 bp, Artificial Sequence
  derived and/or modified sequence
gggctgaggcactgagagaccggaaagcctggcattccagagggagggaaacgcagcggcatccccaggctccagagctccctggtgacagtctgtggctgagcatggccctcccagccctgggcctggacccctggagcctcctgggccttttcctcttccaactgcttcagctgctgctgccgacgacgaccgcggggggaggcgggcaggggcccatgcccagggtcagatactatgcaggggatgaacgtagggcacttagcttcttccaccagaagggcctccaggattttgacactctgctcctgagtggtgatggaaatactctctacgtgggggctcgagaagccattctggccttggatatccaggatccaggggtccccaggctaaagaacatgataccgtggccagccagtgacagaaaaaagagtgaatgtgcctttaagaagaagagcaatgagacacagtgtttcaacttcatccgtgtcctggtttcttacaatgtcacccatctctacacctgcggcaccttcgccttcagccctgcttgtaccttcattgaacttcaagattcctacctgttgcccatctcggaggacaaggtcatggagggaaaaggccaaagcccctttgaccccgctcacaagcatacggctgtcttggtggatgggatgctctattctggtactatgaacaacttcctgggcagtgagcccatcctgatgcgcacactgggatcccagcctgtcctcaagaccgacaacttcctccgctggctgcatcatgacgcctcctttgtggcagccatcccttcgacccaggtcgtctacttcttcttcgaggagacagccagcgagtttgacttctttgagaggctccacacatcgcgggtggctagagtctgcaagaatgacgtgggcggcgaaaagctgctgcagaagaagtggaccaccttcctgaaggcccagctgctctgcacccagccggggcagctgcccttcaacgtcatccgccacgcggtcctgctccccgccgattctcccacagctccccacatctacgcagtcttcacctcccagtggcaggttggcgggaccaggagctctgcggtttgtgccttctctctcttggacattgaacgtgtctttaaggggaaatacaaagagttgaacaaagaaacttcacgctggactacttataggggccctgagaccaacccccggccaggcagttgctcagtgggcccctcctctgataaggccctgaccttcatgaaggaccatttcctgatggatgagcaagtggtggggacgcccctgctggtgaaatctggcgtggagtatacacggcttgcagtggagacagcccagggccttgatgggcacagccatcttgtcatgtacctgggaaccaccacagggtcgctccacaaggctgtggtaagtggggacagcagtgctcatctggtggaagagattcagctgttccctgaccctgaacctgttcgcaacctgcagctggcccccacccagggtgcagtgtttgtaggcttctcaggaggtgtctggagggtgccccgagccaactgtagtgtctatgagagctgtgtggactgtgtccttgcccgggacccccactgtgcctgggaccctgagtcccgaacctgttgcctcctgtctgcccccaacctgaactcctggaagcaggacatggagcgggggaacccagagtgggcatgtgccagtggccccatgagcaggagccttcggcctcagagccgcccgcaaatcattaaagaagtcctggctgtccccaactccatcctggagctcccctgcccccacctgtcagccttggcctcttattattggagtcatggcccagcagcagtcccagaagcctcttccactgtctacaatggctccctcttgctgatagtgcaggatggagttgggggtctctaccagtgctgggcaactgagaatggcttttcataccctgtgatctcctactgggtggacagccaggaccagaccctggccctggatcctgaactggcaggcatcccccgggagcatgtgaaggtcccgttgaccagggtcagtggtggggccgccctggctgcccagcagtcctactggccccactttgtcactgtcactgtcctctttgccttagtgctttcaggagccctcatcatcctcgtggcctccccattgagagcactccgggctcggggcaaggttcagggctgtgagaccctgcgccctggggagaaggccccgttaagcagagagcaacacctccagtctcccaaggaatgcaggacctctgccagtgatgtggacgctgacaacaactgcctaggcactgaggtagcttaaactctaggcacaggccggggctgcggtgcaggcacctggccatgctggctgggcggcccaagcacagccctgactaggatgacagcagcacaaaagaccacctttctcccctgagaggagcttctgctactctgcatcactgatgacactcagcagggtgatgcacagcagtctgcctcccctatgggactcccttctaccaagcacatgagctctctaacagggtgggggctacccccagacctgctcctacactgatattgaagaacctggagaggatccttcagttctggccattccagggaccctccagaaacacagtgtttcaagagaccctaaaaaacctgcctgtcccaggaccctatggtaatgaacaccaaacatctaaacaatcatatgctaacatgccactcctggaaactccactctgaagctgccgctttggacaccaacactcccttctcccagggtcatgcagggatctgctccctcctgcttcccttaccagtcgtgcaccgctgactcccaggaagtctttcctgaagtctgaccacctttcttcttgcttcagttggggcagactctgatcccttctgccctggcagaatggcaggggtaatctgagccttcttcactcctttaccctagctgaccccttcacctctccccctcccttttcctttgttttgggattcagaaaactgcttgtcagagactgtttattttttattaaaaatataaggctta

SEQ ID NO: 298764 - DNA, 3249 bp, Artificial Sequence
  derived and/or modified sequence
aggatgatgaaagtgagaccgtcttagggcccttccagatagggaaccttctctgccccaatgccccacccctgccaccaatacacacgcttctgctgcctggggctctcctattggtcctcggggggatgtggtaagaactgctcacccagaaagtgcccgggtgcctgtttccccagagctccctggtgacagtctgtggctgagcatggccctcccagccctgggcctggacccctggagcctcctgggccttttcctcttccaactgcttcagctgctgctgccgacgacgaccgcggggggaggcgggcaggggcccatgcccagggtcagatactatgcaggggatgaacgtagggcacttagcttcttccaccagaagggcctccaggattttgacactctgctcctgagtggtgatggaaatactctctacgtgggggctcgagaagccattctggccttggatatccaggatccaggggtccccaggctaaagaacatgataccgtggccagccagtgacagaaaaaagagtgaatgtgcctttaagaagaagagcaatgagacacagtgtttcaacttcatccgtgtcctggtttcttacaatgtcacccatctctacacctgcggcaccttcgccttcagccctgcttgtaccttcattgaacttcaagattcctacctgttgcccatctcggaggacaaggtcatggagggaaaaggccaaagcccctttgaccccgctcacaagcatacggctgtcttggtggatgggatgctctattctggtactatgaacaacttcctgggcagtgagcccatcctgatgcgcacactgggatcccagcctgtcctcaagaccgacaacttcctccgctggctgcatcatgacgcctcctttgtggcagccatcccttcgacccaggtcgtctacttcttcttcgaggagacagccagcgagtttgacttctttgagaggctccacacatcgcgggtggctagagtctgcaagaatgacgtgggcggcgaaaagctgctgcagaagaagtggaccaccttcctgaaggcccagctgctctgcacccagccggggcagctgcccttcaacgtcatccgccacgcggtcctgctccccgccgattctcccacagctccccacatctacgcagtcttcacctcccagtggcaggttggcgggaccaggagctctgcggtttgtgccttctctctcttggacattgaacgtgtctttaaggggaaatacaaagagttgaacaaagaaacttcacgctggactacttataggggccctgagaccaacccccggccaggcagttgctcagtgggcccctcctctgataaggccctgaccttcatgaaggaccatttcctgatggatgagcaagtggtggggacgcccctgctggtgaaatctggcgtggagtatacacggcttgcagtggagacagcccagggccttgatgggcacagccatcttgtcatgtacctgggaaccaccacagggtcgctccacaaggctgtggtaagtggggacagcagtgctcatctggtggaagagattcagctgttccctgaccctgaacctgttcgcaacctgcagctggcccccacccagggtgcagtgtttgtaggcttctcaggaggtgtctggagggtgccccgagccaactgtagtgtctatgagagctgtgtggactgtgtccttgcccgggacccccactgtgcctgggaccctgagtcccgaacctgttgcctcctgtctgcccccaacctgaactcctggaagcaggacatggagcgggggaacccagagtgggcatgtgccagtggccccatgagcaggagccttcggcctcagagccgcccgcaaatcattaaagaagtcctggctgtccccaactccatcctggagctcccctgcccccacctgtcagccttggcctcttattattggagtcatggcccagcagcagtcccagaagcctcttccactgtctacaatggctccctcttgctgatagtgcaggatggagttgggggtctctaccagtgctgggcaactgagaatggcttttcataccctgtgatctcctactgggtggacagccaggaccagaccctggccctggatcctgaactggcaggcatcccccgggagcatgtgaaggtcccgttgaccagggtcagtggtggggccgccctggctgcccagcagtcctactggccccactttgtcactgtcactgtcctctttgccttagtgctttcaggagccctcatcatcctcgtggcctccccattgagagcactccgggctcggggcaaggttcagggctgtgagaccctgcgccctggggagaaggccccgttaagcagagagcaacacctccagtctcccaaggaatgcaggacctctgccagtgatgtggacgctgacaacaactgcctaggcactgaggtagcttaaactctaggcacaggccggggctgcggtgcaggcacctggccatgctggctgggcggcccaagcacagccctgactaggatgacagcagcacaaaagaccacctttctcccctgagaggagcttctgctactctgcatcactgatgacactcagcagggtgatgcacagcagtctgcctcccctatgggactcccttctaccaagcacatgagctctctaacagggtgggggctacccccagacctgctcctacactgatattgaagaacctggagaggatccttcagttctggccattccagggaccctccagaaacacagtgtttcaagagaccctaaaaaacctgcctgtcccaggaccctatggtaatgaacaccaaacatctaaacaatcatatgctaacatgccactcctggaaactccactctgaagctgccgctttggacaccaacactcccttctcccagggtcatgcagggatctgctccctcctgcttcccttaccagtcgtgcaccgctgactcccaggaagtctttcctgaagtctgaccacctttcttcttgcttcagttggggcagactctgatcccttctgccctggcagaatggcaggggtaatctgagccttcttcactcctttaccctagctgaccccttcacctctccccctcccttttcctttgttttgggattcagaaaactgcttgtcagagactgtttattttttattaaaaatataaggcttatgtatgat

SEQ ID NO: 298765 - DNA, 3135 bp, Artificial Sequence
  derived and/or modified sequence
agtgctggctttggcatgatgggcacctggagggccgcactcccgttccagccaggctgagccttctgtcccctgcctctggggcctgggaaccccccttcttctttctcctgaatggcacccccgccctagaatccagacaccgagtttcccactgtggctggttcaagggtatgtgagagctccctggtgacagtctgtggctgagcatggcccatgcccagggtcagatactatgcaggggatgaacgtagggcacttagcttcttccaccagaagggcctccaggattttgacactctgctcctgagtggtgatggaaatactctctacgtgggggctcgagaagccattctggccttggatatccaggatccaggggtccccaggctaaagaacatgataccgtggccagccagtgacagaaaaaagagtgaatgtgcctttaagaagaagagcaatgagacacagtgtttcaacttcatccgtgtcctggtttcttacaatgtcacccatctctacacctgcggcaccttcgccttcagccctgcttgtaccttcattgaacttcaagattcctacctgttgcccatctcggaggacaaggtcatggagggaaaaggccaaagcccctttgaccccgctcacaagcatacggctgtcttggtggatgggatgctctattctggtactatgaacaacttcctgggcagtgagcccatcctgatgcgcacactgggatcccagcctgtcctcaagaccgacaacttcctccgctggctgcatcatgacgcctcctttgtggcagccatcccttcgacccaggtcgtctacttcttcttcgaggagacagccagcgagtttgacttctttgagaggctccacacatcgcgggtggctagagtctgcaagaatgacgtgggcggcgaaaagctgctgcagaagaagtggaccaccttcctgaaggcccagctgctctgcacccagccggggcagctgcccttcaacgtcatccgccacgcggtcctgctccccgccgattctcccacagctccccacatctacgcagtcttcacctcccagtggcaggttggcgggaccaggagctctgcggtttgtgccttctctctcttggacattgaacgtgtctttaaggggaaatacaaagagttgaacaaagaaacttcacgctggactacttataggggccctgagaccaacccccggccaggcagttgctcagtgggcccctcctctgataaggccctgaccttcatgaaggaccatttcctgatggatgagcaagtggtggggacgcccctgctggtgaaatctggcgtggagtatacacggcttgcagtggagacagcccagggccttgatgggcacagccatcttgtcatgtacctgggaaccaccacagggtcgctccacaaggctgtggtaagtggggacagcagtgctcatctggtggaagagattcagctgttccctgaccctgaacctgttcgcaacctgcagctggcccccacccagggtgcagtgtttgtaggcttctcaggaggtgtctggagggtgccccgagccaactgtagtgtctatgagagctgtgtggactgtgtccttgcccgggacccccactgtgcctgggaccctgagtcccgaacctgttgcctcctgtctgcccccaacctgaactcctggaagcaggacatggagcgggggaacccagagtgggcatgtgccagtggccccatgagcaggagccttcggcctcagagccgcccgcaaatcattaaagaagtcctggctgtccccaactccatcctggagctcccctgcccccacctgtcagccttggcctcttattattggagtcatggcccagcagcagtcccagaagcctcttccactgtctacaatggctccctcttgctgatagtgcaggatggagttgggggtctctaccagtgctgggcaactgagaatggcttttcataccctgtgatctcctactgggtggacagccaggaccagaccctggccctggatcctgaactggcaggcatcccccgggagcatgtgaaggtcccgttgaccagggtcagtggtggggccgccctggctgcccagcagtcctactggccccactttgtcactgtcactgtcctctttgccttagtgctttcaggagccctcatcatcctcgtggcctccccattgagagcactccgggctcggggcaaggttcagggctgtgagaccctgcgccctggggagaaggccccgttaagcagagagcaacacctccagtctcccaaggaatgcaggacctctgccagtgatgtggacgctgacaacaactgcctaggcactgaggtagcttaaactctaggcacaggccggggctgcggtgcaggcacctggccatgctggctgggcggcccaagcacagccctgactaggatgacagcagcacaaaagaccacctttctcccctgagaggagcttctgctactctgcatcactgatgacactcagcagggtgatgcacagcagtctgcctcccctatgggactcccttctaccaagcacatgagctctctaacagggtgggggctacccccagacctgctcctacactgatattgaagaacctggagaggatccttcagttctggccattccagggaccctccagaaacacagtgtttcaagagaccctaaaaaacctgcctgtcccaggaccctatggtaatgaacaccaaacatctaaacaatcatatgctaacatgccactcctggaaactccactctgaagctgccgctttggacaccaacactcccttctcccagggtcatgcagggatctgctccctcctgcttcccttaccagtcgtgcaccgctgactcccaggaagtctttcctgaagtctgaccacctttcttcttgcttcagttggggcagactctgatcccttctgccctggcagaatggcaggggtaatctgagccttcttcactcctttaccctagctgaccccttcacctctccccctcccttttcctttgttttgggattcagaaaactgcttgtcagagactgtttattttttattaaaaatataaggctta

SEQ ID NO: 298766 - DNA, 2981 bp, Artificial Sequence
  derived and/or modified sequence
agctcccagtgctggctttggcatgatgggcacctggagggccgcactcccgttccagccaggctgagccttctgtcccctgcctctggggcctgggaaccccccttcttctttctcctgaatggcacccccgccctagaatccagacaccgagtttcccactgtggctggttcaagggtatgtgaggggatgaacgtagggcacttagcttcttccaccagaagggcctccaggattttgacactctgctcctgagtggtgatggaaatactctctacgtgggggctcgagaagccattctggccttggatatccaggatccaggggtccccaggctaaagaacatgataccgtggccagccagtgacagaaaaaagagtgaatgtgcctttaagaagaagagcaatgaggaacttcaagattcctacctgttgcccatctcggaggacaaggtcatggagggaaaaggccaaagcccctttgaccccgctcacaagcatacggctgtcttggtggatgggatgctctattctggtactatgaacaacttcctgggcagtgagcccatcctgatgcgcacactgggatcccagcctgtcctcaagaccgacaacttcctccgctggctgcatcatgacgcctcctttgtggcagccatcccttcgacccaggtcgtctacttcttcttcgaggagacagccagcgagtttgacttctttgagaggctccacacatcgcgggtggctagagtctgcaagaatgacgtgggcggcgaaaagctgctgcagaagaagtggaccaccttcctgaaggcccagctgctctgcacccagccggggcagctgcccttcaacgtcatccgccacgcggtcctgctccccgccgattctcccacagctccccacatctacgcagtcttcacctcccagtggcaggttggcgggaccaggagctctgcggtttgtgccttctctctcttggacattgaacgtgtctttaaggggaaatacaaagagttgaacaaagaaacttcacgctggactacttataggggccctgagaccaacccccggccaggcagttgctcagtgggcccctcctctgataaggccctgaccttcatgaaggaccatttcctgatggatgagcaagtggtggggacgcccctgctggtgaaatctggcgtggagtatacacggcttgcagtggagacagcccagggccttgatgggcacagccatcttgtcatgtacctgggaaccaccacagggtcgctccacaaggctgtggtaagtggggacagcagtgctcatctggtggaagagattcagctgttccctgaccctgaacctgttcgcaacctgcagctggcccccacccagggtgcagtgtttgtaggcttctcaggaggtgtctggagggtgccccgagccaactgtagtgtctatgagagctgtgtggactgtgtccttgcccgggacccccactgtgcctgggaccctgagtcccgaacctgttgcctcctgtctgcccccaacctgaactcctggaagcaggacatggagcgggggaacccagagtgggcatgtgccagtggccccatgagcaggagccttcggcctcagagccgcccgcaaatcattaaagaagtcctggctgtccccaactccatcctggagctcccctgcccccacctgtcagccttggcctcttattattggagtcatggcccagcagcagtcccagaagcctcttccactgtctacaatggctccctcttgctgatagtgcaggatggagttgggggtctctaccagtgctgggcaactgagaatggcttttcataccctgtgatctcctactgggtggacagccaggaccagaccctggccctggatcctgaactggcaggcatcccccgggagcatgtgaaggtcccgttgaccagggtcagtggtggggccgccctggctgcccagcagtcctactggccccactttgtcactgtcactgtcctctttgccttagtgctttcaggagccctcatcatcctcgtggcctccccattgagagcactccgggctcggggcaaggttcagggctgtgagaccctgcgccctggggagaaggccccgttaagcagagagcaacacctccagtctcccaaggaatgcaggacctctgccagtgatgtggacgctgacaacaactgcctaggcactgaggtagcttaaactctaggcacaggccggggctgcggtgcaggcacctggccatgctggctgggcggcccaagcacagccctgactaggatgacagcagcacaaaagaccacctttctcccctgagaggagcttctgctactctgcatcactgatgacactcagcagggtgatgcacagcagtctgcctcccctatgggactcccttctaccaagcacatgagctctctaacagggtgggggctacccccagacctgctcctacactgatattgaagaacctggagaggatccttcagttctggccattccagggaccctccagaaacacagtgtttcaagagaccctaaaaaacctgcctgtcccaggaccctatggtaatgaacaccaaacatctaaacaatcatatgctaacatgccactcctggaaactccactctgaagctgccgctttggacaccaacactcccttctcccagggtcatgcagggatctgctccctcctgcttcccttaccagtcgtgcaccgctgactcccaggaagtctttcctgaagtctgaccacctttcttcttgcttcagttggggcagactctgatcccttctgccctggcagaatggcaggggtaatctgagccttcttcactcctttaccctagctgaccccttcacctctccccctcccttttcctttgttttgggattcagaaaactgcttgtcagagactgtttattttttattaaaaatataaggctt

SEQ ID NO: 298767 - DNA, 3300 bp, Artificial Sequence
  derived and/or modified sequence
ccaggatctgtcacaactcgagaggtggaaattccggtttccctggcctagagctcccagtgctggctttggcatgatgggcacctggagggccgcactcccgttccagccaggctgagccttctgtcccctgcctctggggcctgggaaccccccttcttctttctcctgaatggcacccccgccctagaatccagacaccgagtttcccactgtggctggttcaagggtatgtgagagctccctggtgacagtctgtggctgagcatggccctcccagccctgggcctggacccctggagcctcctgggccttttcctcttccaactgcttcagctgctgctgccgacgacgaccgcggggggaggcgggcaggggcccatgcccagggtcagatactatgcaggggatgaacgtagggcacttagcttcttccaccagaagggcctccaggattttgacactctgctcctgagtggtgatggaaatactctctacgtgggggctcgagaagccattctggccttggatatccaggatccaggggtccccaggctaaagaacatgataccgtggccagccagtgacagaaaaaagagtgaatgtgcctttaagaagaagagcaatgagacacagtgtttcaacttcatccgtgtcctggtttcttacaatgtcacccatctctacacctgcggcaccttcgccttcagccctgcttgtaccttcattgaacttcaagattcctacctgttgcccatctcggaggacaaggtcatggagggaaaaggccaaagcccctttgaccccgctcacaagcatacggctgtcttggtggatgggatgctctattctggtactatgaacaacttcctgggcagtgagcccatcctgatgcgcacactgggatcccagcctgtcctcaagaccgacaacttcctccgctggctgcatcatgacgcctcctttgtggcagccatcccttcgacccaggtcgtctacttcttcttcgaggagacagccagcgagtttgacttctttgagaggctccacacatcgcgggtggctagagtctgcaagaatgacgtgggcggcgaaaagctgctgcagaagaagtggaccaccttcctgaaggcccagctgctctgcacccagccggggcagctgcccttcaacgtcatccgccacgcggtcctgctccccgccgattctcccacagctccccacatctacgcagtcttcacctcccagtggcaggttggcgggaccaggagctctgcggtttgtgccttctctctcttggacattgaacgtgtctttaaggggaaatacaaagagttgaacaaagaaacttcacgctggactacttataggggccctgagaccaacccccggccaggcagttgctcagtgggcccctcctctgataaggccctgaccttcatgaaggaccatttcctgatggatgagcaagtggtggggacgcccctgctggtgaaatctggcgtggagtatacacggcttgcagtggagacagcccagggccttgatgggcacagccatcttgtcatgtacctgggaaccaccacagggtcgctccacaaggctgtggtaagtggggacagcagtgctcatctggtggaagagattcagctgttccctgaccctgaacctgttcgcaacctgcagctggcccccacccagggtgcagtgtttgtaggcttctcaggaggtgtctggagggtgccccgagccaactgtagtgtctatgagagctgtgtggactgtgtccttgcccgggacccccactgtgcctgggaccctgagtcccgaacctgttgcctcctgtctgcccccaacctgaactcctggaagcaggacatggagcgggggaacccagagtgggcatgtgccagtggccccatgagcaggagccttcggcctcagagccgcccgcaaatcattaaagaagtcctggctgtccccaactccatcctggagctcccctgcccccacctgtcagccttggcctcttattattggagtcatggcccagcagcagtcccagaagcctcttccactgtctacaatggctccctcttgctgatagtgcaggatggagttgggggtctctaccagtgctgggcaactgagaatggcttttcataccctgtgatctcctactgggtggacagccaggaccagaccctggccctggatcctgaactggcaggcatcccccgggagcatgtgaaggtcccgttgaccagggtcagtggtggggccgccctggctgcccagcagtcctactggccccactttgtcactgtcactgtcctctttgccttagtgctttcaggagccctcatcatcctcgtggcctccccattgagagcactccgggctcggggcaaggttcagggctgtgagaccctgcgccctggggagaaggccccgttaagcagagagcaacacctccagtctcccaaggaatgcaggacctctgccagtgatgtggacgctgacaacaactgcctaggcactgaggtagcttaaactctaggcacaggccggggctgcggtgcaggcacctggccatgctggctgggcggcccaagcacagccctgactaggatgacagcagcacaaaagaccacctttctcccctgagaggagcttctgctactctgcatcactgatgacactcagcagggtgatgcacagcagtctgcctcccctatgggactcccttctaccaagcacatgagctctctaacagggtgggggctacccccagacctgctcctacactgatattgaagaacctggagaggatccttcagttctggccattccagggaccctccagaaacacagtgtttcaagagaccctaaaaaacctgcctgtcccaggaccctatggtaatgaacaccaaacatctaaacaatcatatgctaacatgccactcctggaaactccactctgaagctgccgctttggacaccaacactcccttctcccagggtcatgcagggatctgctccctcctgcttcccttaccagtcgtgcaccgctgactcccaggaagtctttcctgaagtctgaccacctttcttcttgcttcagttggggcagactctgatcccttctgccctggcagaatggcaggggtaatctgagccttcttcactcctttaccctagctgaccccttcacctctccccctcccttttcctttgttttgggattcagaaaactgcttgtcagagactgtttattttttattaaaaatataaggctta

SEQ ID NO: 298768 - DNA, 3130 bp, Artificial Sequence
  derived and/or modified sequence
ggcatgatgggcacctggagggccgcactcccgttccagccaggctgagccttctgtcccctgcctctggggcctgggaaccccccttcttctttctcctgaatggcacccccgccctagaatccagacaccgagtttcccactgtggctggttcaagggtatgtgagagctccctggtgacagtctgtggctgagcatggccctcccagccctgggcctggacccctggagcctcctgggccttttcctcttccaactgcttcagctgctgctgccgacgacgaccgcggggggaggcgggcaggggcccatgcccagggtcagatactatgcaggggatgaacgtagggcacttagcttcttccaccagaagggcctccaggattttgacactctgctcctgagtggtgatggaaatactctctacgtgggggctcgagaagccattctggccttggatatccaggatccaggggtccccaggctaaagaacatgataccgtggccagccagtgacagaaaaaagagtgaatgtgcctttaagaagaagagcaatgaggaacttcaagattcctacctgttgcccatctcggaggacaaggtcatggagggaaaaggccaaagcccctttgaccccgctcacaagcatacggctgtcttggtggatgggatgctctattctggtactatgaacaacttcctgggcagtgagcccatcctgatgcgcacactgggatcccagcctgtcctcaagaccgacaacttcctccgctggctgcatcatgacgcctcctttgtggcagccatcccttcgacccaggtcgtctacttcttcttcgaggagacagccagcgagtttgacttctttgagaggctccacacatcgcgggtggctagagtctgcaagaatgacgtgggcggcgaaaagctgctgcagaagaagtggaccaccttcctgaaggcccagctgctctgcacccagccggggcagctgcccttcaacgtcatccgccacgcggtcctgctccccgccgattctcccacagctccccacatctacgcagtcttcacctcccagtggcaggttggcgggaccaggagctctgcggtttgtgccttctctctcttggacattgaacgtgtctttaaggggaaatacaaagagttgaacaaagaaacttcacgctggactacttataggggccctgagaccaacccccggccaggcagttgctcagtgggcccctcctctgataaggccctgaccttcatgaaggaccatttcctgatggatgagcaagtggtggggacgcccctgctggtgaaatctggcgtggagtatacacggcttgcagtggagacagcccagggccttgatgggcacagccatcttgtcatgtacctgggaaccaccacagggtcgctccacaaggctgtggtaagtggggacagcagtgctcatctggtggaagagattcagctgttccctgaccctgaacctgttcgcaacctgcagctggcccccacccagggtgcagtgtttgtaggcttctcaggaggtgtctggagggtgccccgagccaactgtagtgtctatgagagctgtgtggactgtgtccttgcccgggacccccactgtgcctgggaccctgagtcccgaacctgttgcctcctgtctgcccccaacctgaactcctggaagcaggacatggagcgggggaacccagagtgggcatgtgccagtggccccatgagcaggagccttcggcctcagagccgcccgcaaatcattaaagaagtcctggctgtccccaactccatcctggagctcccctgcccccacctgtcagccttggcctcttattattggagtcatggcccagcagcagtcccagaagcctcttccactgtctacaatggctccctcttgctgatagtgcaggatggagttgggggtctctaccagtgctgggcaactgagaatggcttttcataccctgtgatctcctactgggtggacagccaggaccagaccctggccctggatcctgaactggcaggcatcccccgggagcatgtgaaggtcccgttgaccagggtcagtggtggggccgccctggctgcccagcagtcctactggccccactttgtcactgtcactgtcctctttgccttagtgctttcaggagccctcatcatcctcgtggcctccccattgagagcactccgggctcggggcaaggttcagggctgtgagaccctgcgccctggggagaaggccccgttaagcagagagcaacacctccagtctcccaaggaatgcaggacctctgccagtgatgtggacgctgacaacaactgcctaggcactgaggtagcttaaactctaggcacaggccggggctgcggtgcaggcacctggccatgctggctgggcggcccaagcacagccctgactaggatgacagcagcacaaaagaccacctttctcccctgagaggagcttctgctactctgcatcactgatgacactcagcagggtgatgcacagcagtctgcctcccctatgggactcccttctaccaagcacatgagctctctaacagggtgggggctacccccagacctgctcctacactgatattgaagaacctggagaggatccttcagttctggccattccagggaccctccagaaacacagtgtttcaagagaccctaaaaaacctgcctgtcccaggaccctatggtaatgaacaccaaacatctaaacaatcatatgctaacatgccactcctggaaactccactctgaagctgccgctttggacaccaacactcccttctcccagggtcatgcagggatctgctccctcctgcttcccttaccagtcgtgcaccgctgactcccaggaagtctttcctgaagtctgaccacctttcttcttgcttcagttggggcagactctgatcccttctgccctggcagaatggcaggggtaatctgagccttcttcactcctttaccctagctgaccccttcacctctccccctcccttttcctttgttttgggattcagaaaactgcttgtcagagactgtttattttttattaaaaatataaggctt

SEQ ID NO: 298769 - DNA, 1057 bp, Artificial Sequence
  derived and/or modified sequence
gtccggtgcagactctgctggaagtcttggacgcctgggttagggtctccacttctgggctggggagctccctggtgacagtctgtggctgagcatggccctcccagccctgggcctggacccctggagcctcctgggccttttcctcttccaactgcttcagctgctgctgccgacgacgaccgcggggggaggcgggcaggggcccatgcccagggtcagatactatgcaggggatgaacgtagggcacttagcttcttccaccagaagggcctccaggattttgacactctgctcctgagtggtgatggaaatactctctacgtgggggctcgagaagccattctggccttggatatccaggatccaggggtccccaggctaaagaacatgataccgtggccagccagtgacagaaaaaagagtgaatgtgcctttaagaagaagagcaatgagacacagtgtttcaacttcatccgtgtcctggtttcttacaatgtcacccatctctacacctgcggcaccttcgccttcagccctgcttgtaccttcattgaacttcaagattcctacctgttgcccatctcggaggacaaggtcatggagggaaaaggccaaagcccctttgaccccgctcacaagcatacggctgtcttggtggatgggatgctctattctggtactatgaacaacttcctgggcagtgagcccatcctgatgcgcacactgggatcccagcctgtcctcaagaccgacaacttcctccgctggctgcatcatgacgcctcctttgtggcagccatcccttcgacccaggtcgtctacttcttcttcgaggagacagccagcgagtttgacttctttgagaggctccacacatcgcgggtggctagagtctgcaagaatgacgtgggcggcgaaaagctgctgcagaagaagtggaccaccttcctgaaggcccagctgctctgcacccagccggggcagctgcccttcaacgtcatccgccacgcggtcctgctccccgccgattctcccacagctccccacatctac

SEQ ID NO: 298770 - DNA, 897 bp, Artificial Sequence
  derived and/or modified sequence
gcacctggagggccgcactcccgttccagccaggctgagccttctgtcccctgcctctggggcctgggaaccccccttcttctttctcctgaatggcacccccgccctagaatccagacaccgagtttcccactgtggctggttcaagggtatgtgagagctccctggtgacagtctgtggctgagcatggccctcccagccctgggcctggacccctggagcctcctgggccttttcctcttccaactgcttcagctgctgctgccgacgacgaccgcggggggaggcgggcaggggcccatgcccagggtcagatactatgcaggggatgaacgtagggcacttagcttcttccaccagaagggcctccaggattttgacactctgctcctgagtggtgatggaaatactctctacgtgggggctcgagaagccattctggccttggatatccaggatccaggggtccccaggctaaagaacatgataccgtggccagccagtgacagaaaaaagagtgaatgtgcctttaagaagaagagcaatgaggaacttcaagattcctacctgttgcccatctcggaggacaaggtcatggagggaaaaggccaaagcccctttgaccccgctcacaagcatacggctgtcttggtggatgggatgctctattctggtactatgaacaacttcctgggcagtgagcccatcctgatgcgcacactgggatcccagcctgtcctcaagaccgacaacttcctccgctggctgcatcatgacgcctcctttgtggcagccatcccttcgacccaggtcgtctacttcttcttcgaggagacagccagcgagtttgacttctttgagaggctccacacatcgcgggtggctagagtctgcaa

SEQ ID NO: 298771 - DNA, 3135 bp, Artificial Sequence
  derived and/or modified sequence
agtgctggctttggcatgatgggcacctggagggccgcactcccgttccagccaggctgagccttctgtcccctgcctctggggcctgggaaccccccttcttctttctcctgaatggcacccccgccctagaatccagacaccgagtttcccactgtggctggttcaagggtatgtgagagctccctggtgacagtctgtggctgagcatgggcccatgcccagggtcagatactatgcaggggatgaacgtagggcacttagcttcttccaccagaagggcctccaggattttgacactctgctcctgagtggtgatggaaatactctctacgtgggggctcgagaagccattctggccttggatatccaggatccaggggtccccaggctaaagaacatgataccgtggccagccagtgacagaaaaaagagtgaatgtgcctttaagaagaagagcaatgagacacagtgtttcaacttcatccgtgtcctggtttcttacaatgtcacccatctctacacctgcggcaccttcgccttcagccctgcttgtaccttcattgaacttcaagattcctacctgttgcccatctcggaggacaaggtcatggagggaaaaggccaaagcccctttgaccccgctcacaagcatacggctgtcttggtggatgggatgctctattctggtactatgaacaacttcctgggcagtgagcccatcctgatgcgcacactgggatcccagcctgtcctcaagaccgacaacttcctccgctggctgcatcatgacgcctcctttgtggcagccatcccttcgacccaggtcgtctacttcttcttcgaggagacagccagcgagtttgacttctttgagaggctccacacatcgcgggtggctagagtctgcaagaatgacgtgggcggcgaaaagctgctgcagaagaagtggaccaccttcctgaaggcccagctgctctgcacccagccggggcagctgcccttcaacgtcatccgccacgcggtcctgctccccgccgattctcccacagctccccacatctacgcagtcttcacctcccagtggcaggttggcgggaccaggagctctgcggtttgtgccttctctctcttggacattgaacgtgtctttaaggggaaatacaaagagttgaacaaagaaacttcacgctggactacttataggggccctgagaccaacccccggccaggcagttgctcagtgggcccctcctctgataaggccctgaccttcatgaaggaccatttcctgatggatgagcaagtggtggggacgcccctgctggtgaaatctggcgtggagtatacacggcttgcagtggagacagcccagggccttgatgggcacagccatcttgtcatgtacctgggaaccaccacagggtcgctccacaaggctgtggtaagtggggacagcagtgctcatctggtggaagagattcagctgttccctgaccctgaacctgttcgcaacctgcagctggcccccacccagggtgcagtgtttgtaggcttctcaggaggtgtctggagggtgccccgagccaactgtagtgtctatgagagctgtgtggactgtgtccttgcccgggacccccactgtgcctgggaccctgagtcccgaacctgttgcctcctgtctgcccccaacctgaactcctggaagcaggacatggagcgggggaacccagagtgggcatgtgccagtggccccatgagcaggagccttcggcctcagagccgcccgcaaatcattaaagaagtcctggctgtccccaactccatcctggagctcccctgcccccacctgtcagccttggcctcttattattggagtcatggcccagcagcagtcccagaagcctcttccactgtctacaatggctccctcttgctgatagtgcaggatggagttgggggtctctaccagtgctgggcaactgagaatggcttttcataccctgtgatctcctactgggtggacagccaggaccagaccctggccctggatcctgaactggcaggcatcccccgggagcatgtgaaggtcccgttgaccagggtcagtggtggggccgccctggctgcccagcagtcctactggccccactttgtcactgtcactgtcctctttgccttagtgctttcaggagccctcatcatcctcgtggcctccccattgagagcactccgggctcggggcaaggttcagggctgtgagaccctgcgccctggggagaaggccccgttaagcagagagcaacacctccagtctcccaaggaatgcaggacctctgccagtgatgtggacgctgacaacaactgcctaggcactgaggtagcttaaactctaggcacaggccggggctgcggtgcaggcacctggccatgctggctgggcggcccaagcacagccctgactaggatgacagcagcacaaaagaccacctttctcccctgagaggagcttctgctactctgcatcactgatgacactcagcagggtgatgcacagcagtctgcctcccctatgggactcccttctaccaagcacatgagctctctaacagggtgggggctacccccagacctgctcctacactgatattgaagaacctggagaggatccttcagttctggccattccagggaccctccagaaacacagtgtttcaagagaccctaaaaaacctgcctgtcccaggaccctatggtaatgaacaccaaacatctaaacaatcatatgctaacatgccactcctggaaactccactctgaagctgccgctttggacaccaacactcccttctcccagggtcatgcagggatctgctccctcctgcttcccttaccagtcgtgcaccgctgactcccaggaagtctttcctgaagtctgaccacctttcttcttgcttcagttggggcagactctgatcccttctgccctggcagaatggcaggggtaatctgagccttcttcactcctttaccctagctgaccccttcacctctccccctcccttttcctttgttttgggattcagaaaactgcttgtcagagactgtttattttttattaaaaatataaggctt

SEQ ID NO: 298772 - DNA, 2286 bp, Artificial Sequence
  derived and/or modified sequence
atggccctgcccgccctgggcctggacccctggagcctgctgggcctgttcctgttccagctgctgcagctgctgctgcccaccaccaccgccggcggcggcggccagggccccatgcccagagtgagatactacgccggcgacgagagaagagccctgagcttcttccaccagaagggcctgcaggacttcgacaccctgctgctgagcggcgacggcaacaccctgtacgtgggcgccagagaggccatcctggccctggacatccaggaccccggcgtgcccagactgaagaacatgatcccctggcccgccagcgacagaaagaagagcgagtgcgccttcaagaagaagagcaacgagacccagtgcttcaacttcatcagagtgctggtgagctacaacgtgacccacctgtacacctgcggcaccttcgccttcagccccgcctgcaccttcatcgagctgcaggacagctacctgctgcccatcagcgaggacaaggtgatggagggcaagggccagagccccttcgaccccgcccacaagcacaccgccgtgctggtggacggcatgctgtacagcggcaccatgaacaacttcctgggcagcgagcccatcctgatgagaaccctgggcagccagcccgtgctgaagaccgacaacttcctgagatggctgcaccacgacgccagcttcgtggccgccatccccagcacccaggtggtgtacttcttcttcgaggagaccgccagcgagttcgacttcttcgagagactgcacaccagcagagtggccagagtgtgcaagaacgacgtgggcggcgagaagctgctgcagaagaagtggaccaccttcctgaaggcccagctgctgtgcacccagcccggccagctgcccttcaacgtgatcagacacgccgtgctgctgcccgccgacagccccaccgccccccacatctacgccgtgttcaccagccagtggcaggtgggcggcaccagaagcagcgccgtgtgcgccttcagcctgctggacatcgagagagtgttcaagggcaagtacaaggagctgaacaaggagaccagcagatggaccacctacagaggccccgagaccaaccccagacccggcagctgcagcgtgggccccagcagcgacaaggccctgaccttcatgaaggaccacttcctgatggacgagcaggtggtgggcacccccctgctggtgaagagcggcgtggagtacaccagactggccgtggagaccgcccagggcctggacggccacagccacctggtgatgtacctgggcaccaccaccggcagcctgcacaaggccgtggtgagcggcgacagcagcgcccacctggtggaggagatccagctgttccccgaccccgagcccgtgagaaacctgcagctggcccccacccagggcgccgtgttcgtgggcttcagcggcggcgtgtggagagtgcccagagccaactgcagcgtgtacgagagctgcgtggactgcgtgctggccagagacccccactgcgcctgggaccccgagagcagaacctgctgcctgctgagcgcccccaacctgaacagctggaagcaggacatggagagaggcaaccccgagtgggcctgcgccagcggccccatgagcagaagcctgagaccccagagcagaccccagatcatcaaggaggtgctggccgtgcccaacagcatcctggagctgccctgcccccacctgagcgccctggccagctactactggagccacggccccgccgccgtgcccgaggccagcagcaccgtgtacaacggcagcctgctgctgatcgtgcaggacggcgtgggcggcctgtaccagtgctgggccaccgagaacggcttcagctaccccgtgatcagctactgggtggacagccaggaccagaccctggccctggaccccgagctggccggcatccccagagagcacgtgaaggtgcccctgaccagagtgagcggcggcgccgccctggccgcccagcagagctactggccccacttcgtgaccgtgaccgtgctgttcgccctggtgctgagcggcgccctgatcatcctggtggccagccccctgagagccctgagagccagaggcaaggtgcagggctgcgagaccctgagacccggcgagaaggcccccctgagcagagagcagcacctgcagagccccaaggagtgcagaaccagcgccagcgacgtggacgccgacaacaactgcctgggcaccgaggtggcctag

SEQ ID NO: 298773 - DNA, 2172 bp, Artificial Sequence
  derived and/or modified sequence
atgcccagagtgagatactacgccggcgacgagagaagagccctgagcttcttccaccagaagggcctgcaggacttcgacaccctgctgctgagcggcgacggcaacaccctgtacgtgggcgccagagaggccatcctggccctggacatccaggaccccggcgtgcccagactgaagaacatgatcccctggcccgccagcgacagaaagaagagcgagtgcgccttcaagaagaagagcaacgagacccagtgcttcaacttcatcagagtgctggtgagctacaacgtgacccacctgtacacctgcggcaccttcgccttcagccccgcctgcaccttcatcgagctgcaggacagctacctgctgcccatcagcgaggacaaggtgatggagggcaagggccagagccccttcgaccccgcccacaagcacaccgccgtgctggtggacggcatgctgtacagcggcaccatgaacaacttcctgggcagcgagcccatcctgatgagaaccctgggcagccagcccgtgctgaagaccgacaacttcctgagatggctgcaccacgacgccagcttcgtggccgccatccccagcacccaggtggtgtacttcttcttcgaggagaccgccagcgagttcgacttcttcgagagactgcacaccagcagagtggccagagtgtgcaagaacgacgtgggcggcgagaagctgctgcagaagaagtggaccaccttcctgaaggcccagctgctgtgcacccagcccggccagctgcccttcaacgtgatcagacacgccgtgctgctgcccgccgacagccccaccgccccccacatctacgccgtgttcaccagccagtggcaggtgggcggcaccagaagcagcgccgtgtgcgccttcagcctgctggacatcgagagagtgttcaagggcaagtacaaggagctgaacaaggagaccagcagatggaccacctacagaggccccgagaccaaccccagacccggcagctgcagcgtgggccccagcagcgacaaggccctgaccttcatgaaggaccacttcctgatggacgagcaggtggtgggcacccccctgctggtgaagagcggcgtggagtacaccagactggccgtggagaccgcccagggcctggacggccacagccacctggtgatgtacctgggcaccaccaccggcagcctgcacaaggccgtggtgagcggcgacagcagcgcccacctggtggaggagatccagctgttccccgaccccgagcccgtgagaaacctgcagctggcccccacccagggcgccgtgttcgtgggcttcagcggcggcgtgtggagagtgcccagagccaactgcagcgtgtacgagagctgcgtggactgcgtgctggccagagacccccactgcgcctgggaccccgagagcagaacctgctgcctgctgagcgcccccaacctgaacagctggaagcaggacatggagagaggcaaccccgagtgggcctgcgccagcggccccatgagcagaagcctgagaccccagagcagaccccagatcatcaaggaggtgctggccgtgcccaacagcatcctggagctgccctgcccccacctgagcgccctggccagctactactggagccacggccccgccgccgtgcccgaggccagcagcaccgtgtacaacggcagcctgctgctgatcgtgcaggacggcgtgggcggcctgtaccagtgctgggccaccgagaacggcttcagctaccccgtgatcagctactgggtggacagccaggaccagaccctggccctggaccccgagctggccggcatccccagagagcacgtgaaggtgcccctgaccagagtgagcggcggcgccgccctggccgcccagcagagctactggccccacttcgtgaccgtgaccgtgctgttcgccctggtgctgagcggcgccctgatcatcctggtggccagccccctgagagccctgagagccagaggcaaggtgcagggctgcgagaccctgagacccggcgagaaggcccccctgagcagagagcagcacctgcagagccccaaggagtgcagaaccagcgccagcgacgtggacgccgacaacaactgcctgggcaccgaggtggcctag

SEQ ID NO: 298774 - DNA, 966 bp, Artificial Sequence
  derived and/or modified sequence
atggccctgcccgccctgggcctggacccctggagcctgctgggcctgttcctgttccagctgctgcagctgctgctgcccaccaccaccgccggcggcggcggccagggccccatgcccagagtgagatactacgccggcgacgagagaagagccctgagcttcttccaccagaagggcctgcaggacttcgacaccctgctgctgagcggcgacggcaacaccctgtacgtgggcgccagagaggccatcctggccctggacatccaggaccccggcgtgcccagactgaagaacatgatcccctggcccgccagcgacagaaagaagagcgagtgcgccttcaagaagaagagcaacgagacccagtgcttcaacttcatcagagtgctggtgagctacaacgtgacccacctgtacacctgcggcaccttcgccttcagccccgcctgcaccttcatcgagctgcaggacagctacctgctgcccatcagcgaggacaaggtgatggagggcaagggccagagccccttcgaccccgcccacaagcacaccgccgtgctggtggacggcatgctgtacagcggcaccatgaacaacttcctgggcagcgagcccatcctgatgagaaccctgggcagccagcccgtgctgaagaccgacaacttcctgagatggctgcaccacgacgccagcttcgtggccgccatccccagcacccaggtggtgtacttcttcttcgaggagaccgccagcgagttcgacttcttcgagagactgcacaccagcagagtggccagagtgtgcaagaacgacgtgggcggcgagaagctgctgcagaagaagtggaccaccttcctgaaggcccagctgctgtgcacccagcccggccagctgcccttcaacgtgatcagacacgccgtgctgctgcccgccgacagccccaccgccccccacatctactag

SEQ ID NO: 298775 - DNA, 711 bp, Artificial Sequence
  derived and/or modified sequence
atggccctgcccgccctgggcctggacccctggagcctgctgggcctgttcctgttccagctgctgcagctgctgctgcccaccaccaccgccggcggcggcggccagggccccatgcccagagtgagatactacgccggcgacgagagaagagccctgagcttcttccaccagaagggcctgcaggacttcgacaccctgctgctgagcggcgacggcaacaccctgtacgtgggcgccagagaggccatcctggccctggacatccaggaccccggcgtgcccagactgaagaacatgatcccctggcccgccagcgacagaaagaagagcgagtgcgccttcaagaagaagagcaacgaggagctgcaggacagctacctgctgcccatcagcgaggacaaggtgatggagggcaagggccagagccccttcgaccccgcccacaagcacaccgccgtgctggtggacggcatgctgtacagcggcaccatgaacaacttcctgggcagcgagcccatcctgatgagaaccctgggcagccagcccgtgctgaagaccgacaacttcctgagatggctgcaccacgacgccagcttcgtggccgccatccccagcacccaggtggtgtacttcttcttcgaggagaccgccagcgagttcgacttcttcgagagactgcacaccagcagagtggccagagtgtgctag

SEQ ID NO: 298776 - DNA, 663 bp, Artificial Sequence
  derived and/or modified sequence
atgataccgtggcccgccagcgatcggaaaaagagcgaatgtgcatttaagaagaaaagcaacgaaacccaatgtttcaatttcataagggtcctggtgtcatacaacgttacacacctgtacacatgcgggacttttgcctttagccccgcatgtacatttatcgaattgcaggatagctatcttctgccgatttcagaagacaaagtaatggagggaaaggggcagtcccccttcgatccagcccacaagcacactgcagtccttgtagacgggatgttgtactcaggtacgatgaataattttctgggttcagagcctattctcatgcgaactcttggcagccagccggtcctcaagactgacaatttcttgagatggctgcaccatgacgcaagctttgtcgccgctattcccagcacgcaggtcgtctattttttcttcgaagagacggccagtgagttcgacttctttgaacggttacatacatccagggttgcgcgggtctgcaaaaatgacgtggggggcgaaaaactactgcagaaaaaatggactacattcctcaaggctcagctgctgtgcacacagcccggccagctcccttttaatgtgatccgacacgccgtcttattgcccgccgactcacctacggctcctcattag

SEQ ID NO: 298777 - DNA, 663 bp, Artificial Sequence
  derived and/or modified sequence
atgatcccctggccagccagtgacaggaagaagtcagaatgtgccttcaagaagaagagcaatgagacccagtgcttcaacttcatccgggtgctggtgtcctacaacgtgacccacctgtacacctgtggcacctttgccttcagccctgcctgcaccttcatcgagctgcaggacagctacctgctgcccatcagcgaggacaaggtgatggagggcaagggccagagcccctttgatcctgcccacaagcacacagctgtgctggtggatggcatgctgtacagcggcaccatgaacaacttcctgggcagcgagcccatcctgatgaggaccctgggcagccagcctgtgctgaagacagacaacttcctgcgctggctgcaccatgatgccagctttgtggccgccatccccagcacccaggtggtgtacttcttctttgaggagacagccagcgagtttgacttctttgagcggctgcacaccagccgggtggcccgggtgtgcaagaatgatgtgggcggggagaagctgctgcagaagaagtggaccaccttcctgaaggcccagctgctgtgcacccagcccggccagctgcccttcaacgtcatcagacatgctgtgctgctgcctgctgacagccccacagccccccactag

SEQ ID NO: 298778 - DNA, 663 bp, Artificial Sequence
  derived and/or modified sequence
atgatcccctggcccgccagcgaccggaagaagagcgagtgcgccttcaagaagaagagtaatgaaacccagtgctttaacttcatcagagtgttggtatcttacaatgtgacccacctgtatacctgcgggacctttgccttttctcctgcctgcaccttcattgaacttcaggactcatacctgctgcccattagcgaggataaagtgatggagggaaaggggcagtcaccttttgaccctgcccacaagcacaccgctgtcctggttgatggcatgctgtattccgggactatgaataacttcttgggaagcgaacccatcctgatgcgcaccctgggctcccaacctgtccttaagacagataactttctcaggtggctccaccacgatgcctcttttgtggcagccataccatcaacgcaggtggtatatttcttctttgaggaaactgcctcagaatttgacttctttgagcgtctgcacacgagccgcgtcgctcgagtgtgcaagaatgatgtggggggcgagaaattattgcagaagaaatggacaactttcctcaaagcccagttgctgtgcacgcagcccggccagctccccttcaatgtgattagacacgccgtgttgttaccagccgactctcctactgctccccattag

SEQ ID NO: 298779 - DNA, 663 bp, Artificial Sequence
  derived and/or modified sequence
atgattccttggcctgcttccgatcgcaagaagtccgagtgcgctttcaaaaagaaaagtaacgaaacccagtgcttcaattttataagggtgctggtgtcctacaacgtgacgcatctttacacctgcggcacctttgctttttcccccgcatgtacatttatcgagctgcaggattcctatcttttgcccatcagcgaagataaagtaatggagggaaaagggcaatctccatttgaccccgctcataagcacaccgccgtactggttgatggaatgttgtattctggcaccatgaacaactttttgggcagcgaacctattttgatgcggacgctggggtctcaaccagtgttgaaaaccgataattttctgagatggctccaccatgatgctagcttcgtcgcagcaataccatccacccaagtagtttatttcttctttgaggaaacagctagcgagttcgactttttcgaacgcctccatacatccagagtggctcgggtgtgcaagaatgacgtaggtggggagaaactgttacagaagaagtggacaacatttctgaaggcccagcttctctgcacccagcctggccagctcccctttaatgtcatccggcacgctgtgttattaccggcagactctcctactgctcctcactag

SEQ ID NO: 298780 - DNA, 663 bp, Artificial Sequence
  derived and/or modified sequence
atgatcccctggcccgccagcgacagaaagaagagcgagtgcgccttcaagaagaagagcaacgagacccagtgcttcaacttcatcagagtgctggtgagctacaacgtgacccacctgtacacctgcggcaccttcgccttcagccccgcctgcaccttcatcgagctgcaggacagctacctgctgcccatcagcgaggacaaggtgatggagggcaagggccagagccccttcgaccccgcccacaagcacaccgccgtgctggtggacggcatgctgtacagcggcaccatgaacaacttcctgggcagcgagcccatcctgatgagaaccctgggcagccagcccgtgctgaagaccgacaacttcctgagatggctgcaccacgacgccagcttcgtggccgccatccccagcacccaggtggtgtacttcttcttcgaggagaccgccagcgagttcgacttcttcgagagactgcacaccagcagagtggccagagtgtgcaagaacgacgtgggcggcgagaagctgctgcagaagaagtggaccaccttcctgaaggcccagctgctgtgcacccagcccggccagctgcccttcaacgtgatcagacacgccgtgctgctgcccgccgacagccccaccgccccccactag

SEQ ID NO: 298781 - protein, 257 aa, Artificial Sequence
  derived and/or modified sequence
MSGSRQAGSGSAGTSPGSSAASSVTSASSSLSSSPSPPSVAVSAAALVSGGVAQAAGSGGLGGPVRPVLVAPAVSGSGGGAVSTGLSRHSCAARPSAGVGGSSSSLGSGSRKRPLLAPLCNGLINSYEDKSNDFVCPICFDMIEEAYMTKCGHSFCYKCIHQSLEDNNRCPKCNYVVDNIDHLYPNFLVNELILKQKQRFEEKRFKLDHSVSSTNGHRWQIFQDWLGTDQDNLDLANVNLMLELLVQKNKKKKKKKK

SEQ ID NO: 298782 - protein, 137 aa, Artificial Sequence
  derived and/or modified sequence
MNKLSGGGGRRTRVEGGQLGGEEWTRHGSFVNKPTRGWLHPNDKVMGPGVSYLVRYMGCVEVLQSMRALDFNTRTQVTREAISLVCEAVPGAKGATRRRKPCSRPLSSILGRSNLKFAGMPITLTVSTSSLNLMAAD

SEQ ID NO: 298783 - protein, 200 aa, Artificial Sequence
  derived and/or modified sequence
MNKLSGGGGRRTRVEGGQLGGEEWTRHGSFVNKPTRGWLHPNDKVMGPGVSYLVRYMGCVEVLQSMRALDFNTRTQVTREAISLVCEAVPGAKGATRRRKPCSRPLSSILGRSNLKFAGMPITLTVSTSSLNLMAADCKQDTAEYVAYVAKDPVNQRACHILECPEGLAQDVISTIGQAFELRFKQYLRNPPKLVTPHDR

SEQ ID NO: 298784 - DNA, 780 bp, Artificial Sequence
  derived and/or modified sequence
ggttagtgaggccggaagtgagtgtaataaagtttctccagggaggcagggcccggggagaaagttggagcggtaacctaagctggcagtggcgtgatccggcaccaaatcggcccgcggtgcggtgcggagactccatgaggccctgacggagtttcgctcttatcgtccaggctggagtgcaatggtgcgatctcggctcactgcaacctccgcctcctgagttcaagtgattctcctgcctcagcctcctgagtagctgggattacaggcgcccaccaccacgcccggctaatttttgtatttttagtagagacggggtttccccatgttggctaggctagcctcgaactcctgacctcaggacatgaacaagctgagtggaggcggcgggcgcaggactcgggtggaagggggccagcttgggggcgaggagtggacccgccacgggagctttgtcaataagcccacgcggggctggctgcatcccaacgacaaagtcatgggacccggggtttcctacttggttcggtacatgggttgtgtggaggtcctccagtcaatgcgtgccctggacttcaacacccggactcaggtcaccagggaggccatcagtctggtgtgtgaggctgtgccgggtgctaagggggcgacaaggaggagaaagccctgtagccgcccgctcagctctatcctggggaggagtaacctgaaatttgctggaatgccaatcactctcaccgtctccaccagcagcctcaacctcatggccgcagactg

SEQ ID NO: 298785 - protein, 200 aa, Artificial Sequence
  derived and/or modified sequence
MPITLTVSTSSLNLMAADCKQDTAEYVAYVAKDPVNQRACHILECPEGLAQDVISTIGQAFELRFKQYLRNPPKLVTPHDRMAGFDGSAWDEEEEEPPDHQYYNDFPGKEPPLGGVVDMRLREGAAPGAARPTAPNAQTPSHLGATLPVGQPVGGDPEVRKQMPPPPPCPAGRELFDDPSYVNVQNLDKARQAVGGAGPP

SEQ ID NO: 298786 - DNA, 414 bp, Artificial Sequence
  derived and/or modified sequence
atgaacaagctgagcggcggcggcggcagaagaaccagagtggagggcggccagctgggcggcgaggagtggaccagacacggcagcttcgtgaacaagcccaccagaggctggctgcaccccaacgacaaggtgatgggccccggcgtgagctacctggtgagatacatgggctgcgtggaggtgctgcagagcatgagagccctggacttcaacaccagaacccaggtgaccagagaggccatcagcctggtgtgcgaggccgtgcccggcgccaagggcgccaccagaagaagaaagccctgcagcagacccctgagcagcatcctgggcagaagcaacctgaagttcgccggcatgcccatcaccctgaccgtgagcaccagcagcctgaacctgatggccgccgactag

SEQ ID NO: 298787 - DNA, 603 bp, Artificial Sequence
  derived and/or modified sequence
atgaacaagctgagcggcggcggcggcagaagaaccagagtggagggcggccagctgggcggcgaggagtggaccagacacggcagcttcgtgaacaagcccaccagaggctggctgcaccccaacgacaaggtgatgggccccggcgtgagctacctggtgagatacatgggctgcgtggaggtgctgcagagcatgagagccctggacttcaacaccagaacccaggtgaccagagaggccatcagcctggtgtgcgaggccgtgcccggcgccaagggcgccaccagaagaagaaagccctgcagcagacccctgagcagcatcctgggcagaagcaacctgaagttcgccggcatgcccatcaccctgaccgtgagcaccagcagcctgaacctgatggccgccgactgcaagcaggacaccgccgagtacgtggcctacgtggccaaggaccccgtgaaccagagagcctgccacatcctggagtgccccgagggcctggcccaggacgtgatcagcaccatcggccaggccttcgagctgagattcaagcagtacctgagaaacccccccaagctggtgaccccccacgacagatag

SEQ ID NO: 298788 - DNA, 603 bp, Artificial Sequence
  derived and/or modified sequence
atgcccatcaccctgaccgtgagcaccagcagcctgaacctgatggccgccgactgcaagcaggacaccgccgagtacgtggcctacgtggccaaggaccccgtgaaccagagagcctgccacatcctggagtgccccgagggcctggcccaggacgtgatcagcaccatcggccaggccttcgagctgagattcaagcagtacctgagaaacccccccaagctggtgaccccccacgacagaatggccggcttcgacggcagcgcctgggacgaggaggaggaggagccccccgaccaccagtactacaacgacttccccggcaaggagccccccctgggcggcgtggtggacatgagactgagagagggcgccgcccccggcgccgccagacccaccgcccccaacgcccagacccccagccacctgggcgccaccctgcccgtgggccagcccgtgggcggcgaccccgaggtgagaaagcagatgccccccccccccccctgccccgccggcagagagctgttcgacgaccccagctacgtgaacgtgcagaacctggacaaggccagacaggccgtgggcggcgccggccccccctag

SEQ ID NO: 298789 - DNA, 414 bp, Artificial Sequence
  derived and/or modified sequence
atgaataagctctccgggggaggaggccgccgaacacgggtcgaaggcggtcagttaggcggagaagaatggactcgacacgggtctttcgttaacaagccaacgcggggatggctgcacccaaacgacaaagtgatgggccccggagtatcatatctggtgaggtacatgggatgcgtcgaggtgctccagagcatgagggctttagattttaacacccggacgcaggtgaccagagaagctataagtctggtctgtgaagccgttcctggagcaaagggagcaacacgacggcgaaaaccttgttctagaccactgtctagcattctcggtcgcagcaatctgaagtttgcaggcatgcccatcacactgacagtgtctacaagctctctgaatcttatggctgcggactag

SEQ ID NO: 298790 - DNA, 603 bp, Artificial Sequence
  derived and/or modified sequence
atgaacaagctctcaggcggggggggaaggcggactagggtggagggcggtcaactagggggcgaagaatggactagacacgggagcttcgttaacaagcccaccagaggatggctgcatcctaacgacaaagtgatgggacctggtgtgagttacctggtccgctacatgggctgtgtagaagtcctgcagtccatgcgagcactcgatttcaacactaggacccaagtgacccgggaagccatcagtctggtatgcgaagcagtacccggtgccaagggcgctactagacgtagaaaaccttgctctaggcccctatctagcatcctgggaaggagcaacctaaagtttgctggcatgcccatcactctgaccgtttctacatcctccctgaatttgatggccgcggattgcaagcaggatacagccgagtacgtggcatatgtggcgaaggatcctgtcaatcagagagcatgccacatacttgaatgtccagagggcctcgcccaggacgttatatctactattgggcaggcctttgagttgcgctttaagcaatatctaagaaacccccctaaactcgtgacgccccatgatcgctag

SEQ ID NO: 298791 - DNA, 603 bp, Artificial Sequence
  derived and/or modified sequence
atgcccattacattgacagtgtccacttcttcccttaaccttatggcggccgattgcaagcaggacacggcggaatatgttgcctatgtagccaaagacccagtgaaccagcgagcctgtcacatccttgaatgccccgagggactggcgcaggatgttatcagcaccatcgggcaggcattcgaactgcgctttaagcaatatctgcgtaaccctccaaaactggttaccccccacgaccgcatggcaggatttgatggaagcgcatgggatgaggaggaggaagaaccaccagatcaccagtactacaacgacttcccaggaaaagagcctcccctcgggggcgtagttgatatgcgattaagggaaggtgcggctccaggggctgctcggcccacagcacccaatgcccagaccccgtctcatctgggggcaacactccctgtggggcagccagtagggggggaccctgaggtgcggaaacagatgccacctcccccaccatgtcccgccggtcgtgaattgttcgacgacccttcttatgtgaacgtacaaaatttagacaaagcccggcaggccgtgggaggtgctggtcctccctag

SEQ ID NO: 298792 - DNA, 414 bp, Artificial Sequence
  derived and/or modified sequence
atgaacaagctgagcggcggcggcggccgccgcaccagggtggagggcggccagctgggcggggaggagtggaccaggcatggcagctttgtgaacaagcccacccggggctggctgcaccccaatgacaaggtgatgggccctggggtgtcctacctggtgcgctacatgggctgtgtggaggtgctgcagagcatgagggccctggacttcaacaccaggacccaggtgacccgggaggccatcagcctggtgtgtgaggccgtgcctggggccaagggggccaccaggaggaggaagccctgcagccggcccctgagcagcatcctgggccgcagcaacctgaagtttgctggcatgcccatcaccctgactgtgtccaccagcagcctgaacctgatggctgctgactag

SEQ ID NO: 298793 - DNA, 603 bp, Artificial Sequence
  derived and/or modified sequence
atgaacaagctgagcggcggcggcggccgccgcaccagggtggagggcggccagctgggcggggaggagtggaccaggcatggcagctttgtgaacaagcccacccggggctggctgcaccccaatgacaaggtgatgggccctggggtgtcctacctggtgcgctacatgggctgtgtggaggtgctgcagagcatgagggccctggacttcaacaccaggacccaggtgacccgggaggccatcagcctggtgtgtgaggccgtgcctggggccaagggggccaccaggaggaggaagccctgcagccggcccctgagcagcatcctgggccgcagcaacctgaagtttgctggcatgcccatcaccctgactgtgtccaccagcagcctgaacctgatggctgctgactgcaagcaggacacagcagaatatgtggcctacgtggccaaggaccctgtgaaccagagggcctgccacatcctggagtgcccagagggcctggcccaggatgtgatcagcaccatcggccaggcctttgagctgcgcttcaagcagtacctgagaaatccacccaagctggtgacccctcatgacagatag

SEQ ID NO: 298794 - DNA, 603 bp, Artificial Sequence
  derived and/or modified sequence
atgcccatcaccctgactgtgtccaccagcagcctgaacctgatggctgctgactgcaagcaggacacagcagaatatgtggcctacgtggccaaggaccctgtgaaccagagggcctgccacatcctggagtgcccagagggcctggcccaggacgtcatcagcaccatcggccaggcctttgagctgcgcttcaagcagtacctgaggaacccccccaagctggtgacccctcatgacaggatggccggctttgatggcagcgcctgggatgaggaggaggaggagcccccagaccaccagtactacaatgacttccctgggaaggagccccccctgggcggcgtggtggacatgaggctgcgggagggcgccgcccctggagctgcccggcccacagccccaaatgcccagacccccagccacctgggcgccaccctgcctgtgggccagcctgtgggcggggaccctgaggtgaggaagcagatgcctcctcctccaccctgcccagctggccgggagctgtttgatgaccccagctatgtgaatgtgcagaacctggacaaggcccggcaggccgtgggcggggccggccccccatag

SEQ ID NO: 298795 - DNA, 414 bp, Artificial Sequence
  derived and/or modified sequence
atgaacaagctgagcggcggcggcggccggcggacccgggtggagggcgggcaactcggaggtgaagaatggacgagacacggctcttttgttaataaacctacgcgagggtggcttcacccaaacgacaaagtaatggggcccggcgtcagttatctggttagatatatgggctgtgtcgaagtgctccagtctatgcgtgccctggatttcaacactcggacacaggtgacgcgagaagctataagcctggtctgcgaagccgtgccaggggccaaaggtgccacaaggcgtcgcaaaccatgttccagacccctaagtagcattctgggtagatcgaatctgaagttcgcaggaatgcccatcaccctaactgtcagcaccagttctctgaacctaatggccgcggactag

SEQ ID NO: 298796 - DNA, 603 bp, Artificial Sequence
  derived and/or modified sequence
atgaacaagctgagcggcggcggcggccggcggacccgggtggagggaggccaactgggcggggaagagtggacacgtcatggctcttttgtaaataagcccacaagggggtggctgcacccaaacgataaggtgatgggcccaggggtctcttatctggtgcgatacatgggctgtgtggaggtattacaaagtatgcgcgcactggatttcaacacgcggactcaggtaacgcgcgaagccatcagtctggtctgcgaggccgtgcctggtgccaagggtgcaaccaggaggcgtaagccatgctcgcggcctctctcctctattttgggccggagtaatctgaaattcgccggcatgcccattacactgaccgtatccacaagctcccttaacctgatggccgcggactgcaagcaagatacagctgaatacgttgcttatgtcgcaaaggatccggtaaaccagagagcctgtcacatcttggaatgtcccgaaggtctcgctcaggacgtcatctccactattggccaagcttttgaactgcggtttaagcagtacctgcgcaacccacccaaactcgtcactccccacgacagatag

SEQ ID NO: 298797 - DNA, 603 bp, Artificial Sequence
  derived and/or modified sequence
atgcccatcaccctgaccgtgagcaccagcagcctgaacctgatggcagctgattgtaagcaggatacggctgagtacgttgcctatgtggccaaggatccggtcaatcagagggcctgtcacatactggagtgtcctgaaggacttgcacaagatgtgatctctacaatcggacaggcctttgaactgcgtttcaaacagtatctgagaaatccacccaaactggttactccgcacgaccgaatggccggcttcgatggatccgcttgggatgaagaggaggaagagccccctgatcatcaatactataacgatttccctggtaaggagcccccccttggtggtgtggtagacatgaggttacgtgagggagccgctccgggtgcagctcggcctaccgctccgaacgcacagacgccctcccatcttggagctactctgcccgtgggacaacccgtgggaggagacccagaggtacggaagcagatgcccccgccaccaccatgccccgcaggcagagagttgtttgacgaccccagttatgtgaacgttcagaacctggacaaggcacgccaagccgttggcggcgctgggcccccgtag

SEQ ID NO: 298798 - DNA, 414 bp, Artificial Sequence
  derived and/or modified sequence
atgaacaagctgtctggtgggggtggacggcgaaccagggtggagggtggacagctagggggagaagagtggacaaggcacgggtctttcgttaataaaccaacacgtggctggttacatcccaatgacaaggtaatggggccaggcgtgtcatatctggttagatacatggggtgcgttgaggtgctccagagtatgagggctctcgacttcaatacccggacacaggtgactcgcgaggccatttctttggtctgtgaagccgttccgggagccaaaggcgctacaagacggaggaagccttgcagccggcctctgtcctctattctgggcagatcgaaccttaagttcgccggtatgcctataacactgaccgtcagtacaagctccctgaatctgatggcggcagactag

SEQ ID NO: 298799 - DNA, 603 bp, Artificial Sequence
  derived and/or modified sequence
atgaacaagctctctggtggcggtggacgaaggactcgggtcgaggggggacagctgggaggagaggagtggacaagacatggatcctttgtgaacaagcccactaggggctggctgcaccccaacgacaaagtcatgggccctggcgtgtcttatctggtcagatacatgggctgcgtggaggttcttcagtctatgcgtgctctggattttaacacaaggactcaggtgacccgtgaagcgatctctttggtgtgcgaggccgtgcccggagctaagggagcaacacgccgtcgtaagccttgctccaggccactgtccagtatattgggcagaagcaaccttaagtttgccggaatgccaatcaccctgaccgtgtctaccagtagcctaaacctcatggccgctgactgcaaacaggacactgcagaatacgtggcctatgtagctaaagatccagtgaaccagcgcgcttgccacattctagagtgtcctgaagggctggcccaagacgtaatcagcaccataggacaagctttcgagttgcgatttaagcagtacctcaggaacccaccaaagctggtaacccctcacgaccgctag

SEQ ID NO: 298800 - DNA, 603 bp, Artificial Sequence
  derived and/or modified sequence
atgccaataacactgacagtatccacttcaagccttaatctgatggctgcggattgcaaacaagacaccgccgagtatgtggcctatgtggccaaggaccctgtaaaccaacgtgcttgccacatcctggaatgcccagagggccttgctcaggacgtgatttccaccataggccaggcatttgagctgaggtttaagcagtatctgcggaacccgcctaaacttgttacacctcatgatcggatggcaggctttgacggctccgcttgggatgaagaagaggaggagccccctgatcatcagtattataacgactttcccggaaaggagccccctttagggggagtcgtcgatatgcggctccgagagggcgcagctccaggggcagcacgacccacagcccctaacgcacagacaccctctcacctgggggctaccctgcctgtgggacaaccagtgggtggagatcccgaggtgcgtaagcagatgccaccccctcctccgtgtccagctggcagggagctttttgacgaccccagttatgtcaatgttcagaacctggacaaagccaggcaggcagttggcggtgcaggcccaccttag

SEQ ID NO: 298801 - DNA, 692 bp, Artificial Sequence
  derived and/or modified sequence
gaaagttggagcggtaacctaagctggcagtggcgtgatccggcaccaaatcggcccgcggtgcggtgcggagactccatgaggccctggacatgaacaagctgagtggaggcggcgggcgcaggactcgggtggaagggggccagcttgggggcgaggagtggacccgccacgggagctttgtcaataagcccacgcggggctggctgcatcccaacgacaaagtcatgggacccggggtttcctacttggttcggtacatgggttgtgtggaggtcctccagtcaatgcgtgccctggacttcaacacccggactcaggtcaccagggaggccatcagtctggtgtgtgaggctgtgccgggtgctaagggggcgacaaggaggagaaagccctgtagccgcccgctcagctctatcctggggaggagtaacctgaaatttgctggaatgccaatcactctcaccgtctccaccagcagcctcaacctcatggccgcagactgcaaacaggacacagccgagtatgtcgcctatgttgccaaagaccctgtgaatcagagagcctgccacattctggagtgtcccgaagggcttgcccaggatgtcatcagcaccattggccaggccttcgagttgcgcttcaaacaatacctcaggaacccacccaaactggtcacccctcatgacagg

SEQ ID NO: 298802 - DNA, 780 bp, Artificial Sequence
  derived and/or modified sequence
cccagttgagtgggaggcaggcaggcaggcgctgggtctgagtacccctctttccccagggaggccatcagtctggtgtgtgaggctgtgccgggtgctaagggggcgacaaggaggagaaagccctgtagccgcccgctcagctctatcctggggaggagtaacctgaaatttgctggaatgccaatcactctcaccgtctccaccagcagcctcaacctcatggccgcagactgcaaacaggacacagccgagtatgtcgcctatgttgccaaagaccctgtgaatcagagagcctgccacattctggagtgtcccgaagggcttgcccaggatgtcatcagcaccattggccaggccttcgagttgcgcttcaaacaatacctcaggaacccacccaaactggtcacccctcatgacaggatggctggctttgatggctcagcatgggatgaggaggaggaagagccacctgaccatcagtactataatgacttcccggggaaggaaccccccttggggggggtggtagacatgaggcttcgggaaggagccgctccaggggctgctcgacccactgcacccaatgcccagacccccagccacttgggagctacattgcctgtaggacagcctgttgggggagatccagaagtccgcaaacagatgccacctccaccaccctgtccagcaggcagagagctttttgatgatccctcctatgtcaacgtccagaacctagacaaggcccggcaagcagtgggtggtgctgggcccccc

SEQ ID NO: 298803 - protein, 550 aa, Artificial Sequence
  derived and/or modified sequence
MVGEEKMSLRNRLSKSRENPEEDEDQRNPAKESLETPSNGRIDIKQLIAKKIKLTAEAEELKPFFMKEVGSHFDDFVTNLIEKSASLDNGGCALTTFSVLEGEKNNHRAKDLRAPPEQGKIFIARRSLLDELLEVDHIRTIYHMFIALLILFILSTLVVDYIDEGRLVLEFSLLSYAFGKFPTVVWTWWIMFLSTFSVPYFLFQHWATGYSKSSHPLIRSLFHGFLFMIFQIGVLGFGPTYVVLAYTLPPASRFIIIFEQIRFVMKAHSFVRENVPRVLNSAKEKSSTVPIPTVNQYLYFLFAPTLIYRDSYPRNPTVRWGYVAMKFAQVFGCFFYVYYIFERLCAPLFRNIKQEPFSARVLVLCVFNSILPGVLILFLTFFAFLHCWLNAFAEMLRFGDRMFYKDWWNSTSYSNYYRTWNVVVHDWLYYYAYKDFLWFFSKRFKSAAMLAVFAVSAVVHEYALAVCLSFFYPVLFVLFMFFGMAFNFIVNDSRKKPIWNVLMWTSLFLGNGVLLCFYSQEWYARQHCPLKNPTFLDYVRPRSWTCRYVF

SEQ ID NO: 298804 - protein, 260 aa, Artificial Sequence
  derived and/or modified sequence
MVGEEKMSLRNRLSKSRENPEEDEDQRNPAKESLETPSNGRIDIKQLIAKKIKLTAEAEELKPFFMKEVGSHFDDFVTNLIEKSASLDNGGCALTTFSVLEGEKNNHRAKDLRAPPEQGKIFIARRSLLDELLEVDHIRTIYHMFIALLILFILSTLVVDYIDEGRLVLEFSLLSYAFGKFPTVVWTWWIMFLSTFSVPYFLFQHWATGYSKSSHPLIRSLFHGFLFMIFQIGVLGFGPTYVVLAYTLPPASRFIIIFEQ

SEQ ID NO: 298805 - protein, 286 aa, Artificial Sequence
  derived and/or modified sequence
MKAHSFVRENVPRVLNSAKEKSSTVPIPTVNQYLYFLFAPTLIYRDSYPRNPTVRWGYVAMKFAQVFGCFFYVYYIFERLCAPLFRNIKQEPFSARVLVLCVFNSILPGVLILFLTFFAFLHCWLNAFAEMLRFGDRMFYKDWWNSTSYSNYYRTWNVVVHDWLYYYAYKDFLWFFSKRFKSAAMLAVFAVSAVVHEYALAVCLSFFYPVLFVLFMFFGMAFNFIVNDSRKKPIWNVLMWTSLFLGNGVLLCFYSQEWYARQHCPLKNPTFLDYVRPRSWTCRYVF

SEQ ID NO: 298806 - protein, 485 aa, Artificial Sequence
  derived and/or modified sequence
MKEVGSHFDDFVTNLIEKSASLDNGGCALTTFSVLEGEKNNHRAKDLRAPPEQGKIFIARRSLLDELLEVDHIRTIYHMFIALLILFILSTLVVDYIDEGRLVLEFSLLSYAFGKFPTVVWTWWIMFLSTFSVPYFLFQHWATGYSKSSHPLIRSLFHGFLFMIFQIGVLGFGPTYVVLAYTLPPASRFIIIFEQIRFVMKAHSFVRENVPRVLNSAKEKSSTVPIPTVNQYLYFLFAPTLIYRDSYPRNPTVRWGYVAMKFAQVFGCFFYVYYIFERLCAPLFRNIKQEPFSARVLVLCVFNSILPGVLILFLTFFAFLHCWLNAFAEMLRFGDRMFYKDWWNSTSYSNYYRTWNVVVHDWLYYYAYKDFLWFFSKRFKSAAMLAVFAVSAVVHEYALAVCLSFFYPVLFVLFMFFGMAFNFIVNDSRKKPIWNVLMWTSLFLGNGVLLCFYSQEWYARQHCPLKNPTFLDYVRPRSWTCRYVF

SEQ ID NO: 298807 - protein, 492 aa, Artificial Sequence
  derived and/or modified sequence
MELKPFFMKEVGSHFDDFVTNLIEKSASLDNGGCALTTFSVLEGEKNNHRAKDLRAPPEQGKIFIARRSLLDELLEVDHIRTIYHMFIALLILFILSTLVVDYIDEGRLVLEFSLLSYAFGKFPTVVWTWWIMFLSTFSVPYFLFQHWATGYSKSSHPLIRSLFHGFLFMIFQIGVLGFGPTYVVLAYTLPPASRFIIIFEQIRFVMKAHSFVRENVPRVLNSAKEKSSTVPIPTVNQYLYFLFAPTLIYRDSYPRNPTVRWGYVAMKFAQVFGCFFYVYYIFERLCAPLFRNIKQEPFSARVLVLCVFNSILPGVLILFLTFFAFLHCWLNAFAEMLRFGDRMFYKDWWNSTSYSNYYRTWNVVVHDWLYYYAYKDFLWFFSKRFKSAAMLAVFAVSAVVHEYALAVCLSFFYPVLFVLFMFFGMAFNFIVNDSRKKPIWNVLMWTSLFLGNGVLLCFYSQEWYARQHCPLKNPTFLDYVRPRSWTCRYVF

SEQ ID NO: 298808 - DNA, 1653 bp, Artificial Sequence
  derived and/or modified sequence
atggtgggcgaggagaagatgagcctgagaaacagactgagcaagagcagagagaaccccgaggaggacgaggaccagagaaaccccgccaaggagagcctggagacccccagcaacggcagaatcgacatcaagcagctgatcgccaagaagatcaagctgaccgccgaggccgaggagctgaagcccttcttcatgaaggaggtgggcagccacttcgacgacttcgtgaccaacctgatcgagaagagcgccagcctggacaacggcggctgcgccctgaccaccttcagcgtgctggagggcgagaagaacaaccacagagccaaggacctgagagccccccccgagcagggcaagatcttcatcgccagaagaagcctgctggacgagctgctggaggtggaccacatcagaaccatctaccacatgttcatcgccctgctgatcctgttcatcctgagcaccctggtggtggactacatcgacgagggcagactggtgctggagttcagcctgctgagctacgccttcggcaagttccccaccgtggtgtggacctggtggatcatgttcctgagcaccttcagcgtgccctacttcctgttccagcactgggccaccggctacagcaagagcagccaccccctgatcagaagcctgttccacggcttcctgttcatgatcttccagatcggcgtgctgggcttcggccccacctacgtggtgctggcctacaccctgccccccgccagcagattcatcatcatcttcgagcagatcagattcgtgatgaaggcccacagcttcgtgagagagaacgtgcccagagtgctgaacagcgccaaggagaagagcagcaccgtgcccatccccaccgtgaaccagtacctgtacttcctgttcgcccccaccctgatctacagagacagctaccccagaaaccccaccgtgagatggggctacgtggccatgaagttcgcccaggtgttcggctgcttcttctacgtgtactacatcttcgagagactgtgcgcccccctgttcagaaacatcaagcaggagcccttcagcgccagagtgctggtgctgtgcgtgttcaacagcatcctgcccggcgtgctgatcctgttcctgaccttcttcgccttcctgcactgctggctgaacgccttcgccgagatgctgagattcggcgacagaatgttctacaaggactggtggaacagcaccagctacagcaactactacagaacctggaacgtggtggtgcacgactggctgtactactacgcctacaaggacttcctgtggttcttcagcaagagattcaagagcgccgccatgctggccgtgttcgccgtgagcgccgtggtgcacgagtacgccctggccgtgtgcctgagcttcttctaccccgtgctgttcgtgctgttcatgttcttcggcatggccttcaacttcatcgtgaacgacagcagaaagaagcccatctggaacgtgctgatgtggaccagcctgttcctgggcaacggcgtgctgctgtgcttctacagccaggagtggtacgccagacagcactgccccctgaagaaccccaccttcctggactacgtgagacccagaagctggacctgcagatacgtgttctag

SEQ ID NO: 298809 - DNA, 1458 bp, Artificial Sequence
  derived and/or modified sequence
atgaaggaggtgggcagccacttcgacgacttcgtgaccaacctgatcgagaagagcgccagcctggacaacggcggctgcgccctgaccaccttcagcgtgctggagggcgagaagaacaaccacagagccaaggacctgagagccccccccgagcagggcaagatcttcatcgccagaagaagcctgctggacgagctgctggaggtggaccacatcagaaccatctaccacatgttcatcgccctgctgatcctgttcatcctgagcaccctggtggtggactacatcgacgagggcagactggtgctggagttcagcctgctgagctacgccttcggcaagttccccaccgtggtgtggacctggtggatcatgttcctgagcaccttcagcgtgccctacttcctgttccagcactgggccaccggctacagcaagagcagccaccccctgatcagaagcctgttccacggcttcctgttcatgatcttccagatcggcgtgctgggcttcggccccacctacgtggtgctggcctacaccctgccccccgccagcagattcatcatcatcttcgagcagatcagattcgtgatgaaggcccacagcttcgtgagagagaacgtgcccagagtgctgaacagcgccaaggagaagagcagcaccgtgcccatccccaccgtgaaccagtacctgtacttcctgttcgcccccaccctgatctacagagacagctaccccagaaaccccaccgtgagatggggctacgtggccatgaagttcgcccaggtgttcggctgcttcttctacgtgtactacatcttcgagagactgtgcgcccccctgttcagaaacatcaagcaggagcccttcagcgccagagtgctggtgctgtgcgtgttcaacagcatcctgcccggcgtgctgatcctgttcctgaccttcttcgccttcctgcactgctggctgaacgccttcgccgagatgctgagattcggcgacagaatgttctacaaggactggtggaacagcaccagctacagcaactactacagaacctggaacgtggtggtgcacgactggctgtactactacgcctacaaggacttcctgtggttcttcagcaagagattcaagagcgccgccatgctggccgtgttcgccgtgagcgccgtggtgcacgagtacgccctggccgtgtgcctgagcttcttctaccccgtgctgttcgtgctgttcatgttcttcggcatggccttcaacttcatcgtgaacgacagcagaaagaagcccatctggaacgtgctgatgtggaccagcctgttcctgggcaacggcgtgctgctgtgcttctacagccaggagtggtacgccagacagcactgccccctgaagaaccccaccttcctggactacgtgagacccagaagctggacctgcagatacgtgttctag

SEQ ID NO: 298810 - DNA, 1653 bp, Artificial Sequence
  derived and/or modified sequence
atggtgggcgaggaaaaaatgagcctcagaaacagactgagcaaatctcgagagaacccagaagaagacgaagaccaacggaaccccgccaaagaatccctcgaaaccccttctaacgggaggatagacataaagcaattgatcgcgaaaaagatcaaactcaccgctgaagcagaggagctaaagccatttttcatgaaagaagtgggatcacactttgacgatttcgtgaccaatctgattgaaaaaagcgcttctttagacaatggcggctgtgcactcactacattctctgtactcgaaggggagaaaaataaccatcgcgcgaaggatctaagggcccctcccgagcagggcaagatcttcatcgcccgaaggtctctgctggacgagctcctggaagtcgaccatattcgcactatttaccacatgtttattgcgctactcatacttttcatcttatccaccctcgtcgtggattacatcgatgaggggaggctggtgctggaatttagccttctgagctacgcgtttggcaaatttcctaccgtcgtgtggacttggtggatcatgttcttaagcacatttagtgtcccgtatttcctcttccagcattgggccaccggatactcaaagagctctcatcctctcatccgcagtctgtttcacggttttctgttcatgatctttcagataggggttctcggatttggccccacatatgttgtgctagcctatacactaccaccggcttcccggtttattataatctttgagcagatcagatttgtgatgaaggcacatagtttcgtccgcgagaacgtgcccagagtgctgaatagtgccaaggagaagtcctctacagtgcctattccaaccgtcaaccagtacttatacttcctctttgcacctaccctgatatatagagactcgtacccacggaaccctactgtgcggtggggctatgtagcaatgaaattcgcacaagtgtttggatgttttttctatgtatactatatcttcgagagattgtgtgcccccctcttccggaacataaagcaggagccctttagcgccagagtgctggtcttgtgcgtatttaactccatactgccaggcgtccttatcctgttcctcactttctttgcctttttgcattgttggctcaacgctttcgctgaaatgctgcgattcggggaccgaatgttctataaagattggtggaattccacgtcgtattccaactactataggacctggaatgtcgtggtgcacgattggctgtattactatgcttacaaggatttcttgtggttcttctccaaaaggttcaagagcgcagccatgctggccgtgtttgccgtcagtgctgtcgttcatgaatacgcgttagctgtttgtcttagctttttctatcccgtcttgttcgtcctgtttatgttcttcggcatggctttcaacttcatagtgaacgatagcaggaagaagccaatttggaacgtcctaatgtggacgagcctgttcctgggaaacggggtgctactgtgtttctactctcaggaatggtacgcaagacaacactgcccccttaaaaatcccacttttctggactacgtgaggcctaggtcatggacctgtagatacgtgttctag

SEQ ID NO: 298811 - DNA, 1458 bp, Artificial Sequence
  derived and/or modified sequence
atgaaagaagtgggctcccatttcgatgacttcgtgaccaatctcatcgagaaaagcgcgtcactggacaacgggggctgcgcactgacaaccttctctgtcctcgaaggtgagaaaaacaaccatagggcaaaagacctgcgagccccacccgagcaggggaaaattttcatagccaggagaagtctgctggatgagttgctagaagtggaccacattcggacaatctatcatatgttcatcgctcttctgatcttgtttattctctcaactttggtcgtggattacattgacgagggcagactggtgttggagttttcactgctgtcttacgctttcggcaagtttcctaccgtggtttggacttggtggataatgtttctgtccacctttagtgtgccctattttttattccaacactgggcaacgggctattcgaagagcagccacccattaatccgaagcctctttcacggttttttattcatgatctttcagattggagtgctcggctttggcccgacatatgtggtcctggcttataccctgccacccgcaagtcggtttataattatatttgaacagattcgctttgtgatgaaggctcattctttcgtcagggagaacgttcctagagtccttaactctgccaaggagaaatcatctactgtccctatccccaccgtgaaccagtatctgtattttctatttgctcctacactcatttatagagacagctatccccggaatcctactgtacgctggggatacgttgcaatgaagtttgcacaagtgttcgggtgttttttttacgtgtattatatttttgaacggttgtgtgcccccttattccgaaatataaaacaggagcccttcagtgccagggttcttgttctttgcgtctttaacagtatacttcccggagtccttatactgtttcttacctttttcgcctttctacactgctggcttaacgccttcgctgagatgctccgcttcggagaccgcatgttctacaaggactggtggaactctacgagctatagcaactactacagaacctggaacgtagtcgtgcacgactggttgtattactacgcatataaggatttcctgtggtttttttccaaacggtttaagagtgccgcgatgctggccgtgtttgcagtgtcggccgtggtgcacgagtatgcgctggcagtctgcctgtccttcttttatccagtgctctttgttctgtttatgttcttcgggatggcgttcaattttatcgtgaacgacagcaggaaaaaaccaatttggaacgtactgatgtggacatccctgttcttgggcaatggggtgctgctgtgtttctacagccaagaatggtacgcccggcagcattgccccctgaagaatccaacttttttggactacgtgcgcccgcgaagctggacctgtcgctacgtgttttag

SEQ ID NO: 298812 - DNA, 1653 bp, Artificial Sequence
  derived and/or modified sequence
atggtgggggaggagaagatgagcctgaggaaccggctgagcaagagccgggagaaccctgaggaggatgaggaccagagaaatcctgccaaggagagcctggagacccccagcaatggaagaattgacatcaagcagctgattgccaagaagatcaagctgacagctgaggccgaggagctgaagcccttcttcatgaaggaggtgggcagccactttgatgactttgtgaccaacctgattgagaagagcgccagcctggacaatggaggctgtgccctgaccaccttctctgtgctggagggggagaagaacaaccaccgggccaaggacctgcgggcccctcctgagcagggcaagatcttcatcgcccggcgcagcctgctggatgagctgctggaggtggaccacatccgcaccatctaccacatgttcatcgccctgctgatcctcttcatcctgagcaccctggtggtggactacattgatgagggccgcctggtgctggagttcagcctgctgtcctatgccttcggcaagttccccaccgtggtgtggacctggtggatcatgttcctgagcaccttctctgtgccctacttcctgttccagcactgggccaccggctacagcaagagcagccaccccctcatccgcagcctcttccacggcttcctgttcatgatcttccagatcggcgtgctgggcttcggccccacctacgtggtgctggcctacaccctgcccccagccagccgcttcatcatcatctttgagcagatccgctttgtgatgaaggcccacagctttgtgagagaaaatgtgccccgggtgctgaacagcgccaaggagaagagcagcacagtgcccatccccaccgtgaaccagtacctgtacttcctgtttgcccccaccctcatctacagagacagctaccccaggaaccccaccgtgcgctggggctacgtggccatgaagtttgcccaggtgtttggctgcttcttctacgtgtactacatctttgagcggctgtgtgcccccctcttcaggaacatcaagcaggagcccttcagcgcccgggtgctggtgctgtgtgtgttcaacagcatcctgcccggggtgctgatcctcttcctgaccttctttgccttcctgcactgctggctgaatgcctttgctgagatgctgcgctttggagacaggatgttctacaaggactggtggaacagcaccagctacagcaactactaccgcacctggaatgtggtggtgcatgactggctgtactactatgcctacaaggacttcctgtggttcttcagcaagcgcttcaagtctgctgccatgctggccgtgtttgctgtgtctgctgtggtgcatgaatatgccctggccgtgtgcctgtccttcttctaccctgtgctgtttgtgctcttcatgttcttcggcatggccttcaacttcatcgtgaatgacagcaggaagaagcccatctggaatgtgctgatgtggaccagcctcttcctgggcaatggagtgctgctgtgcttctacagccaggagtggtacgcccggcagcactgccccctgaagaaccccaccttcctggactatgtgcggcccaggtcctggacctgccgctacgtgttctag

SEQ ID NO: 298813 - DNA, 1458 bp, Artificial Sequence
  derived and/or modified sequence
atgaaggaggtgggcagccactttgatgactttgtgaccaacctgattgagaagagcgccagcctggacaatggaggctgtgccctgaccaccttctctgtgctggagggggagaagaacaaccaccgggccaaggacctgcgggcccctcctgagcagggcaagatcttcatcgcccggcgcagcctgctggatgagctgctggaggtggaccacatccgcaccatctaccacatgtttattgccctgctgatcctcttcatcctgagcaccctggtggtggactacattgatgagggccgcctggtgctggagttcagcctgctgtcctatgccttcggcaagttccccaccgtggtgtggacctggtggatcatgttcctgagcaccttctctgtgccctacttcctgttccagcactgggccaccggctacagcaagagcagccaccccctcatccgcagcctcttccacggcttcctgttcatgatcttccagattggagtgctgggcttcggccccacctacgtggtgctggcctacaccctgcccccagccagccgcttcatcatcatctttgagcagatccgctttgtgatgaaggcccacagctttgtgcgggagaatgtgccccgggtgctgaacagcgccaaggagaagagcagcacagtgcccatccccaccgtgaaccagtacctgtacttcctgtttgcccccaccctcatctacagagacagctaccccaggaaccccaccgtgcgctggggctacgtggccatgaagtttgcccaggtgtttggctgcttcttctacgtgtactacatctttgagcggctgtgtgcccccctcttcaggaacatcaagcaggagcccttcagcgcccgggtgctggtgctgtgtgtgttcaacagcatcctgcccggggtgctgatcctcttcctgaccttctttgccttcctgcactgctggctgaatgcctttgctgagatgctgcgctttggagacaggatgttctacaaggactggtggaacagcaccagctacagcaactactaccgcacctggaatgtggtggtgcatgactggctgtactactatgcctacaaggacttcctgtggttcttcagcaagcgcttcaagtctgctgccatgctggccgtgtttgctgtgtctgctgtggtgcatgaatatgccctggccgtgtgcctgtccttcttctaccctgtgctgtttgtgctcttcatgttcttcggcatggccttcaacttcatcgtgaatgacagcaggaagaagcccatctggaatgtgctgatgtggaccagcctcttcctgggcaatggagtgctgctgtgcttctacagccaggagtggtacgcccggcagcactgccccctgaagaaccccaccttcctggactatgtgcggcccaggtcctggacctgccgctacgtgttctag

SEQ ID NO: 298814 - DNA, 1653 bp, Artificial Sequence
  derived and/or modified sequence
atggtgggcgaggagaagatgagcctgcggaaccggctgagcaagtccagagaaaatccagaggaggatgaagatcaaagaaaccccgcgaaggagagtctcgagacgcccagcaacgggagaattgacattaagcagttgattgccaaaaaaatcaagctaactgccgaagcggaggagttaaagcctttcttcatgaaggaggtcgggtctcatttcgacgattttgtgaccaatctgattgaaaagtcagcttcattagataatgggggctgtgccctcacaacattcagcgtgctggagggtgaaaagaacaatcaccgagccaaggacttgagggctcctcccgaacaggggaagattttcattgcaagaagatcacttctcgatgaactgctggaggtagatcacatcaggaccatctaccatatgttcattgcacttctgatcctcttcattttgtctaccctcgtcgttgactatatcgacgagggacgacttgtgttagaattctccctcctgagctacgccttcgggaagtttccaacggtcgtgtggacttggtggattatgttcctcagtacctttagcgtcccatacttcctgtttcagcattgggcaacagggtacagcaagagttcacacccactgatccggtccctgttccacggattcttgtttatgatcttccagatcggagtgctgggattcggccccacctatgtagtgctggcttacacactgcctcccgctagccggttcattattatttttgagcaaatccgctttgtgatgaaagctcactcctttgtcagagaaaacgtcccacgagtgttgaattccgccaaggaaaaaagttccactgtgccgatcccaaccgtcaaccagtacctctatttcctctttgctccaacactgatctaccgcgactcatatccgcgcaaccctacagtccggtggggctatgtggctatgaagttcgctcaagtctttgggtgcttcttctatgtctactatatttttgaaaggttgtgcgcacctctcttcaggaacataaagcaggaacccttcagcgcccgtgtactagttctatgcgtttttaactcgatcttgccgggcgtgctgatccttttcctcacatttttcgcctttctgcactgctggctaaatgctttcgcagagatgttgaggttcggggatagaatgttctataaggactggtggaatagtacttcttacagcaattactacaggacatggaacgtagtagtgcacgattggctgtattactacgcatataaggacttcctgtggttttttagtaagagattcaagtctgcagccatgctggcagtctttgccgtatctgctgtagttcatgaatacgcccttgcagtttgcttgtcgtttttttacccagtgctctttgttttatttatgttcttcggcatggctttcaactttatcgtgaatgacagtcgaaagaagccgatctggaatgtcttgatgtggacttcactgtttcttggcaatggggtgctgttatgcttttatagccaggagtggtacgctagacagcactgtcctctgaagaaccctacattcctggattacgttcgcccacgctcttggacttgcaggtacgttttctag

SEQ ID NO: 298815 - DNA, 1458 bp, Artificial Sequence
  derived and/or modified sequence
atgaaggaggtgggcagccacttcgacgacttcgtgaccaacctgattgagaagagcgcctctcttgataacgggggctgtgccctgactaccttctcagtattggagggtgagaagaataaccaccgtgccaaggatcttagggcccccccagaacaaggcaagatctttatcgcgcgacggtcccttctggacgaactgctggaagtcgatcatattcgcactatctatcatatgttcattgcgctactgatcctgtttatcctatccacactggttgtcgactatatcgatgagggcaggcttgtgctcgaattttcgcttctctcctacgccttcggtaaattcccaacggtcgtgtggacctggtggataatgtttctcagtacattcagtgttccctacttcctttttcaacattgggcaaccggatacagcaaatcctctcatcccctgattcggtccctgtttcacggctttctttttatgatttttcagataggagtcttggggttcggacccacttatgttgtgcttgcctatacgctaccaccagcatccagattcataatcatttttgagcagatccggttcgtcatgaaagctcatagtttcgttcgagaaaacgtcccgcgtgtgctaaatagcgctaaggagaagagcagtactgtgcctatcccaaccgttaatcagtatctgtactttctgtttgctccaactttgatataccgcgattcttaccctcgtaaccccaccgtccgctggggatacgtggccatgaaatttgcccaagtatttggttgtttcttttatgtttattacatcttcgagcggctctgtgcacccctgttcaggaatattaaacaggagcctttttccgcaagagtgctagttctctgcgtgttcaattccatactgcctggtgtgcttatcctgttccttacctttttcgccttccttcactgttggctgaacgcctttgccgagatgctgagattcggtgatcgtatgttttacaaagattggtggaatagcaccagctattcaaactactacagaacttggaacgttgtcgttcatgactggctgtattattatgcgtacaaagatttcctgtggtttttttccaaacggtttaaatcagccgcaatgctggcggtttttgctgttagcgccgtcgtccatgagtacgccctggccgtgtgcctatcttttttttaccccgtgctgtttgtgttgttcatgtttttcggcatggcttttaattttattgttaatgactcacgtaagaaaccaatctggaacgtgttgatgtggactagtctgtttttggggaacggggtgcttttatgcttttatagtcaggaatggtatgctagacagcattgcccactgaagaaccctacctttctggactatgtccgacctcgcagctggacctgccgttacgtcttctag

SEQ ID NO: 298816 - DNA, 1653 bp, Artificial Sequence
  derived and/or modified sequence
atggtcggcgaagagaagatgtctctgcggaaccgcttgtcgaaatccagggagaatcccgaagaggacgaagaccagcgaaaccccgcaaaagagtcactagagacaccctccaatggccgaatagatataaagcagttgatcgccaagaagattaaactaaccgccgaagcagaagaactgaagccattcttcatgaaagaggtcgggagtcattttgacgatttcgtcactaacctgatcgagaagtctgcttccctggacaatggcggttgcgcgctgacaactttcagcgtgctggaaggagagaagaacaaccatagggcgaaggacctcagagccccacctgaacaaggcaaaatctttatagctaggcgctcccttttggacgaactgctcgaagtcgaccatatccgcaccatctaccacatgttcattgctctgctcattctgttcatactcagcacattggtggtggattacatcgatgagggtagactcgtattggagttcagtctgctgtcatacgcatttggcaagttcccaactgttgtgtggacttggtggattatgttcctgagtaccttcagcgttccttactttctgttccaacattgggcaacagggtacagcaaaagcagccatcccctcattaggtccctttttcacggttttctcttcatgatctttcaaatcggcgttttgggatttggtcccacgtatgtcgtgcttgcttatactctccccccagcctcacgatttatcatcatcttcgagcagatcagatttgtgatgaaagctcactcattcgtacgcgagaatgtgccgagggtcctgaactcagcaaaggagaagtcgtctacagtccccatccccactgtcaatcagtacctgtacttcctcttcgctcccacactgatctacagagactcatacccgagaaacccgacggtccggtgggggtatgtcgccatgaaatttgcccaggtgtttgggtgttttttctacgtttactatatcttcgaaaggctgtgcgctcctctcttccgaaacattaagcaggaaccgttctctgccagagtgctggtcctctgcgtgtttaactcaatcctccctggtgtgttgatactcttcttaacctttttcgcttttctgcactgctggctgaatgccttcgctgagatgctgcggtttggcgataggatgttctacaaggattggtggaattctacttcttattccaattactacagaacttggaatgtggttgtgcatgattggttgtactactatgcttataaggattttctctggttttttagcaagcgctttaagtctgcggcaatgttggcggtgtttgccgtgagtgcagtagtgcatgagtatgcattggccgtgtgtctttccttcttctaccctgttctgtttgtgttatttatgttcttcgggatggcattcaactttatagttaacgacagtcggaaaaagcccatttggaatgtgttaatgtggacttctctgttcctagggaatggtgtcctgctgtgcttctattcacaagagtggtacgctagacagcactgtccactgaagaatcctacatttcttgattacgttcggcctcgaagttggacctgccgatatgtgttctag

SEQ ID NO: 298817 - DNA, 1458 bp, Artificial Sequence
  derived and/or modified sequence
atgaaagaagtcggcagtcactttgatgattttgtgactaacctgatcgagaaatctgcctcactggacaacgggggatgcgcccttaccaccttcagtgtgctggagggcgagaaaaataaccaccgcgcaaaagacctgagagcccctcccgagcagggcaaaatctttatcgctagaagatctcttctggatgaactcctggaagtggatcacatcagaaccatatatcacatgtttattgccctgctcatcctcttcatcctcagcacacttgtcgtggactacatcgatgagggccgattggttctggagttttccctgctgtcatatgcattcggcaagttccccactgtcgtgtggacatggtggatcatgttcttgtccactttctccgtgccttatttcctgttccagcactgggccacaggttatagtaaaagcagtcaccccctgattcggtccttattccacggcttccttttcatgatttttcagattggcgtactgggatttggtcccacgtatgttgtcttggcgtatacactgccgcctgcctcccgctttatcattatttttgaacaaattagatttgtcatgaaagcgcacagctttgttcgcgagaacgttcctcgggtgttgaattccgctaaagagaagtcatcaacggtgcccatccctactgtcaatcaatacctctactttctgtttgcgcctactctgatctatcgggatagctatccccgtaaccctacagtccgttggggctacgttgctatgaaatttgctcaggtcttcggctgtttcttctacgtctattacatcttcgaacggttatgcgccccactgtttcggaatatcaagcaggaacccttttcggcccgagtcctcgtgctgtgtgtgtttaacagcatactgccaggcgtcctcattttgttcctgactttttttgcattcctccattgctggctgaatgcgtttgctgaaatgttacgatttggcgatcgaatgttttacaaagactggtggaactctaccagctactctaactattaccgcacttggaatgtggtggttcatgactggctctactactatgcatataaggactttctgtggtttttcagcaagaggttcaaaagcgctgccatgctggcggtatttgccgtgagcgctgtcgtgcacgaatatgcccttgccgtgtgcctgtcttttttctatcctgtcctatttgtgttgtttatgtttttcgggatggctttcaactttattgttaatgactctcgcaagaaacccatttggaacgtgttgatgtggacttcgttattcttgggcaatggcgtacttctgtgtttttattctcaagaatggtacgctcggcagcactgcccactgaaaaatccaacctttttggattatgtgaggccaagatcctggacctgccgatacgtattttag

SEQ ID NO: 298818 - DNA, 6835 bp, Artificial Sequence
  derived and/or modified sequence
agcttagcaggcgacgttgcgggccctgggcgccaggagagcttcccggagtcgaccttcctgctggctgctctgtgaccgcttcccggctctgccctcttggccgaagtgcccgctgccgggcgcgggcctcagacaatacaatggtgggtgaagagaagatgtctctaagaaaccggctgtcaaagtccagggaaaatcctgaggaagatgaagaccagagaaaccctgcaaaggagtccctagagacacctagtaatggtcgaattgacataaaacagttgatagcaaagaagataaagttgacagcagaggcagaggaattgaagccattttttatgaaggaagttggcagtcactttgatgattttgtgaccaatctcattgaaaagtcagcatcattagataatggtgggtgcgctctcacaaccttttctgttcttgaaggagagaaaaacaaccatagagcgaaggatttgagagcacctccagaacaaggaaagatttttattgcaaggcgctctctcttagatgaactgcttgaagtggaccacatcagaacaatatatcacatgtttattgccctcctcattctctttatcctcagcacacttgtagtagattacattgatgaaggaaggctggtgcttgagttcagcctcctgtcttatgcttttggcaaatttcctaccgttgtttggacctggtggatcatgttcctgtctacattttcagttccctattttctgtttcaacattgggccactggctatagcaagagttctcatccgctgatccgttctctcttccatggctttcttttcatgatcttccagattggagttctaggttttggaccaacatatgttgtgttagcatatacactgccaccagcttcccggttcatcattatattcgagcagattcgttttgtaatgaaggcccactcatttgtcagagagaacgtgcctcgggtactaaattcagctaaggagaaatcaagcactgttccaatacctacagtcaaccagtatttgtacttcttatttgctcctacccttatctaccgtgacagctatcccaggaatcccactgtaagatggggttatgtcgctatgaagtttgcacaggtctttggttgctttttctatgtgtactacatctttgaaaggctttgtgcccccttgtttcggaatatcaaacaggagcccttcagcgctcgtgttctggtcctatgtgtatttaactccatcttgccaggtgtgctgattctcttccttactttttttgcctttttgcactgctggctcaatgcctttgctgagatgttacgctttggtgacaggatgttctataaggattggtggaactccacgtcatactccaactattatagaacctggaatgtggtggtccatgactggctatattactatgcttacaaggactttctctggtttttctccaagagattcaaatctgctgccatgttagctgtctttgctgtatctgctgtagtacacgaatatgccttggctgtttgcttgagctttttctatcccgtgctcttcgtgctcttcatgttctttggaatggctttcaacttcattgtcaatgatagtcggaaaaagccgatttggaatgttctgatgtggacttctcttttcttgggcaatggagtcttactctgcttttattctcaagaatggtatgcacgtcagcactgtcctctgaaaaatcccacatttttggattatgtccggccacgttcctggacttgtcgttacgtgttttagaagcttggactttgtttcctccttgtcactgaagattgggtagctccctgatttggagccagctgtttccagttgttactgaagttatctgtgttatttggaccactccaggctttacagatgactcactccattcctaggtcacttgaagccaaactgttggaagttcactggagtcttgtacacttaagcagagcagaactttttttgtggggctgggtggggggagaagaccgactaacagctgaagtaatgacagattgttgctgggtcatatcagctttatcccttggtaattatatctgttttgtttcttgactctgtccaatcagagaataaacatcatagtttcttggccactgaattagccaaaacacttaggaagaaatcacttaaatacctctggcttagaaattttttcatgcacactgttggaatgtatgctaattgaacatgcaattggggaagaaaaaatgtagaatgatttttgctatttctagtagaaagaaaatgtctgttttccaaagataatgttatacatcctattttgtaatttttttgaaaaaagttcaatgttcagttttccttagtttttaccttgttttctctataggtcatgatttctgtgaagcaaaaagatgccttttaccatgaattcttgagtttacatcaataatattgtatattaaggggatcagaagtaggaaggaaaaaataagagatagcagaggaaaaagaaaaacatttcctcttataacttctgaagtaatttgtaaaaaagatttgtagagtcaatcatgtgtttaaattattttatcacaaacttaacatggaagatattcctttttaactttgtggtaacttctttgaagttatttagaaatatcctttggaacaattattttattgtctaataaatattgacttctcttgaattattttgcagactagtgagtctgtaccataagtattaatcacctccactcatattaaagtgatcattaagaatccagaagctggcttctgcatttgctcagttatacttttaatggtagtatgtttttaggtggaataaattaatatgtgattggtttcaaggaaatgtactctattatgtaatacttccattttataagatgcccatttctaatacaatgtgtgtaggaattatttgtatgtatgaggtatgattgtaaagattgagcattggaaggggtatcagagaccatgtagttcaactttccactcaaagtaagatttatgaattatttaaatgatagttgttacttggaacagccacttgagaggctctcttggtattgtttggaattgttttaaagtcagtttgagtctcacaagaaggtaagtagagtttcttaatagtcacaacttaatttgaaccacaagtatccagcttaatcacgtatcttactcacgataccactggtccagatgagtttaggtaattttcaaacattaaatccaacttcaacggaaacaaatacactcaagggaagttatttttaaaaaggtactctgcatgttcccgcagtaatgttctgcacaacagtattgtaattgtaatggaatcataacctgctaactagtttgctttaatatggcttgtaattcttgacatttttcttaaaattaaaacgaatttttattttgaatttataactgcattttaaatatattggggacagattgcgctgagacctggttatgagcaagccaatcttttgaatctagagaatggaattcttaggtttatatttctgttaagaaatactataaatatgactcttatgagaagactttgttgctctgtagtgtttctgaatactgtatttgttggattgatcaaggctatttttcaaaaagctctctgcttcctgtttgtttgtttgtttgtttttgagacagagtcttgctctgtcgccggggctggagtgcaatggcgtgaactcagctcactgcaacctctgcctccctggttcaagctattctcctgcctcagcctcctgagtagctgggattacagggccacgcctggctaatttttgtatttttagtagagatggggtttcaccctgttggtcaggctggtctcaaactcctgaccttgtgatctgcccacctcagcctcccaaagtgctgggaagacaggcgttagccaccgtgcccggcctctgtttcctgttattagtgattttcctgcccaagattgcaacaacaaatatgtagaactacagactgtttagaatgctgagactgttctaagaaactttcaaaaacagtagcacttcaaggaatggtcactttctatgaaagaaactggtttgatagccataatcttattgctagctgcttttagcaaaagtcttttcttgaaaccaccacctatactctttaaacaaataaaaactaaaatctcttgctaatgtttcaggaagatttattttttctattttgctattgtggcgaaaattattttcagttataggatacttttttccttctgaaaagtaataagcttaaagtttttgtttctgtaagatgtaatgatagtaactattattttgggcatattaaccaacagaacaattatgtagtatgtatatcactttctcattagatctctaacttgaccttctagtacctttatgtgtgaggataaatttgttagatccttttattctcaatcttggataatgatgcaaaatggaattttgttttgtttgttggtagattcacatactaaaactttgcaggtaaagttgcttgcctcatgttagaatttaattagaaaactgaggctgcctttttttttttttttttttttttttaagacagagtcttgttctgtcgcccaggccagttttttttttcttgtacagatggggttttaccatgttgctcaggctggtctcaaactcctggagtcaagggatctatttgcctcagcctctcaaagtgctgggattacaggtgtgagccacggctcctggctccttgctccagaatcagttttttaatggaagatagctcatactttgtttttgtttttaaagagacagggtctcactctgttgcccaggctggtagtagcgtgatcatagctcactgcagtctcaaactcctggactcaaatagtgctctggagtacctagaactacaagtgcctaccaccacacccagctaatttatttgtttttttttttttagagatggggggggtctccctatgttgcccaggctggtctcaaactcttcacctcaagcaaaactcccactgcagaaagctttgggattacaggcatgagccaccatgccaagcccatacttattgttaataaagtttcagtgacttgcttactaatcttatgcaaaatttcatgtaatttatgtaatactacataacaatgctacatatggtatgtatacatacactgtatacacacaaaggtctgttctgggtattttatgtatcttatctctaggctttatggctctgaaatggagggaactggacataaatgtttcaaggaataaagtgaatgttttgtttgtttgtttgttttgagacggagtctcagtcaccaggctggagtgcagtgctgtgatctcagctcactgcaacctctgcctcctgggttcaagcgattctcctgcctcagcctcccgagtagctggcattacaggtgcctgccaccatgtccagctaatttttgtgtttttagtagagatggggtttcaccatgatggtcaggctggtctcgaactcctgacctcatgatccgccagcctcagcctcccatagtgctgggattataggcatgagccatgctcccggccaaagtgaatgttttgggtgaagtttatataaggatttgacttttgtatcattattaaagtttctgtcaggtaatacagtgttggccctctgttgaaataaaatgttacatatcgctgggtgtagtggctcatgcctttaatcccagtactttgggaggccaaggcaggaggattgcttgagctcagaagtttgagaccagcctgggcaacatagcaaaaccttgtcactataaaaaatacaaaaattagccaggcgtggtggtgcacgcctgtagtctcagctactcagtcggctgaggtgggaagatggcttcaagccgggagatggaggcttcagtgacctgtgacctgtgatcacaccacttaattcctcaaaacatttatgtcccagttccctccatttcagagccatgggcaacagagcgagaccctgtctcaaaaaaaaaattacatataagcccggtttaaagagaggataatatgcaaccaccctagttgaaacagagtgtatcacttctttctcaccctaaatttaatgcctagtttgaaaatcagtagacaataataaagttgataagctttaggttggtaggaaagctatgtaatctatatagtgtactaaatccttatatgtttttggtaaaaaaagactttaatagctaatttggacttcagaaaatgggttaatttcacgagtgcatatcacttttgactatattagtcaagcatattattaaagtttaaaaaactctaaaacttctgtactgtttttttcttaagtgctctcttccttatttctacattactacattcacatttctgctgtcaataagccctaatggagtgataaactttaagctagtagatactgcaccatgtcttgtggtggtgttttcttaatgaaatggaagctgtacttcctgtttgtttttaaatacttttgaaacagacagttcatgtaccccatcatttagagatgcagtttgaatttccatggaaaaaggtgccaattttggattgggaaaggagctgaagccccagtcaagactttgccatttggggtaatgcagcagattcctgtgtctgtatctttccagtgtgtgtgttaatccatagtgttctgagcaccagaagggtcatgtaaatctgaagttgttattaaaggtttttctatagtgaaa

SEQ ID NO: 298819 - DNA, 1941 bp, Artificial Sequence
  derived and/or modified sequence
gctttagcttagcaggcgacgttgcgggccctgggcgccaggagagcttcccggagtcgaccttcctgctggctgctctgtgaccgcttcccggctctgccctcttggccgaagtgcccgctgccgggcgcgggcctcaggaattgaagccattttttatgaaggaagttggcagtcactttgatgattttgtgaccaatctcattgaaaagtcagcatcattagataatggtgggtgcgctctcacaaccttttctgttcttgaaggagagaaaaacaaccatagagcgaaggatttgagagcacctccagaacaaggaaagatttttattgcaaggcgctctctcttagatgaactgcttgaagtggaccacatcagaacaatatatcacatgtttattgccctcctcattctctttatcctcagcacacttgtagtagattacattgatgaaggaaggctggtgcttgagttcagcctcctgtcttatgcttttggcaaatttcctaccgttgtttggacctggtggatcatgttcctgtctacattttcagttccctattttctgtttcaacattgggccactggctatagcaagagttctcatccgctgatccgttctctcttccatggctttcttttcatgatcttccagattggagttctaggttttggaccaacatatgttgtgttagcatatacactgccaccagcttcccggttcatcattatattcgagcaggattttctgactttactggctatctataatgcatttgactaatggaaaggacacttgcaggagactttctttgaagagacatctttttcctcctgcttttgtagattcgttttgtaatgaaggcccactcatttgtcagagagaacgtgcctcgggtactaaattcagctaaggagaaatcaagcactgttccaatacctacagtcaaccagtatttgtacttcttatttgctcctacccttatctaccgtgacagctatcccaggaatcccactgtaagatggggttatgtcgctatgaagtttgcacaggtctttggttgctttttctatgtgtactacatctttgaaaggctttgtgcccccttgtttcggaatatcaaacaggagcccttcagcgctcgtgttctggtcctatgtgtatttaactccatcttgccaggtgtgctgattctcttccttactttttttgcctttttgcactgctggctcaatgcctttgctgagatgttacgctttggtgacaggatgttctataaggattggtggaactccacgtcatactccaactattatagaacctggaatgtggtggtccatgactggctatattactatgcttacaaggactttctctggtttttctccaagagattcaaatctgctgccatgttagctgtctttgctgtatctgctgtagtacacgaatatgccttggctgtttgcttgagctttttctatcccgtgctcttcgtgctcttcatgttctttggaatggctttcaacttcattgtcaatgatagtcggaaaaagccgatttggaatgttctgatgtggacttctcttttcttgggcaatggagtcttactctgcttttattctcaagaatggtatgcacgtcagcactgtcctctgaaaaatcccacatttttggattatgtccggccacgttcctggacttgtcgttacgtgttttagaagcttggactttgtttcctccttgtcactgaagattgggtagctccctgatttggagccagctgtttccagttgttactgaagttatctgtgttatttggaccactccaggctttacagatgactcactccattcctaggtcacttgaagccaaactgttggaagttcactggagtcttgtacacttaagcagagcagaactttttttgtggggctgggt

SEQ ID NO: 298820 - DNA, 1848 bp, Artificial Sequence
  derived and/or modified sequence
gtccggcgctttagcttagcaggcgacgttgcgggccctgggcgccaggagagcttcccggagtcgaccttcctgctggctgctctgtgaccgcttcccggctctgccctcttggccgaagtgcccgctgccgggcgcgggcctcaggtcgaattgacataaaacagttgatagcaaagaagataaagttgacagcagaggcagaggaattgaagccattttttatgaaggaagttggcagtcactttgatgattttgtgaccaatctcattgaaaagtcagcatcattagataatggtgggtgcgctctcacaaccttttctgttcttgaaggagagaaaaacaaccatagagcgaaggatttgagagcacctccagaacaaggaaagatttttattgcaaggcgctctctcttagatgaactgcttgaagtggaccacatcagaacaatatatcacatgtttattgccctcctcattctctttatcctcagcacacttgtagtagattacattgatgaaggaaggctggtgcttgagttcagcctcctgtcttatgcttttggcaaatttcctaccgttgtttggacctggtggatcatgttcctgtctacattttcagttccctattttctgtttcaacattgggccactggctatagcaagagttctcatccgctgatccgttctctcttccatggctttcttttcatgatcttccagattggagttctaggttttggaccaacatatgttgtgttagcatatacactgccaccagcttcccggttcatcattatattcgagcagattcgttttgtaatgaaggcccactcatttgtcagagagaacgtgcctcgggtactaaattcagctaaggagaaatcaagcactgttccaatacctacagtcaaccagtatttgtacttcttatttgctcctacccttatctaccgtgacagctatcccaggaatcccactgtaagatggggttatgtcgctatgaagtttgcacaggtctttggttgctttttctatgtgtactacatctttgaaaggctttgtgcccccttgtttcggaatatcaaacaggagcccttcagcgctcgtgttctggtcctatgtgtatttaactccatcttgccaggtgtgctgattctcttccttactttttttgcctttttgcactgctggctcaatgcctttgctgagatgttacgctttggtgacaggatgttctataaggattggtggaactccacgtcatactccaactattatagaacctggaatgtggtggtccatgactggctatattactatgcttacaaggactttctctggtttttctccaagagattcaaatctgctgccatgttagctgtctttgctgtatctgctgtagtacacgaatatgccttggctgtttgcttgagctttttctatcccgtgctcttcgtgctcttcatgttctttggaatggctttcaacttcattgtcaatgatagtcggaaaaagccgatttggaatgttctgatgtggacttctcttttcttgggcaatggagtcttactctgcttttattctcaagaatggtatgcacgtcagcactgtcctctgaaaaatcccacatttttggattatgtccggccacgttcctggacttgtcgttacgtgttttagaagcttggactttgtttcctccttgtcactgaagattgggtagctccctgatttggagccagctgtttccagttgttactgaagttatctgtgttatttggaccactccaggctttacagatgactcactccattcctaggtcacttgaagccaaactgttggaag

SEQ ID NO: 298821 - DNA, 783 bp, Artificial Sequence
  derived and/or modified sequence
atggtgggcgaggagaagatgagcctgagaaacagactgagcaagagcagagagaaccccgaggaggacgaggaccagagaaaccccgccaaggagagcctggagacccccagcaacggcagaatcgacatcaagcagctgatcgccaagaagatcaagctgaccgccgaggccgaggagctgaagcccttcttcatgaaggaggtgggcagccacttcgacgacttcgtgaccaacctgatcgagaagagcgccagcctggacaacggcggctgcgccctgaccaccttcagcgtgctggagggcgagaagaacaaccacagagccaaggacctgagagccccccccgagcagggcaagatcttcatcgccagaagaagcctgctggacgagctgctggaggtggaccacatcagaaccatctaccacatgttcatcgccctgctgatcctgttcatcctgagcaccctggtggtggactacatcgacgagggcagactggtgctggagttcagcctgctgagctacgccttcggcaagttccccaccgtggtgtggacctggtggatcatgttcctgagcaccttcagcgtgccctacttcctgttccagcactgggccaccggctacagcaagagcagccaccccctgatcagaagcctgttccacggcttcctgttcatgatcttccagatcggcgtgctgggcttcggccccacctacgtggtgctggcctacaccctgccccccgccagcagattcatcatcatcttcgagcagtag

SEQ ID NO: 298822 - DNA, 783 bp, Artificial Sequence
  derived and/or modified sequence
atggttggagaagaaaaaatgtccctgaggaaccgactctctaaatcccgagaaaacccagaggaagacgaggatcagaggaaccccgcaaaagagagcctggagacccctagtaatggacgaatagacatcaagcagctcatcgctaagaagattaagctgaccgccgaagcagaagagttaaaacccttttttatgaaggaggtggggagccacttcgacgatttcgttactaacctaattgagaagagtgccagtctggataatggggggtgtgcattgacaacgttttccgtgctggaaggcgagaagaacaaccacagagcgaaagacttgcgggctcctcccgagcagggcaagattttcattgctagacggtccctcctcgatgagctgctggaggttgatcatattaggactatttatcatatgttcattgcccttctgatcctcttcatcctgtcaaccctggtggtggattacatcgacgaaggtcgattggtcctggagttctcccttctttcttatgccttcggaaaattccccactgtggtgtggacctggtggatcatgttcctgagcacattcagtgtgccctattttctgtttcagcactgggccactggttatagtaagagcagccatccactgatccggtccctgttccacggctttctgtttatgattttccagatcggagtgctcggctttggccccacatacgtggtccttgcttataccctgcccccagcctctaggttcattataatctttgagcaatag

SEQ ID NO: 298823 - DNA, 783 bp, Artificial Sequence
  derived and/or modified sequence
atggtgggggaggagaagatgagcctgaggaaccggctgagcaagagccgggagaaccctgaggaggatgaggaccagagaaatcctgccaaggagagcctggagacccccagcaatggaagaattgacatcaagcagctgattgccaagaagatcaagctgacagctgaggccgaggagctgaagcccttcttcatgaaggaggtgggcagccactttgatgactttgtgaccaacctgattgagaagagcgccagcctggacaatggaggctgtgccctgaccaccttctctgtgctggagggggagaagaacaaccaccgggccaaggacctgcgggcccctcctgagcagggcaagatcttcatcgcccggcgcagcctgctggatgagctgctggaggtggaccacatccgcaccatctaccacatgttcatcgccctgctgatcctcttcatcctgagcaccctggtggtggactacattgatgagggccgcctggtgctggagttcagcctgctgtcctatgccttcggcaagttccccaccgtggtgtggacctggtggatcatgttcctgagcaccttctctgtgccctacttcctgttccagcactgggccaccggctacagcaagagcagccaccccctcatccgcagcctcttccacggcttcctgttcatgatcttccagatcggcgtgctgggcttcggccccacctacgtggtgctggcctacaccctgcccccagccagccgcttcatcatcatctttgagcagtag

SEQ ID NO: 298824 - DNA, 783 bp, Artificial Sequence
  derived and/or modified sequence
atggtgggcgaggagaagatgagcctgcggaaccggctgagcaagagccgtgagaaccccgaggaagacgaagaccagaggaatcccgctaaagagtccctggaaacaccttccaatgggagaatcgacattaaacaactgatcgccaaaaagattaagctcaccgccgaggctgaggagttgaaacccttcttcatgaaggaggtcgggtcccatttcgacgatttcgtgaccaacctgatagagaaaagcgcgagtcttgataacggcgggtgcgcccttacaacgttctctgtgctcgaaggtgaaaaaaataaccatcgcgcgaaggacttaagagctccccctgagcagggtaagatatttattgctcgccggtctcttctggatgagctcctggaagtggatcacatacggaccatttatcatatgtttattgccctgctgatcctgtttatcctgtcgactctggttgtggactatattgatgaagggcgcctggttcttgaatttagcctccttagctatgccttcgggaaatttcccacggtggtctggacttggtggataatgttcctgagtacattttccgtgccctatttcctgtttcaacactgggccactggctattccaaatcttcccatcccttgattcgaagcctttttcatgggttcctgtttatgatcttccagataggcgtgttaggatttggtcccacctacgttgttctcgcatacactctgcctccagcatcacggttcatcatcattttcgagcaatag

SEQ ID NO: 298825 - DNA, 783 bp, Artificial Sequence
  derived and/or modified sequence
atggtgggcgaagaaaaaatgagtcttcggaacagactgtccaagagcagggaaaatccagaggaagatgaggatcagcggaatcctgccaaagaatccctggaaacccctagtaacggcagaatagatataaaacagctcattgccaagaagatcaagctgaccgccgaagctgaagagctgaaaccgtttttcatgaaagaagttggctctcatttcgatgactttgtcaccaatctgattgagaagagcgcctcccttgacaacggcggatgtgccctgaccacgttctcggttctcgaaggtgaaaagaataaccatcgggctaaagatctgagggcccctccagagcaggggaagatctttatcgccagaagatctctgcttgacgagctacttgaggttgatcacattcgcactatctaccatatgtttattgccttacttatcttgttcattctgtctacccttgtagtagattatattgacgagggacgactggttctcgagttctctcttttaagttatgcatttggcaaattccctaccgtcgtctggacatggtggatcatgtttctgtcgacgtttagtgtcccatactttctctttcagcactgggcaactggttattctaagtcctcacatccgctgatcagaagtctatttcacggatttctgttcatgattttccagatcggggtgttggggttcggacctacctatgtggttctggcctacaccctgccacctgcttctaggtttataataattttcgagcaatag

SEQ ID NO: 298826 - DNA, 870 bp, Artificial Sequence
  derived and/or modified sequence
gtattagcaagacatgaaaatctgtaggggcaccagaacctttaatcaagctcatgttttattgtaaaatattaggatgtagacaatacaatggtgggtgaagagaagatgtctctaagaaaccggctgtcaaagtccagggaaaatcctgaggaagatgaagaccagagaaaccctgcaaaggagtccctagagacacctagtaatggtcgaattgacataaaacagttgatagcaaagaagataaagttgacagcagaggcagaggaattgaagccattttttatgaaggaagttggcagtcactttgatgattttgtgaccaatctcattgaaaagtcagcatcattagataatggtgggtgcgctctcacaaccttttctgttcttgaaggagagaaaaacaaccatagagcgaaggatttgagagcacctccagaacaaggaaagatttttattgcaaggcgctctctcttagatgaactgcttgaagtggaccacatcagaacaatatatcacatgtttattgccctcctcattctctttatcctcagcacacttgtagtagattacattgatgaaggaaggctggtgcttgagttcagcctcctgtcttatgcttttggcaaatttcctaccgttgtttggacctggtggatcatgttcctgtctacattttcagttccctattttctgtttcaacattgggccactggctatagcaagagttctcatccgctgatccgttctctcttccatggctttcttttcatgatcttccagattggagttctaggttttggaccaacatatgttgtgttagcatatacactgccaccagcttcccggttcatcattatattcgagcag

SEQ ID NO: 298827 - protein, 522 aa, Artificial Sequence
  derived and/or modified sequence
MNINDLKLTLSKAGQEHLLRFWNELEEAQQVELYAELQAMNFEELNFFFQKAIEGFNQSSHQKNVDARMEPVPREVLGSATRDQDQLQAWESEGLFQISQNKVAVLLLAGGQGTRLGVAYPKGMYDVGLPSRKTLFQIQAERILKLQQVAEKYYGNKCIIPWYIMTSGRTMESTKEFFTKHKYFGLKKENVIFFQQGMLPAMSFDGKIILEEKNKVSMAPDGNGGLYRALAAQNIVEDMEQRGIWSIHVYCVDNILVKVADPRFIGFCIQKGADCGAKVVEKTNPTEPVGVVCRVDGVYQVVEYSEISLATAQKRSSDGRLLFNAGNIANHFFTVPFLRDVVNVYEPQLQHHVAQKKIPYVDTQGQLIKPDKPNGIKMEKFVFDIFQFAKKFVVYEVLREDEFSPLKNADSQNGKDNPTTARHALMSLHHCWVLNAGGHFIDENGSRLPAIPRSATNGKSETITADVNHNLKDANDVPIQCEISPLISYAGEGLESYVADKEFHAPLIIDENGVHELVKNGI

SEQ ID NO: 298828 - protein, 220 aa, Artificial Sequence
  derived and/or modified sequence
MNINDLKLTLSKAGQEHLLRFWNELEEAQQVELYAELQAMNFEELNFFFQKAIEGFNQSSHQKNVDARMEPVPREVLGSATRDQDQLQAWESEGLFQISQNKVAVLLLAGGQGTRLGVAYPKGMYDVGLPSRKTLFQIQAERILKLQQVAEKYYGNKCIIPWYIMTSGRTMESTKEFFTKHKYFGLKKENVIFFQQGMLPAMSFDGKIILEEKNKVSMAP

SEQ ID NO: 298829 - DNA, 1569 bp, Artificial Sequence
  derived and/or modified sequence
atgaacatcaacgacctgaagctgaccctgagcaaggccggccaggagcacctgctgagattctggaacgagctggaggaggcccagcaggtggagctgtacgccgagctgcaggccatgaacttcgaggagctgaacttcttcttccagaaggccatcgagggcttcaaccagagcagccaccagaagaacgtggacgccagaatggagcccgtgcccagagaggtgctgggcagcgccaccagagaccaggaccagctgcaggcctgggagagcgagggcctgttccagatcagccagaacaaggtggccgtgctgctgctggccggcggccagggcaccagactgggcgtggcctaccccaagggcatgtacgacgtgggcctgcccagcagaaagaccctgttccagatccaggccgagagaatcctgaagctgcagcaggtggccgagaagtactacggcaacaagtgcatcatcccctggtacatcatgaccagcggcagaaccatggagagcaccaaggagttcttcaccaagcacaagtacttcggcctgaagaaggagaacgtgatcttcttccagcagggcatgctgcccgccatgagcttcgacggcaagatcatcctggaggagaagaacaaggtgagcatggcccccgacggcaacggcggcctgtacagagccctggccgcccagaacatcgtggaggacatggagcagagaggcatctggagcatccacgtgtactgcgtggacaacatcctggtgaaggtggccgaccccagattcatcggcttctgcatccagaagggcgccgactgcggcgccaaggtggtggagaagaccaaccccaccgagcccgtgggcgtggtgtgcagagtggacggcgtgtaccaggtggtggagtacagcgagatcagcctggccaccgcccagaagagaagcagcgacggcagactgctgttcaacgccggcaacatcgccaaccacttcttcaccgtgcccttcctgagagacgtggtgaacgtgtacgagccccagctgcagcaccacgtggcccagaagaagatcccctacgtggacacccagggccagctgatcaagcccgacaagcccaacggcatcaagatggagaagttcgtgttcgacatcttccagttcgccaagaagttcgtggtgtacgaggtgctgagagaggacgagttcagccccctgaagaacgccgacagccagaacggcaaggacaaccccaccaccgccagacacgccctgatgagcctgcaccactgctgggtgctgaacgccggcggccacttcatcgacgagaacggcagcagactgcccgccatccccagaagcgccaccaacggcaagagcgagaccatcaccgccgacgtgaaccacaacctgaaggacgccaacgacgtgcccatccagtgcgagatcagccccctgatcagctacgccggcgagggcctggagagctacgtggccgacaaggagttccacgcccccctgatcatcgacgagaacggcgtgcacgagctggtgaagaacggcatctag

SEQ ID NO: 298830 - DNA, 1569 bp, Artificial Sequence
  derived and/or modified sequence
atgaatattaacgatcttaagctgacactgtccaaggctggacaggagcacttgctgcgtttctggaacgagttggaggaggctcagcaggtagagctctatgcggaacttcaggcaatgaatttcgaagaactaaatttcttctttcaaaaagctatcgagggattcaaccagagcagccatcaaaagaacgtggatgcgcgcatggagccagtgccaagagaagtgttgggcagtgcgacacgcgatcaggaccagttacaggcttgggagagcgagggcctgtttcaaatcagtcagaataaagttgcggtgctcttgcttgccggaggccaaggaacgcggctgggagtggcatatccaaagggtatgtatgacgtgggcctgccctccaggaagacactatttcagattcaagcagagcgaatcctcaaactacagcaggtcgctgagaaatattacggaaacaaatgtatcatcccctggtacattatgacatcaggacgaacgatggaatcaaccaaggagttctttacaaaacataagtacttcggcttgaagaaggaaaatgttattttttttcagcaaggaatgctccctgccatgtcgttcgacgggaagataatccttgaagagaaaaataaagtatctatggcccctgatggcaacggggggctgtaccgcgccctggctgctcagaacatcgttgaggacatggagcagagaggtatctggtccatccatgtatactgcgtcgataatatcttggtgaaggtggctgacccgcggtttatcgggttctgcatccaaaagggtgctgattgtggcgctaaagtggttgaaaaaaccaatcctacggagcctgtcggcgtggtctgccgcgtggatggcgtctaccaggtggtggaatactccgagatcagtctggcgacggcacagaagaggagtagcgatgggcggctgctgttcaacgcgggcaatatcgccaatcatttttttacggtgcccttcttgcgggacgttgtaaacgtttatgagcctcagctccagcaccatgtggcccaaaaaaagatcccatatgttgacacgcaaggtcaactgatcaagccagataaaccaaatggaattaagatggaaaagtttgtgttcgatatatttcagttcgccaaaaagtttgtggtttacgaagttcttcgagaagatgagttttctcccctcaagaatgctgactcacagaatggcaaagacaatcctacgacagcacggcacgccctgatgagtttgcatcactgttgggttctcaacgcgggtggccactttatagacgaaaatggaagtcgactccccgccattccccgtagcgccaccaatggcaaaagtgagacaatcaccgcagatgtgaatcacaacctgaaggacgccaatgatgtgccaatccagtgtgagatctcgcctcttatatcctacgcgggcgagggcctcgagtcttatgtcgctgacaaggagttccacgctcctttgatcatcgacgagaatggcgtccacgagctggttaaaaacggaatttag

SEQ ID NO: 298831 - DNA, 1569 bp, Artificial Sequence
  derived and/or modified sequence
atgaatattaatgacctgaaattaaccctttctaaggcaggccaggaacatctcctgagattctggaacgagctagaggaggctcagcaggtagagctgtacgctgaacttcaggcgatgaacttcgaggaactcaatttcttcttccagaaggcaattgagggatttaatcagtcctcgcaccagaagaacgttgacgcgcgaatggaaccagttccccgcgaggtcctgggcagcgcaaccagggaccaggatcagctccaggcttgggagtcagaaggtctcttccagattagccaaaacaaggtcgctgtcctattattggctggcgggcagggaacccggcttggtgtggcataccctaagggtatgtacgatgtgggattgccctcacggaagacgttattccagatccaagccgaaagaattctgaagctgcaacaggtggccgaaaaatattatggcaataaatgcatcattccgtggtatataatgacttcagggcggacgatggagtctacaaaggaatttttcaccaagcataagtacttcggcctaaaaaaggaaaacgtcatattctttcaacaaggaatgctcccagccatgagttttgacgggaagatcatcctggaagaaaaaaacaaagttagcatggcccccgatggcaacggaggtctgtaccgcgcccttgctgcccagaacatagtggaggacatggagcagaggggcatttggtctatccacgtctactgtgtggacaatatccttgtcaaggttgcggacccacgcttcatcggtttctgtattcagaaaggagcggactgcggcgctaaggtggttgaaaaaaccaacccaactgagcccgtcggcgtggtatgccgcgttgacggagtgtaccaggttgtggaatactctgagatctcactagcgacagcccagaagcggtcgtctgacgggcgtctcctctttaacgctggcaatattgctaaccacttctttactgttccgtttctgcgggacgtggtaaatgtatacgagccccaactccagcatcatgtggcccagaagaaaatcccatacgttgacactcagggtcagctgatcaaaccagataagccaaacggaattaagatggagaagtttgtctttgatatcttccagttcgctaagaaattcgtcgtgtatgaggtcctgcgcgaagacgagttttcgccactgaaaaacgccgacagccaaaacggcaaagacaacccaaccacggcccgccatgctttaatgagtctgcaccactgctgggtgctaaatgccggcggtcacttcatcgacgaaaacggatcacggcttcctgccatccccaggtccgctaccaacggtaaatcagaaactattaccgccgacgtgaatcacaacctcaaggacgcgaacgacgtccccattcagtgcgagatctcaccgctcatttcctatgcaggggaaggccttgaaagctacgtggcagacaaagaattccatgctccactaatcatagacgagaacggggtgcacgaattagtcaaaaatggcatctag

SEQ ID NO: 298832 - DNA, 1569 bp, Artificial Sequence
  derived and/or modified sequence
atgaacatcaatgacctgaagctgaccctgagcaaggccggccaggagcacctgctgcgcttctggaatgagctggaggaggcccagcaggtggagctgtatgcagagctgcaggccatgaactttgaggagctgaacttcttcttccagaaggccatcgagggcttcaaccagagcagccaccagaagaatgtggatgccaggatggagcctgtgccccgggaggtgctgggcagcgccacccgggaccaggaccagctgcaggcctgggagagcgagggcctcttccagatcagccagaacaaggtggccgtgctgctgctggccggcggccagggcacccggctgggcgtggcctaccccaagggcatgtatgatgtgggcctgcccagcaggaagaccctcttccagatccaggccgagcgcatcctgaagctgcagcaggtggccgagaagtactacggcaacaagtgcatcatcccctggtacatcatgaccagcggccgcaccatggagagcaccaaggagttcttcaccaagcacaagtacttcggcctgaagaaggaaaatgtcatcttcttccagcagggcatgctgcctgccatgagctttgatggcaagatcatcctggaggagaagaacaaggtgtccatggccccagatggaaatggaggcctgtaccgggccctggccgcccagaacatcgtggaggacatggagcagaggggcatctggagcatccacgtgtactgtgtggacaacatcctggtgaaggtggccgacccccgcttcatcggcttctgcatccagaagggagctgactgtggggccaaggtggtggagaagaccaaccccacagagcctgtgggcgtggtgtgccgggtggatggagtgtaccaggtggtggagtacagcgagatcagcctggccacagcccagaagaggagcagtgatggccgcctgctcttcaatgccggcaacatcgccaaccacttcttcaccgtgcccttcctgagagatgtggtgaatgtgtatgagccccagctgcagcaccacgtggcccagaagaagatcccctacgtggacacccagggccagctgatcaagccagacaagcccaacggcatcaagatggagaagtttgtgtttgacatcttccagtttgccaagaagtttgtggtgtatgaggtgctgcgggaggatgagttcagccccctgaagaatgctgacagccagaatggcaaggacaaccccaccacagcccggcatgccctgatgagcctgcaccactgctgggtgctgaatgctgggggccacttcattgatgaaaatggcagccggctgcctgccatccccaggtctgccaccaacgggaagtctgagaccatcacagcagatgtgaaccacaacctgaaggatgccaatgatgtgcccatccagtgtgagatcagccccctcatctcctatgctggggagggcctggagagctatgtggccgacaaggagttccacgcccccctcatcattgatgaaaatggagtgcatgagctggtgaagaatggcatctag

SEQ ID NO: 298833 - DNA, 1569 bp, Artificial Sequence
  derived and/or modified sequence
atgaacatcaacgacctgaagctgaccctgagcaaggccggccaggagcacttgctcagattctggaacgagcttgaagaagctcagcaggtagaactctacgcagaactccaagccatgaattttgaggaactgaatttcttttttcagaaggcgattgaagggtttaaccagtcaagccaccaaaagaatgtcgacgccaggatggagcccgtgcctagagaggtattgggatcagctacacgcgatcaggaccagctgcaggcctgggagtccgaaggactgtttcaaattagccagaacaaggttgcggttcttcttctagccgggggccagggcacacgcctgggagtggcttatccgaaaggaatgtatgatgtcggacttccctcccggaaaaccctgttccagatccaggcggagcgaatcctgaagttacagcaggtcgctgagaagtattatggtaataagtgcatcatcccctggtatattatgaccagcggacgaaccatggagagtactaaggagtttttcacaaagcataagtactttggtctgaaaaaagagaatgtcatcttctttcagcaggggatgctccccgctatgtcttttgacggaaaaataatccttgaagaaaaaaacaaggttagtatggctcccgatggcaatggcggcctatatagagcccttgcagcccagaacatcgtagaggacatggaacagagagggatctggagcatccacgtgtattgcgtggacaacatactggtgaaagttgcagacccccgctttattggtttctgtatccagaagggtgctgactgcggagccaaagtggtcgagaagacaaatcctaccgagccagttggtgtggtgtgtcgagtagatggcgtatatcaagtggtggagtatagcgagatctctctcgccactgcccagaaacgatcatccgatgggcggctcctctttaatgccgggaatatcgccaaccattttttcactgtgccctttttacgcgatgttgtaaacgtgtatgagccacagttacaacatcacgtcgcccagaagaagatcccctatgtggatactcagggacagctgattaaacccgacaagccaaatggcatcaaaatggagaagttcgtttttgatatcttccagtttgcgaagaagttcgtcgtctacgaggtcctgcgggaggacgagttcagccctttaaagaacgctgactctcagaatggtaaggacaatccaaccaccgcacgtcatgcccttatgtctttgcatcactgctgggtcttaaacgcaggtggccactttatcgatgaaaatgggtctagactccccgccatacctcggtctgctactaacggcaagtctgaaaccataacggcagacgtgaaccataatctgaaggacgctaatgacgtgcccatccagtgcgagatctcaccccttatctcttacgctggcgaaggactggagtcttatgtggccgacaaggagttccatgccccccttattatcgacgaaaatggggtacatgaactggtaaaaaacggaatatag

SEQ ID NO: 298834 - DNA, 1569 bp, Artificial Sequence
  derived and/or modified sequence
atgaacatcaacgacctgaagctgaccctgagcaaggccggccaggaacatctactgcgcttctggaacgaactggaagaggcacagcaggtggaactctacgcagagctgcaggcgatgaacttcgaagagctgaatttctttttccagaaggccatagaaggctttaaccagagttcacaccagaagaatgtcgacgcccgaatggagccggtgcctcgagaggtgctgggctcggccactagggatcaggatcaacttcaggcctgggagagcgaagggctgttccagatcagccagaataaggtggctgtactgttattggcaggcggacagggaactcgtctgggagttgcctaccccaaaggaatgtacgatgtcggactgcctagccgaaaaaccttgtttcagatccaggcagagcggatcctgaagctgcagcaagtggccgagaagtattacggcaacaaatgtatcatcccatggtacataatgaccagcgggcgcactatggaatccaccaaagagtttttcactaagcacaagtatttcgggctaaaaaaggagaacgtgatcttcttccagcagggcatgctccctgccatgtcctttgatgggaaaatcatcttggaagagaaaaataaggtatctatggccccagacgggaatggcggactttatcgtgcacttgccgcacagaatatagtcgaagacatggagcagcgcgggatctggagcatccatgtgtactgtgtcgataacattctggtgaaggtggctgatcctagatttattgggttctgcattcagaagggcgccgactgtggagcaaaggtagtcgagaaaaccaacccgacagagccagtgggggtcgtgtgtagggtggatggggtctatcaagttgtggagtattctgagatctcactggcgacggcccaaaaacggtccagcgacggccgcttactgtttaacgcaggaaatattgcaaatcacttttttaccgtcccgtttctacgcgatgtagtgaacgtttacgaaccacagctgcaacaccacgtggcccagaagaagataccctacgtcgacacacaagggcagttaatcaagccagacaaacccaacggtataaaaatggaaaaattcgttttcgatatttttcaattcgctaagaagttcgtggtctatgaagtgttacgagaggatgagttctcacccctgaagaatgctgactcccagaatgggaaagacaaccccacaacagccagacacgcgctcatgtctctgcaccactgttgggttttgaatgcaggtgggcacttcattgatgaaaatggttcccgccttcccgctataccacggagcgcaacaaacggaaaatcagaaacgatcaccgccgacgtgaaccacaacttaaaagacgccaatgatgtgcccatccagtgcgaaatctctcctctgatttcgtacgctggggagggcttagaatcatacgtggctgacaaggagtttcatgctcccctcattatcgatgagaatggagttcacgaattggtcaagaacggcatttag

SEQ ID NO: 298835 - DNA, 1569 bp, Artificial Sequence
  derived and/or modified sequence
atgaatataaatgacttgaaactgaccctgtccaaggcaggccaggagcatctgctgagattctggaatgagctggaggaggcacagcaagtggagctatatgccgagctgcaggcgatgaatttcgaggaactgaatttcttcttccagaaggctattgagggcttcaatcaatccagtcatcaaaagaacgtcgacgcacgtatggagccagtgcctcgagaagtgctgggatcagcaactagggatcaggaccagctacaggcttgggagtccgagggtctgttccaaatttcccagaataaagtggcagttctactccttgcgggaggccaggggacccgactgggggtggcctacccaaagggaatgtacgacgtcggtttacccagccgcaaaacactttttcaaatccaggcagagcgcatcctgaaactccagcaggtggcagaaaagtactatggcaataagtgtattatcccatggtacattatgacatcaggcaggaccatggagagtacaaaagagttcttcaccaaacataagtacttcgggctgaaaaaggagaatgtaatttttttccagcaagggatgctgccagcgatgtcgttcgatgggaagattattcttgaagaaaaaaataaggtgtccatggcccctgatggaaacggcggactctatagagctctcgccgcacagaacatcgttgaggacatggaacaacggggaatttggagcattcacgtgtactgtgtcgataacatactcgtcaaagtagctgaccccagattcatcggcttttgcatccaaaagggggctgattgcggagctaaggtggtcgaaaagactaatcccaccgagcccgtcggagtcgtgtgccgagttgatggagtgtatcaggtcgtcgagtatagtgaaatcagtctggccacagcgcagaagcggagtagtgacggcagactgctgttcaacgcaggcaacattgcgaaccattttttcactgtccctttcctcagggacgtggtgaacgtctacgaaccccagttgcaacaccatgttgcccagaaaaaaataccctacgttgatacacaaggccagctaatcaaacccgataagccaaacggaatcaagatggaaaagtttgtttttgatatttttcagtttgctaagaaattcgtcgtgtacgaagtgctgcgagaggacgaatttagtccgctcaagaatgctgatagtcagaatggcaaggacaaccctacaaccgcaaggcatgctctcatgtccctccaccactgttgggtgttgaatgcaggaggccatttcattgacgagaatgggtcacgactgcctgctattcccaggtccgccaccaatggaaagtctgaaaccattactgcagatgtcaatcacaatctgaaggatgcgaacgacgtcccaattcagtgtgagatatcacctctaatatcatacgccggagaggggctagagtcctatgtcgcagacaaggagtttcacgctcccctgatcatagatgagaacggagtccacgaactagtaaagaacgggatatag

SEQ ID NO: 298836 - DNA, 1569 bp, Artificial Sequence
  derived and/or modified sequence
atgaacatcaacgatttaaaactgacattgtccaaagccggacaggagcatctactgcgcttttggaacgaacttgaggaagcacagcaggtagagctctacgcagaactccaagcaatgaattttgaggagctgaactttttctttcagaaggctatcgaaggattcaatcagtcatctcaccagaagaatgtggacgctagaatggagcccgtgcccagagaagtgttgggcagcgctaccagagatcaggatcagctccaggcatgggagtcggagggcctctttcagatttcacagaataaggtggcagtgctgctgttggcgggaggacagggcacccgattaggtgtggcttacccaaagggcatgtacgatgtcggattacctagtcggaagaccttgttccagatccaggcagagagaatcctgaagctgcaacaggtggccgagaaatactatggaaacaaatgcatcatcccatggtacatcatgacttccggcagaactatggaaagcaccaaggaattctttaccaagcacaagtacttcggactcaagaaggagaacgtgattttctttcagcagggcatgttaccagcgatgtctttcgacggcaagatcattttagaggagaaaaacaaggtgtcaatggccccagacgggaacggtggcctgtatcgggcactggccgcacagaatatcgttgaggacatggagcagcggggtatctggagcatacacgtgtattgcgtggacaatatcctggtgaaagttgctgatcctagattcatcgggttctgtatacagaagggagctgattgcggcgctaaagtggtcgagaagaccaatcccacagagcccgttggcgtcgtgtgccgtgtcgatggagtctatcaggtcgtggaatactccgagatcagtttggcgaccgctcagaagagatcctctgatggtcgcctgctcttcaacgctggcaatatcgctaaccattttttcacggtaccctttctgcgtgacgtagtaaatgtgtatgaaccacagctgcagcatcacgtggctcaaaagaagatcccctacgtggacactcagggtcagcttatcaagcctgataagcccaacggcattaagatggaaaagttcgtatttgacatttttcagttcgctaagaagtttgttgtctatgaagtgctgagagaagatgaattttcaccactgaagaacgccgacagccagaatggcaaagataaccccacgactgccagacacgccttaatgtctctgcatcattgctgggtgctgaatgcaggcggtcattttatcgacgagaatgggtcccgtctccctgctattccccgatcagctacgaatggcaagtctgaaactatcacagccgatgttaatcataatctaaaggatgcgaatgacgtgccaattcagtgtgagatttctcccctgatcagctacgcaggagagggcctcgagagctatgtcgcggacaaggagtttcacgcgccactgattattgacgagaatggagtgcatgaactcgtgaaaaacggcatctag

SEQ ID NO: 298837 - DNA, 2344 bp, Artificial Sequence
  derived and/or modified sequence
ctgtgctcccggcgctgacgtgtctgggcggtcggcttccactccttcaggcgtcggcagccactagtcgtggcgagaggggcggggtggccggggctggcgctccacttggcccccgctcccggcccgccccgccgccgcggccccccggatgagggtatatattcggagcgagcgcgggacgccgatgagtggccgcgcggaaggagctggagacggtcgtagctgcggtcgcgccgagaaaggtttacaggtacatacattacacccctatttctacaaagcttggctattagagcattatgaacattaatgacctcaaactcacgttgtccaaagctgggcaagagcacctactacgtttctggaatgagcttgaagaagcccaacaggtagaactttatgcagagctccaggccatgaactttgaggagctgaacttctttttccaaaaggccattgaaggttttaaccagtcttctcaccaaaagaatgtggatgcacgaatggaacctgtgcctcgagaggtattaggcagtgctacaagggatcaagatcagctccaggcctgggaaagtgaaggacttttccagatttctcagaataaagtagcagttcttcttctagctggtgggcaggggacaagactcggcgttgcatatcctaaggggatgtatgatgttggtttgccatcccgtaagacactttttcagattcaagcagagcgtatcctgaagctacagcaggttgctgaaaaatattatggcaacaaatgcattattccatggtatataatgaccagtggcagaacaatggaatctacaaaggagttcttcaccaagcacaagtactttggtttaaaaaaagagaatgtaatcttttttcagcaaggaatgctccccgccatgagttttgatgggaaaattattttggaagagaagaacaaagtttctatggctccagatgggaatggtggtctttatcgggcacttgcagcccagaatattgtggaggatatggagcaaagaggcatttggagcattcatgtctattgtgttgacaacatattagtaaaagtggcagacccacggttcattggattttgcattcagaaaggagcagactgtggagcaaaggtggtagagaaaacgaaccctacagaaccagttggagtggtttgccgagtggatggagtttaccaggtggtagaatatagtgagatttccctggcaacagctcaaaaacgaagctcagacggacgactgctgttcaatgcggggaacattgccaaccatttcttcactgtaccatttctgagagatgttgtcaatgtttatgaacctcagttgcagcaccatgtggctcaaaagaagattccttatgtggatacccaaggacagttaattaagccagacaaacccaatggaataaagatggaaaaatttgtctttgacatcttccagtttgcaaagaagtttgtggtatatgaagtattgcgagaagatgagttttccccactaaagaatgctgatagtcagaatgggaaagacaaccctactactgcaaggcatgctttgatgtcccttcatcattgctgggtcctcaatgcagggggccatttcatagatgaaaatggctctcgccttccagcaattccccgcagtgctacaaatgggaagtcagagaccatcacagctgatgtcaatcacaacttgaaggatgccaatgatgtaccaatccaatgtgaaatctctcctcttatctcctatgctggagaaggattagaaagttatgtggcagataaagaattccatgcacctctaatcatcgatgagaatggagttcatgagctggtgaaaaatggtatttgaaccagataccaagttttgtttgccacgataggaatagcttttatttttgatagaccaactgtgaacctacaagacgtcttggacaactgaagtttaaatatccacagggttttattttgcttgttgaactcttagagctattgcaaacttcccaagatccagatgactgaatttcagatagcatttttatgattcccaactcattgaaggtcttatttatataattttttccaagccaaggagaccattggccatccaggaaatttcgtacagctgaaatataggcaggatgttcaacatcagtttacttgcagctggaagcatttgtttttgaagttgtacatagtaataatatgtcattgtacatgttgaaaggtttctatggtactaaaagtttgttttattttatcaaacattaagcttttttaagaaaataattgggcagtgaaataaatgtatcttcttgtctctgg

SEQ ID NO: 298838 - DNA, 2069 bp, Artificial Sequence
  derived and/or modified sequence
ctatttctacaaagcttggctattagagcattatgaacattaatgacctcaaactcacgttgtccaaagctgggcaagagcacctactacgtttctggaatgagcttgaagaagcccaacaggtagaactttatgcagagctccaggccatgaactttgaggagctgaacttctttttccaaaaggccattgaaggttttaaccagtcttctcaccaaaagaatgtggatgcacgaatggaacctgtgcctcgagaggtattaggcagtgctacaagggatcaagatcagctccaggcctgggaaagtgaaggacttttccagatttctcagaataaagtagcagttcttcttctagctggtgggcaggggacaagactcggcgttgcatatcctaaggggatgtatgatgttggtttgccatcccgtaagacactttttcagattcaagcagagcgtatcctgaagctacagcaggttgctgaaaaatattatggcaacaaatgcattattccatggtatataatgaccagtggcagaacaatggaatctacaaaggagttcttcaccaagcacaagtactttggtttaaaaaaagagaatgtaatcttttttcagcaaggaatgctccccgccatgagttttgatgggaaaattattttggaagagaagaacaaagtttctatggctccagatgggaatggtggtctttatcgggcacttgcagcccagaatattgtggaggatatggagcaaagaggcatttggagcattcatgtctattgtgttgacaacatattagtaaaagtggcagacccacggttcattggattttgcattcagaaaggagcagactgtggagcaaaggtggtagagaaaacgaaccctacagaaccagttggagtggtttgccgagtggatggagtttaccaggtggtagaatatagtgagatttccctggcaacagctcaaaaacgaagctcagacggacgactgctgttcaatgcggggaacattgccaaccatttcttcactgtaccatttctgagagatgttgtcaatgtttatgaacctcagttgcagcaccatgtggctcaaaagaagattccttatgtggatacccaaggacagttaattaagccagacaaacccaatggaataaagatggaaaaatttgtctttgacatcttccagtttgcaaagaagtttgtggtatatgaagtattgcgagaagatgagttttccccactaaagaatgctgatagtcagaatgggaaagacaaccctactactgcaaggcatgctttgatgtcccttcatcattgctgggtcctcaatgcagggggccatttcatagatgaaaatggctctcgccttccagcaattccccgcagtgctacaaatgggaagtcagagaccatcacagctgatgtcaatcacaacttgaaggatgccaatgatgtaccaatccaatgtgaaatctctcctcttatctcctatgctggagaaggattagaaagttatgtggcagataaagaattccatgcacctctaatcatcgatgagaatggagttcatgagctggtgaaaaatggtatttgaaccagataccaagttttgtttgccacgataggaatagcttttatttttgatagaccaactgtgaacctacaagacgtcttggacaactgaagtttaaatatccacagggttttattttgcttgttgaactcttagagctattgcaaacttcccaagatccagatgactgaatttcagatagcatttttatgattcccaactcattgaaggtcttatttatataattttttccaagccaaggagaccattggccatccaggaaatttcgtacagctgaaatataggcaggatgttcaacatcagtttacttgcagctggaagcatttgtttttgaagttgtacatagtaataatatgtcattgtacatgttgaaaggtttctatggtactaaaagtttgttttattttatcaaacattaagcttttttaagaaaataattgggcagtgaaataaatgtatcttcttgtc

SEQ ID NO: 298839 - protein, 2416 aa, Artificial Sequence
  derived and/or modified sequence
MEQFPKETVVESSGPKVLETAEEIQERRQEVLTRYQSFKERVAERGQKLEDSYHLQVFKRDADDLGKWIMEKVNILTDKSYEDPTNIQGKYQKHQSLEAEVQTKSRLMSELEKTREERFTMGHSAHEETKAHIEELRHLWDLLLELTLEKGDQLLRALKFQQYVQECADILEWIGDKEAIATSVELGEDWERTEVLHKKFEDFQVELVAKEGRVVEVNQYANECAEENHPDLPLIQSKQNEVNAAWERLRGLALQRQKALSNAANLQRFKRDVTEAIQWIKEKEPVLTSEDYGKDLVASEGLFHSHKGLERNLAVMSDKVKELCAKAEKLTLSHPSDAPQIQEMKEDLVSSWEHIRALATSRYEKLQATYWYHRFSSDFDELSGWMNEKTAAINADELPTDVAGGEVLLDRHQQHKHEIDSYDDRFQSADETGQDLVNANHEASDEVREKMEILDNNWTALLELWDERHRQYEQCLDFHLFYRDSEQVDSWMSRQEAFLENEDLGNSLGSAEALLQKHEDFEEAFTAQEEKIITVDKTATKLIGDDHYDSENIKAIRDGLLARRDALREKAATRRRLLKESLLLQKLYEDSDDLKNWINKKKKLADDEDYKDIQNLKSRVQKQQVFEKELAVNKTQLENIQKTGQEMIEGGHYASDNVTTRLSEVASLWEELLEATKQKGTQLHEANQQLQFENNAEDLQRWLEDVEWQVTSEDYGKGLAEVQNRLRKHGLLESAVAARQDQVDILTDLAAYFEEIGHPDSKDIRARQESLVCRFEALKEPLATRKKKLLDLLHLQLICRDTEDEEAWIQETEPSATSTYLGKDLIASKKLLNRHRVILENIASHEPRIQEITERGNKMVEEGHFAAEDVASRVKSLNQNMESLRARAARRQNDLEANVQFQQYLADLHEAETWIREKEPIVDNTNYGADEEAAGALLKKHEAFLLDLNSFGDSMKALRNQANACQQQQAAPVEGVAGEQRVMALYDFQARSPREVTMKKGDVLTLLSSINKDWWKVEAADHQGIVPAVYVRRLAHDEFPMLPQRRREEPGNITQRQEQIENQYRSLLDRAEERRRRLLQRYNEFLLAYEAGDMLEWIQEKKAENTGVELDDVWELQKKFDEFQKDLNTNEPRLRDINKVADDLLFEGLLTPEGAQIRQELNSRWGSLQRLADEQRQLLGSAHAVEVFHREADDTKEQIEKKCQALSAADPGSDLFSVQALQRRHEGFERDLVPLGDKVTILGETAERLSESHPDATEDLQRQKMELNEAWEDLQGRTKDRKESLNEAQKFYLFLSKARDLQNWISSIGGMVSSQELAEDLTGIEILLERHQEHRADMEAEAPTFQALEDFSAELIDSGHHASPEIEKKLQAVKLERDDLEKAWEKRKKILDQCLELQMFQGNCDQVESWMVARENSLRSDDKSSLDSLEALMKKRDDLDKAITAQEGKITDLEHFAESLIADEHYAKEEIATRLQRVLDRWKALKAQLIDERTKLGDYANLKQFYRDLEELEEWISEMLPTACDESYKDATNIQRKYLKHQTFAHEVDGRSEQVHGVINLGNSLIECSACDGNEEAMKEQLEQLKEHWDHLLERTNDKGKKLNEASRQQRFNTSIRDFEFWLSEAETLLAMKDQARDLASAGNLLKKHQLLEREMLAREDALKDLNTLAEDLLSSGTFNVDQIVKKKDNVNKRFLNVQELAAAHHEKLKEAYALFQFFQDLDDEESWIEEKLIRVSSQDYGRDLQGVQNLLKKHKRLEGELVAHEPAIQNVLDMAEKLKDKAAVGQEEIQLRLAQFVEHWEKLKELAKARGLKLEESLEYLQFMQNAEEEEAWINEKNALAVRGDCGDTLAATQSLLMKHEALENDFAVHETRVQNVCAQGEDILNKEESQNKEISSKIEALNEKTPSLAKAIAAWKLQLEDDYAFQEFNWKADVVEAWIADKETSLKTNGNGADLGDFLTLLAKQDTLDASLQSFQQERLPEITDLKDKLISAQHNQSKAIEERYAALLKRWEQLLEASAVHRQKLLEKQLPLQKAEDLFVEFAHKASALNNWCEKMEENLSEPVHCVSLNEIRQLQKDHEDFLASLARAQADFKCLLELDQQIKALGVPSSPYTWLTVEVLERTWKHLSDIIEEREQELQKEEARQVKNFEMCQEFEQNASTFLQWILETRAYFLDGSLLKETGTLESQLEANKRKQKEIQAMKRQLTKIVDLGDNLEDALILDIKYSTIGLAQQWDQLYQLGLRMQHNLEQQIQAKDIKGVSEETLKEFSTIYKHFDENLTGRLTHKEFRSCLRGLNYYLPMVEEDEHEPKFEKFLDAVDPGRKGYVSLEDYTAFLIDKESENIKSSDEIENAFQALAEGKSYITKEDMKQALTPEQVSFCATHMQQYMDPRGRSHLSGYDYVGFTNSYFGN

SEQ ID NO: 298840 - protein, 2419 aa, Artificial Sequence
  derived and/or modified sequence
MEQFPKETVVESSGPKVLETAEEIQERRQEVLTRYQSFKERVAERGQKLEDSYHLQVFKRDADDLGKWIMEKVNILTDKSYEDPTNIQGKYQKHQSLEAEVQTKSRLMSELEKTREERFTMGHSAHEETKAHIEELRHLWDLLLELTLEKGDQLLRALKFQQYVQECADILEWIGDKEAIATSVELGEDWERTEVLHKKFEDFQVELVAKEGRVVEVNQYANECAEENHPDLPLIQSKQNEVNAAWERLRGLALQRQKALSNAANLQRFKRDVTEAIQWIKEKEPVLTSEDYGKDLVASEGLFHSHKGLERNLAVMSDKVKELCAKAEKLTLSHPSDAPQIQEMKEDLVSSWEHIRALATSRYEKLQATYWYHRFSSDFDELSGWMNEKTAAINADELPTDVAGGEVLLDRHQQHKHEIDSYDDRFQSADETGQDLVNANHEASDEVREKMEILDNNWTALLELWDERHRQYEQCLDFHLFYRDSEQVDSWMSRQEAFLENEDLGNSLGSAEALLQKHEDFEEAFTAQEEKIITVDKTATKLIGDDHYDSENIKAIRDGLLARRDALREKAATRRRLLKESLLLQKLYEDSDDLKNWINKKKKLADDEDYKDIQNLKSRVQKQQVFEKELAVNKTQLENIQKTGQEMIEGGHYASDNVTTRLSEVASLWEELLEATKQKGTQLHEANQQLQFENNAEDLQRWLEDVEWQVTSEDYGKGLAEVQNRLRKHGLLESAVAARQDQVDILTDLAAYFEEIGHPDSKDIRARQESLVCRFEALKEPLATRKKKLLDLLHLQLICRDTEDEEAWIQETEPSATSTYLGKDLIASKKLLNRHRVILENIASHEPRIQEITERGNKMVEEGHFAAEDVASRVKSLNQNMESLRARAARRQNDLEANVQFQQYLADLHEAETWIREKEPIVDNTNYGADEEAAGALLKKHEAFLLDLNSFGDSMKALRNQANACQQQQAAPVEGVAGEQRVMALYDFQARSPREVTMKKGDVLTLLSSINKDWWKVEAADHQGIVPAVYVRRLAHDEFPMLPQRRREEPGNITQRQEQIENQYRSLLDRAEERRRRLLQRYNEFLLAYEAGDMLEWIQEKKAENTGVELDDVWELQKKFDEFQKDLNTNEPRLRDINKVADDLLFEGLLTPEGAQIRQELNSRWGSLQRLADEQRQLLGSAHAVEVFHREADDTKEQIEKKCQALSAADPGSDLFSVQALQRRHEGFERDLVPLGDKVTILGETAERLSESHPDATEDLQRQKMELNEAWEDLQGRTKDRKESLNEAQKFYLFLSKARDLQNWISSIGGMVSSQELAEDLTGIEILLERHQEHRADMEAEAPTFQALEDFSAELIDSGHHASPEIEKKLQAVKLERDDLEKAWEKRKKILDQCLELQMFQGNCDQVESWMVARENSLRSDDKSSLDSLEALMKKRDDLDKAITAQEGKITDLEHFAESLIADEHYAKEEIATRLQRVLDRWKALKAQLIDERTKLGDYANLKQFYRDLEELEEWISEMLPTACDESYKDATNIQRKYLKHQTFAHEVDGRSEQVHGVINLGNSLIECSACDGNEEAMKEQLEQLKEHWDHLLERTNDKGKKLNEASRQQRFNTSIRDFEFWLSEAETLLAMKDQARDLASAGNLLKKHQLLEREMLAREDALKDLNTLAEDLLSSGTFNVDQIVKKKDNVNKRFLNVQELAAAHHEKLKEAYALFQFFQDLDDEESWIEEKLIRVSSQDYGRDLQGVQNLLKKHKRLEGELVAHEPAIQNVLDMAEKLKDKAAVGQEEIQLRLAQFVEHWEKLKELAKARGLKLEESLEYLQFMQNAEEEEAWINEKNALAVRGDCGDTLAATQSLLMKHEALENDFAVHETRVQNVCAQGEDILNKVLQEESQNKEISSKIEALNEKTPSLAKAIAAWKLQLEDDYAFQEFNWKADVVEAWIADKETSLKTNGNGADLGDFLTLLAKQDTLDASLQSFQQERLPEITDLKDKLISAQHNQSKAIEERYAALLKRWEQLLEASAVHRQKLLEKQLPLQKAEDLFVEFAHKASALNNWCEKMEENLSEPVHCVSLNEIRQLQKDHEDFLASLARAQADFKCLLELDQQIKALGVPSSPYTWLTVEVLERTWKHLSDIIEEREQELQKEEARQVKNFEMCQEFEQNASTFLQWILETRAYFLDGSLLKETGTLESQLEANKRKQKEIQAMKRQLTKIVDLGDNLEDALILDIKYSTIGLAQQWDQLYQLGLRMQHNLEQQIQAKDIKGVSEETLKEFSTIYKHFDENLTGRLTHKEFRSCLRGLNYYLPMVEEDEHEPKFEKFLDAVDPGRKGYVSLEDYTAFLIDKESENIKSSDEIENAFQALAEGKSYITKEDMKQALTPEQVSFCATHMQQYMDPRGRSHLSGYDYVGFTNSYFGN

SEQ ID NO: 298841 - DNA, 7251 bp, Artificial Sequence
  derived and/or modified sequence
atggagcagttccccaaggagaccgtggtggagagcagcggccccaaggtgctggagaccgccgaggagatccaggagagaagacaggaggtgctgaccagataccagagcttcaaggagagagtggccgagagaggccagaagctggaggacagctaccacctgcaggtgttcaagagagacgccgacgacctgggcaagtggatcatggagaaggtgaacatcctgaccgacaagagctacgaggaccccaccaacatccagggcaagtaccagaagcaccagagcctggaggccgaggtgcagaccaagagcagactgatgagcgagctggagaagaccagagaggagagattcaccatgggccacagcgcccacgaggagaccaaggcccacatcgaggagctgagacacctgtgggacctgctgctggagctgaccctggagaagggcgaccagctgctgagagccctgaagttccagcagtacgtgcaggagtgcgccgacatcctggagtggatcggcgacaaggaggccatcgccaccagcgtggagctgggcgaggactgggagagaaccgaggtgctgcacaagaagttcgaggacttccaggtggagctggtggccaaggagggcagagtggtggaggtgaaccagtacgccaacgagtgcgccgaggagaaccaccccgacctgcccctgatccagagcaagcagaacgaggtgaacgccgcctgggagagactgagaggcctggccctgcagagacagaaggccctgagcaacgccgccaacctgcagagattcaagagagacgtgaccgaggccatccagtggatcaaggagaaggagcccgtgctgaccagcgaggactacggcaaggacctggtggccagcgagggcctgttccacagccacaagggcctggagagaaacctggccgtgatgagcgacaaggtgaaggagctgtgcgccaaggccgagaagctgaccctgagccaccccagcgacgccccccagatccaggagatgaaggaggacctggtgagcagctgggagcacatcagagccctggccaccagcagatacgagaagctgcaggccacctactggtaccacagattcagcagcgacttcgacgagctgagcggctggatgaacgagaagaccgccgccatcaacgccgacgagctgcccaccgacgtggccggcggcgaggtgctgctggacagacaccagcagcacaagcacgagatcgacagctacgacgacagattccagagcgccgacgagaccggccaggacctggtgaacgccaaccacgaggccagcgacgaggtgagagagaagatggagatcctggacaacaactggaccgccctgctggagctgtgggacgagagacacagacagtacgagcagtgcctggacttccacctgttctacagagacagcgagcaggtggacagctggatgagcagacaggaggccttcctggagaacgaggacctgggcaacagcctgggcagcgccgaggccctgctgcagaagcacgaggacttcgaggaggccttcaccgcccaggaggagaagatcatcaccgtggacaagaccgccaccaagctgatcggcgacgaccactacgacagcgagaacatcaaggccatcagagacggcctgctggccagaagagacgccctgagagagaaggccgccaccagaagaagactgctgaaggagagcctgctgctgcagaagctgtacgaggacagcgacgacctgaagaactggatcaacaagaagaagaagctggccgacgacgaggactacaaggacatccagaacctgaagagcagagtgcagaagcagcaggtgttcgagaaggagctggccgtgaacaagacccagctggagaacatccagaagaccggccaggagatgatcgagggcggccactacgccagcgacaacgtgaccaccagactgagcgaggtggccagcctgtgggaggagctgctggaggccaccaagcagaagggcacccagctgcacgaggccaaccagcagctgcagttcgagaacaacgccgaggacctgcagagatggctggaggacgtggagtggcaggtgaccagcgaggactacggcaagggcctggccgaggtgcagaacagactgagaaagcacggcctgctggagagcgccgtggccgccagacaggaccaggtggacatcctgaccgacctggccgcctacttcgaggagatcggccaccccgacagcaaggacatcagagccagacaggagagcctggtgtgcagattcgaggccctgaaggagcccctggccaccagaaagaagaagctgctggacctgctgcacctgcagctgatctgcagagacaccgaggacgaggaggcctggatccaggagaccgagcccagcgccaccagcacctacctgggcaaggacctgatcgccagcaagaagctgctgaacagacacagagtgatcctggagaacatcgccagccacgagcccagaatccaggagatcaccgagagaggcaacaagatggtggaggagggccacttcgccgccgaggacgtggccagcagagtgaagagcctgaaccagaacatggagagcctgagagccagagccgccagaagacagaacgacctggaggccaacgtgcagttccagcagtacctggccgacctgcacgaggccgagacctggatcagagagaaggagcccatcgtggacaacaccaactacggcgccgacgaggaggccgccggcgccctgctgaagaagcacgaggccttcctgctggacctgaacagcttcggcgacagcatgaaggccctgagaaaccaggccaacgcctgccagcagcagcaggccgcccccgtggagggcgtggccggcgagcagagagtgatggccctgtacgacttccaggccagaagccccagagaggtgaccatgaagaagggcgacgtgctgaccctgctgagcagcatcaacaaggactggtggaaggtggaggccgccgaccaccagggcatcgtgcccgccgtgtacgtgagaagactggcccacgacgagttccccatgctgccccagagaagaagagaggagcccggcaacatcacccagagacaggagcagatcgagaaccagtacagaagcctgctggacagagccgaggagagaagaagaagactgctgcagagatacaacgagttcctgctggcctacgaggccggcgacatgctggagtggatccaggagaagaaggccgagaacaccggcgtggagctggacgacgtgtgggagctgcagaagaagttcgacgagttccagaaggacctgaacaccaacgagcccagactgagagacatcaacaaggtggccgacgacctgctgttcgagggcctgctgacccccgagggcgcccagatcagacaggagctgaacagcagatggggcagcctgcagagactggccgacgagcagagacagctgctgggcagcgcccacgccgtggaggtgttccacagagaggccgacgacaccaaggagcagatcgagaagaagtgccaggccctgagcgccgccgaccccggcagcgacctgttcagcgtgcaggccctgcagagaagacacgagggcttcgagagagacctggtgcccctgggcgacaaggtgaccatcctgggcgagaccgccgagagactgagcgagagccaccccgacgccaccgaggacctgcagagacagaagatggagctgaacgaggcctgggaggacctgcagggcagaaccaaggacagaaaggagagcctgaacgaggcccagaagttctacctgttcctgagcaaggccagagacctgcagaactggatcagcagcatcggcggcatggtgagcagccaggagctggccgaggacctgaccggcatcgagatcctgctggagagacaccaggagcacagagccgacatggaggccgaggcccccaccttccaggccctggaggacttcagcgccgagctgatcgacagcggccaccacgccagccccgagatcgagaagaagctgcaggccgtgaagctggagagagacgacctggagaaggcctgggagaagagaaagaagatcctggaccagtgcctggagctgcagatgttccagggcaactgcgaccaggtggagagctggatggtggccagagagaacagcctgagaagcgacgacaagagcagcctggacagcctggaggccctgatgaagaagagagacgacctggacaaggccatcaccgcccaggagggcaagatcaccgacctggagcacttcgccgagagcctgatcgccgacgagcactacgccaaggaggagatcgccaccagactgcagagagtgctggacagatggaaggccctgaaggcccagctgatcgacgagagaaccaagctgggcgactacgccaacctgaagcagttctacagagacctggaggagctggaggagtggatcagcgagatgctgcccaccgcctgcgacgagagctacaaggacgccaccaacatccagagaaagtacctgaagcaccagaccttcgcccacgaggtggacggcagaagcgagcaggtgcacggcgtgatcaacctgggcaacagcctgatcgagtgcagcgcctgcgacggcaacgaggaggccatgaaggagcagctggagcagctgaaggagcactgggaccacctgctggagagaaccaacgacaagggcaagaagctgaacgaggccagcagacagcagagattcaacaccagcatcagagacttcgagttctggctgagcgaggccgagaccctgctggccatgaaggaccaggccagagacctggccagcgccggcaacctgctgaagaagcaccagctgctggagagagagatgctggccagagaggacgccctgaaggacctgaacaccctggccgaggacctgctgagcagcggcaccttcaacgtggaccagatcgtgaagaagaaggacaacgtgaacaagagattcctgaacgtgcaggagctggccgccgcccaccacgagaagctgaaggaggcctacgccctgttccagttcttccaggacctggacgacgaggagagctggatcgaggagaagctgatcagagtgagcagccaggactacggcagagacctgcagggcgtgcagaacctgctgaagaagcacaagagactggagggcgagctggtggcccacgagcccgccatccagaacgtgctggacatggccgagaagctgaaggacaaggccgccgtgggccaggaggagatccagctgagactggcccagttcgtggagcactgggagaagctgaaggagctggccaaggccagaggcctgaagctggaggagagcctggagtacctgcagttcatgcagaacgccgaggaggaggaggcctggatcaacgagaagaacgccctggccgtgagaggcgactgcggcgacaccctggccgccacccagagcctgctgatgaagcacgaggccctggagaacgacttcgccgtgcacgagaccagagtgcagaacgtgtgcgcccagggcgaggacatcctgaacaaggaggagagccagaacaaggagatcagcagcaagatcgaggccctgaacgagaagacccccagcctggccaaggccatcgccgcctggaagctgcagctggaggacgactacgccttccaggagttcaactggaaggccgacgtggtggaggcctggatcgccgacaaggagaccagcctgaagaccaacggcaacggcgccgacctgggcgacttcctgaccctgctggccaagcaggacaccctggacgccagcctgcagagcttccagcaggagagactgcccgagatcaccgacctgaaggacaagctgatcagcgcccagcacaaccagagcaaggccatcgaggagagatacgccgccctgctgaagagatgggagcagctgctggaggccagcgccgtgcacagacagaagctgctggagaagcagctgcccctgcagaaggccgaggacctgttcgtggagttcgcccacaaggccagcgccctgaacaactggtgcgagaagatggaggagaacctgagcgagcccgtgcactgcgtgagcctgaacgagatcagacagctgcagaaggaccacgaggacttcctggccagcctggccagagcccaggccgacttcaagtgcctgctggagctggaccagcagatcaaggccctgggcgtgcccagcagcccctacacctggctgaccgtggaggtgctggagagaacctggaagcacctgagcgacatcatcgaggagagagagcaggagctgcagaaggaggaggccagacaggtgaagaacttcgagatgtgccaggagttcgagcagaacgccagcaccttcctgcagtggatcctggagaccagagcctacttcctggacggcagcctgctgaaggagaccggcaccctggagagccagctggaggccaacaagagaaagcagaaggagatccaggccatgaagagacagctgaccaagatcgtggacctgggcgacaacctggaggacgccctgatcctggacatcaagtacagcaccatcggcctggcccagcagtgggaccagctgtaccagctgggcctgagaatgcagcacaacctggagcagcagatccaggccaaggacatcaagggcgtgagcgaggagaccctgaaggagttcagcaccatctacaagcacttcgacgagaacctgaccggcagactgacccacaaggagttcagaagctgcctgagaggcctgaactactacctgcccatggtggaggaggacgagcacgagcccaagttcgagaagttcctggacgccgtggaccccggcagaaagggctacgtgagcctggaggactacaccgccttcctgatcgacaaggagagcgagaacatcaagagcagcgacgagatcgagaacgccttccaggccctggccgagggcaagagctacatcaccaaggaggacatgaagcaggccctgacccccgagcaggtgagcttctgcgccacccacatgcagcagtacatggaccccagaggcagaagccacctgagcggctacgactacgtgggcttcaccaacagctacttcggcaactag

SEQ ID NO: 298842 - DNA, 7260 bp, Artificial Sequence
  derived and/or modified sequence
atggagcagttccccaaggagaccgtggtggagagcagcggccccaaggtgctggagaccgccgaggagatccaggagagaagacaggaggtgctgaccagataccagagcttcaaggagagagtggccgagagaggccagaagctggaggacagctaccacctgcaggtgttcaagagagacgccgacgacctgggcaagtggatcatggagaaggtgaacatcctgaccgacaagagctacgaggaccccaccaacatccagggcaagtaccagaagcaccagagcctggaggccgaggtgcagaccaagagcagactgatgagcgagctggagaagaccagagaggagagattcaccatgggccacagcgcccacgaggagaccaaggcccacatcgaggagctgagacacctgtgggacctgctgctggagctgaccctggagaagggcgaccagctgctgagagccctgaagttccagcagtacgtgcaggagtgcgccgacatcctggagtggatcggcgacaaggaggccatcgccaccagcgtggagctgggcgaggactgggagagaaccgaggtgctgcacaagaagttcgaggacttccaggtggagctggtggccaaggagggcagagtggtggaggtgaaccagtacgccaacgagtgcgccgaggagaaccaccccgacctgcccctgatccagagcaagcagaacgaggtgaacgccgcctgggagagactgagaggcctggccctgcagagacagaaggccctgagcaacgccgccaacctgcagagattcaagagagacgtgaccgaggccatccagtggatcaaggagaaggagcccgtgctgaccagcgaggactacggcaaggacctggtggccagcgagggcctgttccacagccacaagggcctggagagaaacctggccgtgatgagcgacaaggtgaaggagctgtgcgccaaggccgagaagctgaccctgagccaccccagcgacgccccccagatccaggagatgaaggaggacctggtgagcagctgggagcacatcagagccctggccaccagcagatacgagaagctgcaggccacctactggtaccacagattcagcagcgacttcgacgagctgagcggctggatgaacgagaagaccgccgccatcaacgccgacgagctgcccaccgacgtggccggcggcgaggtgctgctggacagacaccagcagcacaagcacgagatcgacagctacgacgacagattccagagcgccgacgagaccggccaggacctggtgaacgccaaccacgaggccagcgacgaggtgagagagaagatggagatcctggacaacaactggaccgccctgctggagctgtgggacgagagacacagacagtacgagcagtgcctggacttccacctgttctacagagacagcgagcaggtggacagctggatgagcagacaggaggccttcctggagaacgaggacctgggcaacagcctgggcagcgccgaggccctgctgcagaagcacgaggacttcgaggaggccttcaccgcccaggaggagaagatcatcaccgtggacaagaccgccaccaagctgatcggcgacgaccactacgacagcgagaacatcaaggccatcagagacggcctgctggccagaagagacgccctgagagagaaggccgccaccagaagaagactgctgaaggagagcctgctgctgcagaagctgtacgaggacagcgacgacctgaagaactggatcaacaagaagaagaagctggccgacgacgaggactacaaggacatccagaacctgaagagcagagtgcagaagcagcaggtgttcgagaaggagctggccgtgaacaagacccagctggagaacatccagaagaccggccaggagatgatcgagggcggccactacgccagcgacaacgtgaccaccagactgagcgaggtggccagcctgtgggaggagctgctggaggccaccaagcagaagggcacccagctgcacgaggccaaccagcagctgcagttcgagaacaacgccgaggacctgcagagatggctggaggacgtggagtggcaggtgaccagcgaggactacggcaagggcctggccgaggtgcagaacagactgagaaagcacggcctgctggagagcgccgtggccgccagacaggaccaggtggacatcctgaccgacctggccgcctacttcgaggagatcggccaccccgacagcaaggacatcagagccagacaggagagcctggtgtgcagattcgaggccctgaaggagcccctggccaccagaaagaagaagctgctggacctgctgcacctgcagctgatctgcagagacaccgaggacgaggaggcctggatccaggagaccgagcccagcgccaccagcacctacctgggcaaggacctgatcgccagcaagaagctgctgaacagacacagagtgatcctggagaacatcgccagccacgagcccagaatccaggagatcaccgagagaggcaacaagatggtggaggagggccacttcgccgccgaggacgtggccagcagagtgaagagcctgaaccagaacatggagagcctgagagccagagccgccagaagacagaacgacctggaggccaacgtgcagttccagcagtacctggccgacctgcacgaggccgagacctggatcagagagaaggagcccatcgtggacaacaccaactacggcgccgacgaggaggccgccggcgccctgctgaagaagcacgaggccttcctgctggacctgaacagcttcggcgacagcatgaaggccctgagaaaccaggccaacgcctgccagcagcagcaggccgcccccgtggagggcgtggccggcgagcagagagtgatggccctgtacgacttccaggccagaagccccagagaggtgaccatgaagaagggcgacgtgctgaccctgctgagcagcatcaacaaggactggtggaaggtggaggccgccgaccaccagggcatcgtgcccgccgtgtacgtgagaagactggcccacgacgagttccccatgctgccccagagaagaagagaggagcccggcaacatcacccagagacaggagcagatcgagaaccagtacagaagcctgctggacagagccgaggagagaagaagaagactgctgcagagatacaacgagttcctgctggcctacgaggccggcgacatgctggagtggatccaggagaagaaggccgagaacaccggcgtggagctggacgacgtgtgggagctgcagaagaagttcgacgagttccagaaggacctgaacaccaacgagcccagactgagagacatcaacaaggtggccgacgacctgctgttcgagggcctgctgacccccgagggcgcccagatcagacaggagctgaacagcagatggggcagcctgcagagactggccgacgagcagagacagctgctgggcagcgcccacgccgtggaggtgttccacagagaggccgacgacaccaaggagcagatcgagaagaagtgccaggccctgagcgccgccgaccccggcagcgacctgttcagcgtgcaggccctgcagagaagacacgagggcttcgagagagacctggtgcccctgggcgacaaggtgaccatcctgggcgagaccgccgagagactgagcgagagccaccccgacgccaccgaggacctgcagagacagaagatggagctgaacgaggcctgggaggacctgcagggcagaaccaaggacagaaaggagagcctgaacgaggcccagaagttctacctgttcctgagcaaggccagagacctgcagaactggatcagcagcatcggcggcatggtgagcagccaggagctggccgaggacctgaccggcatcgagatcctgctggagagacaccaggagcacagagccgacatggaggccgaggcccccaccttccaggccctggaggacttcagcgccgagctgatcgacagcggccaccacgccagccccgagatcgagaagaagctgcaggccgtgaagctggagagagacgacctggagaaggcctgggagaagagaaagaagatcctggaccagtgcctggagctgcagatgttccagggcaactgcgaccaggtggagagctggatggtggccagagagaacagcctgagaagcgacgacaagagcagcctggacagcctggaggccctgatgaagaagagagacgacctggacaaggccatcaccgcccaggagggcaagatcaccgacctggagcacttcgccgagagcctgatcgccgacgagcactacgccaaggaggagatcgccaccagactgcagagagtgctggacagatggaaggccctgaaggcccagctgatcgacgagagaaccaagctgggcgactacgccaacctgaagcagttctacagagacctggaggagctggaggagtggatcagcgagatgctgcccaccgcctgcgacgagagctacaaggacgccaccaacatccagagaaagtacctgaagcaccagaccttcgcccacgaggtggacggcagaagcgagcaggtgcacggcgtgatcaacctgggcaacagcctgatcgagtgcagcgcctgcgacggcaacgaggaggccatgaaggagcagctggagcagctgaaggagcactgggaccacctgctggagagaaccaacgacaagggcaagaagctgaacgaggccagcagacagcagagattcaacaccagcatcagagacttcgagttctggctgagcgaggccgagaccctgctggccatgaaggaccaggccagagacctggccagcgccggcaacctgctgaagaagcaccagctgctggagagagagatgctggccagagaggacgccctgaaggacctgaacaccctggccgaggacctgctgagcagcggcaccttcaacgtggaccagatcgtgaagaagaaggacaacgtgaacaagagattcctgaacgtgcaggagctggccgccgcccaccacgagaagctgaaggaggcctacgccctgttccagttcttccaggacctggacgacgaggagagctggatcgaggagaagctgatcagagtgagcagccaggactacggcagagacctgcagggcgtgcagaacctgctgaagaagcacaagagactggagggcgagctggtggcccacgagcccgccatccagaacgtgctggacatggccgagaagctgaaggacaaggccgccgtgggccaggaggagatccagctgagactggcccagttcgtggagcactgggagaagctgaaggagctggccaaggccagaggcctgaagctggaggagagcctggagtacctgcagttcatgcagaacgccgaggaggaggaggcctggatcaacgagaagaacgccctggccgtgagaggcgactgcggcgacaccctggccgccacccagagcctgctgatgaagcacgaggccctggagaacgacttcgccgtgcacgagaccagagtgcagaacgtgtgcgcccagggcgaggacatcctgaacaaggtgctgcaggaggagagccagaacaaggagatcagcagcaagatcgaggccctgaacgagaagacccccagcctggccaaggccatcgccgcctggaagctgcagctggaggacgactacgccttccaggagttcaactggaaggccgacgtggtggaggcctggatcgccgacaaggagaccagcctgaagaccaacggcaacggcgccgacctgggcgacttcctgaccctgctggccaagcaggacaccctggacgccagcctgcagagcttccagcaggagagactgcccgagatcaccgacctgaaggacaagctgatcagcgcccagcacaaccagagcaaggccatcgaggagagatacgccgccctgctgaagagatgggagcagctgctggaggccagcgccgtgcacagacagaagctgctggagaagcagctgcccctgcagaaggccgaggacctgttcgtggagttcgcccacaaggccagcgccctgaacaactggtgcgagaagatggaggagaacctgagcgagcccgtgcactgcgtgagcctgaacgagatcagacagctgcagaaggaccacgaggacttcctggccagcctggccagagcccaggccgacttcaagtgcctgctggagctggaccagcagatcaaggccctgggcgtgcccagcagcccctacacctggctgaccgtggaggtgctggagagaacctggaagcacctgagcgacatcatcgaggagagagagcaggagctgcagaaggaggaggccagacaggtgaagaacttcgagatgtgccaggagttcgagcagaacgccagcaccttcctgcagtggatcctggagaccagagcctacttcctggacggcagcctgctgaaggagaccggcaccctggagagccagctggaggccaacaagagaaagcagaaggagatccaggccatgaagagacagctgaccaagatcgtggacctgggcgacaacctggaggacgccctgatcctggacatcaagtacagcaccatcggcctggcccagcagtgggaccagctgtaccagctgggcctgagaatgcagcacaacctggagcagcagatccaggccaaggacatcaagggcgtgagcgaggagaccctgaaggagttcagcaccatctacaagcacttcgacgagaacctgaccggcagactgacccacaaggagttcagaagctgcctgagaggcctgaactactacctgcccatggtggaggaggacgagcacgagcccaagttcgagaagttcctggacgccgtggaccccggcagaaagggctacgtgagcctggaggactacaccgccttcctgatcgacaaggagagcgagaacatcaagagcagcgacgagatcgagaacgccttccaggccctggccgagggcaagagctacatcaccaaggaggacatgaagcaggccctgacccccgagcaggtgagcttctgcgccacccacatgcagcagtacatggaccccagaggcagaagccacctgagcggctacgactacgtgggcttcaccaacagctacttcggcaactag

SEQ ID NO: 298843 - DNA, 7251 bp, Artificial Sequence
  derived and/or modified sequence
atggaacagttccccaaggaaactgtggtggaaagttcaggacctaaagttctcgagacagccgaggagatacaggaacgcaggcaggaggtattgaccagatatcagtcatttaaggaacgggtcgctgaaagggggcagaagctcgaggattcgtaccatctccaagttttcaaacgagatgcagatgatcttggtaaatggattatggagaaggtcaacatcctgaccgacaaaagttatgaggatcccacaaatatacagggcaagtatcagaaacaccagagcctagaagctgaggtccaaacaaagagtcgcctgatgagtgaactggagaagacgcgggaagaaagattcacaatgggtcacagtgcacacgaggagaccaaagcccacatagaggagttaaggcatttgtgggatctgctcttagaacttaccctggagaaaggagatcagcttttgcgggccttgaagtttcaacagtatgtgcaagagtgtgcagacatcttggagtggatcggagacaaagaagccatagctactagtgtggaactgggtgaagattgggagaggacagaggttctgcacaagaagtttgaggattttcaggtagagctcgtcgcaaaggagggccgggtggtggaagtgaatcagtacgccaacgaatgcgccgaggagaaccatccggatctgcccctgatccagtctaaacaaaacgaggtcaacgcagcatgggaacgccttaggggccttgccctccaacggcagaaagccctcagcaacgccgcaaatctgcaaagattcaagcgagacgtaactgaagcaattcagtggattaaagaaaaagagccagttttgaccagtgaggactatggcaaggacctagttgcatccgaaggcctcttccattctcataaaggtctggagcgaaacttagccgtgatgtctgataaagtgaaggagctctgcgccaaggcagagaaactgacgttgagccatccctctgatgcacctcagattcaagagatgaaagaagacctggtgtctagctgggaacatatccgtgccttggccacctctagatatgaaaagctccaagccacatattggtaccatagattctcatccgacttcgatgaactgtctggatggatgaatgagaaaacagcagccatcaacgcagatgaactccccacggacgtcgccggtggcgaagtgctccttgacagacaccagcaacataaacatgaaattgattcttacgacgacaggttccagagcgcagacgagacgggacaggacttggtcaacgccaatcatgaagccagtgatgaggtccgagagaagatggagattttggataacaactggacagccctcctcgaactttgggacgagcgccaccgccagtatgagcagtgtttagatttccatcttttttatcgggatagtgaacaggtggactcttggatgtcacggcaggaggcttttctggaaaacgaagatctggggaattctctcggctctgccgaagcgctgctacaaaagcacgaagacttcgaagaggcatttaccgctcaagaagagaaaattattactgtggacaaaaccgccacgaagctgatcggagacgatcattacgactcagaaaacataaaggccatccgagatggtctgttggcacgccgcgatgccctgagggaaaaggccgctacgcgacggcgattactcaaggagagcctcctgctgcagaagctgtacgaggatagtgacgatttgaagaactggatcaataaaaagaaaaagttggcagacgacgaggattacaaagatatccagaacctaaagtcaagggtccagaagcagcaggtgttcgagaaggaattagccgtgaataaaacgcagttggaaaacattcagaagactggccaggagatgatcgaaggcggacactatgcttcagataatgtgacgacgaggctcagtgaagtggcgagcctttgggaggagctacttgaggccaccaagcagaagggcacgcagctccatgaagccaatcaacagttacagttcgagaacaatgctgaagacctgcagaggtggctggaggacgtggaatggcaggtgactagtgaggactatggaaaaggactggccgaagtgcaaaatcggctgcggaaacacggccttctggagagcgctgtcgcagcacggcaggatcaagtcgatatcttgacagacttagctgcttacttcgaggagattggccatccagactcaaaggatattcgggcaagacaggagagcctcgtctgtcgcttcgaagctctgaaggaacccctcgccacccgcaaaaagaaattactcgatcttcttcatttgcagctcatttgccgtgacacagaagacgaggaagcatggattcaagaaacagagccctctgccacatcaacctatctggggaaggacctgatcgcttcgaagaagctgttgaataggcatcgtgtgatattggagaatattgcaagtcatgagcctagaatccaggaaattacggagaggggcaacaagatggtagaggagggacactttgctgcagaggatgtggccagtcgcgtaaagagtctgaaccagaacatggagagcctgcgcgcgagggccgcccgcaggcaaaacgatctcgaggctaatgtacaattccagcagtacttggccgacctgcatgaggccgagacttggatcagggagaaagagccaatcgttgacaacaccaattacggggccgacgaggaagcagccggggcccttcttaagaagcacgaggcttttctgcttgacctcaacagctttggcgacagcatgaaagccctgagaaaccaggccaacgcttgtcagcagcaacaggccgcccccgttgaaggcgtagccggcgagcagagggtgatggcactctacgacttccaagcgagatcgccccgggaagtgacaatgaagaagggagatgttttgaccctgcttagctctatcaataaagattggtggaaggtggaagccgctgaccaccagggtatcgtgccggctgtgtacgtccgccgcctcgcccatgatgagtttcccatgttgccacagaggcgtagagaggagccaggcaacattacccaaaggcaggagcagatcgaaaaccagtaccgatcacttctagacagagcggaagaacgtcgacggcgcctactgcagcggtacaacgagtttcttttggcctacgaggcaggggacatgctggagtggatccaggaaaaaaaagccgagaatacaggcgtcgaattagatgacgtgtgggaattgcaaaagaagtttgatgagttccaaaaggatcttaataccaacgagccccgactgagagacattaacaaggtggcagatgacttgttatttgaaggtctgttaacccctgagggtgcccagattaggcaggaacttaacagtaggtggggatctctgcagagattggcagacgaacaacgacagcttctgggctcagcccatgccgtggaagtgttccaccgagaagccgatgatactaaggaacaaattgaaaaaaaatgtcaggcactttctgctgcggatccgggttccgatctgttcagtgtgcaggcgttgcaacgacgccatgagggatttgaacgggatttggtacctcttggcgacaaggtgacaatcttgggggagactgccgagcggttatcagagtctcaccctgacgcgactgaggatcttcagcgccagaagatggaacttaacgaggcttgggaggatttacagggtcgcaccaaggatcggaaagagtccctgaatgaggctcagaagttctacctgttcctgtccaaggcgcgcgatttgcagaattggatctcctctatcggcggaatggtcagttctcaggaactggcagaggatctgacaggtatcgaaattctcctcgaacgtcaccaggagcatcgtgctgacatggaagcggaggcacctacattccaggcactcgaagatttctcggccgagctaatcgactcagggcatcacgccagcccggagatagagaaaaagttacaagccgttaagctggagcgagacgacctcgagaaagcttgggagaagcgcaagaaaattttggaccaatgcttggagctgcagatgtttcaaggcaactgtgaccaagtggaatcttggatggttgctagagaaaattctcttcgtagtgacgacaaatctagtctcgattccctggaggcgcttatgaaaaaacgcgacgacctggacaaagcgataaccgctcaggagggcaaaataaccgatttagagcactttgctgagtctctgatcgcggacgagcactacgccaaggaggagattgccacccgtctgcagcgggtgttggaccgctggaaggctctgaaggcccaactaatagatgagcgcactaaactgggagactatgctaatctcaagcagttttaccgcgatcttgaggaactggaagaatggatatccgaaatgctccctacagcttgcgatgagtcatacaaggatgccaccaacattcagcgcaagtacctgaagcaccagacattcgcacacgaggtcgacgggaggtccgagcaggtgcacggcgtaatcaacttaggaaactcactgatcgaatgtagcgcatgcgacggcaacgaggaagcaatgaaagagcagctcgaacagctaaaggaacactgggaccatctcctggagagaactaatgataaaggcaagaagctgaacgaagcatcacggcagcaaaggttcaatacctctattcgagacttcgaattttggttgagcgaagccgagaccttgttagccatgaaggaccaggctcgcgacctggccagcgctggcaacctcttaaaaaagcaccagctgttggaaagagaaatgctggcaagagaggacgctcttaaggacttgaacacgctagccgaggatctactgtcgtccggaacatttaatgtcgaccaaatcgtgaaaaagaaagacaatgtgaataagcgcttcctaaatgttcaggagctcgcggctgcacaccacgaaaaactgaaagaagcatacgcgttatttcaattctttcaggacttggacgatgaggagtcctggatcgaagaaaaactaatacgggtttcttctcaggactatgggagggatttgcaaggtgtgcagaaccttcttaagaagcataaaaggctcgaaggggagctggtcgcacacgaaccagccatccagaacgtacttgacatggctgagaagttaaaggataaggccgcagtcggacaggaagaaattcagttacgtctggcccagttcgtagagcactgggaaaagctaaaggaactggcgaaagcgcgtggcctcaagcttgaggaatccttggaatatctccagttcatgcagaacgctgaggaggaagaagcttggattaacgaaaaaaacgctttggcagtccgaggcgactgcggggacactttagcagccactcagagtctcctcatgaaacacgaggccctggagaatgatttcgcggtacatgaaacgcgagttcagaacgtctgtgcccagggcgaggacattctcaacaaggaagagagtcagaacaaggaaatcagttctaagatcgaggctctaaatgagaaaaccccttccctggccaaggccattgccgcgtggaagctgcagctagaagatgactacgccttccaggagttcaactggaaggccgacgtcgttgaagcttggattgctgataaggaaaccagtctgaaaactaacggcaatggggcagatctcggtgattttctgacgttgttggccaagcaggacacgctggatgcatcgcttcaatctttccagcaagaaagactgcccgaaatcacagacctcaaggataagctcatctcggcccagcacaatcaaagcaaggcaatcgaggagcggtacgctgcacttctgaaacgttgggaacaactgttagaagcaagcgccgtccatcggcagaaactactcgaaaaacagctgccactccaaaaggcagaggatttgtttgtggagtttgcccacaaggccagtgcactgaacaactggtgcgagaagatggaagagaacctctctgagccagtccattgtgtgtcactgaacgagattaggcagctgcagaaagatcatgaggatttcctggcaagcctggccagagcacaagctgacttcaagtgtttattagagctggaccagcagatcaaagcacttggcgttccttcctctccctacacctggttaactgtggaagtcctggagagaacctggaaacacctcagtgacatcattgaggagagagaacaggagttgcagaaggaagaagccaggcaggtgaagaacttcgaaatgtgccaggaattcgagcagaacgcctctaccttccttcaatggatcctcgagacacgcgcttattttttagatggctccctgttaaaagagactggtactctggagagtcagctcgaagccaacaaacgaaagcagaaagagatccaggctatgaagcgacagcttacaaagatcgtcgatctgggagacaacctggaagatgccttgatccttgacattaagtacagcaccatcggtctcgcccagcaatgggaccagttgtaccagttagggcttaggatgcagcacaacctggaacagcagatccaagcaaaggacattaaaggagtaagcgaggagactcttaaggagttcagtacgatctacaagcacttcgatgaaaatctgaccggaaggctgacacacaaagagtttagatcctgtctgagaggattaaactattacctgccgatggttgaggaagacgaacacgagcccaagtttgaaaagtttctggatgctgtggaccccggacggaaagggtatgtgtctcttgaagattacacagccttcctgatcgacaaagaatccgagaatatcaaatctagtgatgaaatagagaatgcatttcaggcattggccgaaggtaaaagctatattacgaaagaggatatgaaacaagccctgactcccgagcaggtgtctttctgtgctactcacatgcagcagtatatggacccgcgagggcgctctcatctgtccggctacgattacgttggttttactaactcctactttggcaactag

SEQ ID NO: 298844 - DNA, 7260 bp, Artificial Sequence
  derived and/or modified sequence
atggagcagttccctaaggagaccgtcgtggagtcgtcaggccccaaggtgctcgagactgccgaggagattcaagaacggcggcaggaggtactgacgcgctaccaatcattcaaagagagggtggccgaacggggccaaaaactggaagatagttatcatttgcaggtcttcaagcgcgatgccgatgatctcggcaaatggattatggaaaaggtgaatatcctgactgataagagttacgaagacccgactaacattcagggcaagtatcaaaaacaccagagcttggaagcagaagtccagaccaagtcacggttgatgtcagaactggaaaagacgcgggaggagcgatttactatggggcattcagcccacgaggagaccaaggcgcatatcgaggagctccgacacctctgggatcttctcctcgagctgaccctggagaagggcgatcagcttttaagggcacttaaattccagcagtacgttcaagagtgcgctgacattctggaatggattggcgataaagaggccatcgccacaagcgtggagctcggagaggattgggagagaacagaggtgctgcacaagaaattcgaagactttcaggttgagctggtggcaaaggaagggcgagtcgtcgaggtgaaccagtatgccaacgagtgtgccgaggagaatcatcctgacttgcccctgatccagtccaagcagaacgaagtgaatgcagcgtgggagcgcctgaggggtctcgctctccaacgccaaaaggccctgagcaatgctgccaacctacagcgattcaaacgtgatgttacagaagctatacagtggattaaggagaaggaaccggtgctgacctcagaggactatggaaaagacttagtggcctccgagggcctttttcacagtcataaaggactcgaacgcaatcttgccgtaatgtccgacaaggttaaggaactgtgcgcgaaggctgaaaagctgactcttagtcacccctccgatgcccctcagattcaggaaatgaaagaagacctcgtgtcttcatgggagcacataagggccctcgctacctctagatatgaaaagctgcaggcgacctactggtatcaccgcttttcgtcggatttcgacgagctgagcggttggatgaacgagaagacagctgctattaacgccgatgaacttccaacggacgtagccgggggtgaagtgttgctggatagacatcagcagcacaagcatgaaattgatagttatgacgataggttccagagtgcagacgagactgggcaggatctagtgaatgcaaatcatgaggcctccgacgaagtcagagagaagatggagatcctggacaataactggacggcactactggagctgtgggatgaacgccaccgccagtatgagcagtgtcttgactttcacctgttttacagggactcagagcaggtggattcctggatgagtcggcaagaagcctttctggaaaatgaggacctaggaaactcgctcgggagcgctgaggctctgctgcagaaacatgaagacttcgaggaagctttcactgctcaagaggaaaagatcattacagtagacaaaacggccaccaagctgatcggcgatgaccactatgacagcgagaatattaaagcgatcagggatggactgttggcccgtcgcgacgccctgcgggagaaggccgccactcgacgtcgccttttaaaggagagtctgttgctgcagaagctctatgaagacagtgacgatttgaaaaattggattaataagaaaaagaaacttgctgacgacgaagactacaaggacatccagaatctgaaaagcagggtccaaaagcagcaagtctttgaaaaggaactggctgtgaataaaacccaactggaaaatatccagaaaactgggcaggagatgattgaaggaggacactacgcctcagataatgttaccacacgactctccgaggtcgcatcattgtgggaagaactactcgaggccaccaaacagaaaggaacacagcttcacgaggctaatcaacagctgcagtttgagaataatgccgaagaccttcagaggtggctcgaggacgtcgagtggcaggttacttctgaagactacggcaagggcctggccgaggtgcagaatagactgagaaaacatggactcttagagtctgcagttgctgccagacaagaccaagtcgacatccttaccgatttagcggcctatttcgaagagatcggccacccagattccaaagacattagggcccgacaggaatccctggtgtgccggtttgaggcactcaaagagcctctggctaccaggaaaaaaaagcttctcgacttgctccatctgcagcttatctgccgagatactgaggatgaagaagcttggattcaagagacagaaccaagcgccacctcaacttatctgggcaaggacctgatcgcatctaagaaactcctcaatagacacagagtgatacttgagaatatcgcatcccatgagcctaggattcaggaaatcaccgaacggggcaataagatggtggaggagggacattttgctgccgaggacgtggcatccagagtaaaatctttgaaccagaatatggagagtctgcgggcacgcgccgcccggagacagaatgaccttgaggctaatgttcagtttcagcagtatctggccgaccttcacgaggctgaaacatggattcgagaaaaagagcctattgtcgataataccaactatggtgcagacgaggaggctgccggagccctactcaagaaacatgaagcttttttgctagacctgaacagctttggcgatagcatgaaggcgctgaggaaccaggccaacgcctgccaacaacagcaggcggctcctgttgaaggagtcgccggggagcagcgagtcatggccctgtatgactttcaggcaaggagtccccgggaggtgacaatgaagaaaggtgatgtgttaactctgctgtcatcaattaataaggattggtggaaagtggaagctgccgaccaccaaggcattgtgcctgccgtgtatgtgcgaagactggcccacgatgaattcccgatgctcccacagcgccgaagggaagaacccggcaacatcacacaaaggcaggagcagattgagaaccagtacagaagcctgctggaccgtgcagaggagcggaggcgcagactgctgcaacgatacaacgaatttctattggcctatgaagccggcgatatgctagagtggatccaggagaagaaagccgagaatacgggcgtggaactggatgacgtatgggagctgcagaagaaattcgatgagttccaaaaggatctgaacacaaatgaacctcggttgagggatattaataaagtcgccgacgacttgctcttcgaaggattactgacccctgagggtgctcagatcagacaggaactaaactccaggtggggatcgctgcagagactcgctgacgaacagagacagctgctgggctccgcccacgctgtggaagtgtttcaccgcgaggccgatgacaccaaggagcagatcgaaaaaaaatgccaggccctaagcgctgctgatccgggctctgatctctttagtgtgcaagcgctgcagcgcaggcatgagggctttgaacgggaccttgtgccattaggtgataaagtgactattttgggcgagaccgctgagagactctctgagtcccacccagatgcaacagaagatctgcaaagacagaaaatggagttaaacgaggcatgggaggatctgcaggggaggacgaaggatcggaaggaatcactcaacgaagctcaaaagttttatctgtttctgtccaaggcacgggatctccagaactggattagttccatcggcggtatggtcagctctcaagaactggccgaggacttaacaggaatcgagatcctcctggagcgacaccaagagcacagagctgacatggaagccgaggctcctacttttcaagctctggaggacttctcagccgagctaattgatagcggccatcacgcaagtcccgaaattgagaagaagcttcaggcagtaaagctggagagggatgatcttgagaaagcctgggagaagagaaagaagatcctcgaccagtgccttgaactacaaatgtttcagggcaactgcgaccaggtcgaaagctggatggtggcacgcgaaaactccctcaggagtgacgataaatcatcccttgactccctggaggctctgatgaaaaagcgggacgacctggacaaagctatcacagcgcaggagggtaagatcaccgatttggagcattttgcagagtctctgattgcggacgagcattacgcaaaagaggaaattgctactaggctccagcgcgtgctggaccgctggaaagctctgaaggctcagttgatcgacgaaagaacgaagctcggtgactatgcaaatctgaagcagttctaccgagacctggaagaacttgaagaatggattagcgaaatgctacctacagcttgcgatgagtcctacaaggatgcgacaaatatccagaggaaatacttgaaacatcagacctttgcccatgaggtggacggcagatctgagcaagtgcacggtgtgattaatttagggaattcgctcatagagtgtagcgcatgtgacggcaacgaggaggcgatgaaggaacaactggagcaactgaaagagcactgggatcatttgcttgagagaacaaacgataagggaaagaaactaaatgaggccagcaggcagcaacgcttcaacacgtctatacgggattttgaattttggttaagtgaggctgagacccttctcgcgatgaaggatcaggccagggacctggcatccgcaggaaacctcctcaagaaacatcagcttctggaacgggagatgcttgcgagagaagatgccctcaaagacctgaacaccctggccgaggatttactgagtagcgggaccttcaacgtggatcagatcgtcaagaagaaagataatgtcaacaaaagatttctgaacgtgcaggagctggcggctgcacatcacgagaagctcaaggaggcttacgctctgttccaattctttcaggatcttgacgatgaggagagctggatcgaggaaaaactcattagagtgtcaagtcaggactacggtcgagatctgcaaggcgtccagaacctgctcaagaagcacaaacgtctggagggcgagctcgtggcccatgaacccgcgattcagaacgtgctggatatggctgaaaaactcaaggacaaagccgcagtgggtcaagaggagatccaacttcggctagcccaatttgttgaacactgggaaaagcttaaagagctcgcgaaggcacggggcctgaaactggaggaaagtctcgagtatttacagtttatgcagaatgccgaagaggaagaggcttggattaatgagaaaaatgctctcgctgttagaggagattgcggcgacacgcttgccgcaacccagagcttgctcatgaagcacgaagcattagagaacgattttgcagtgcatgaaactcgggtccagaacgtctgcgcccaaggggaagacattctgaataaggtgctacaggaagagtcccagaacaaagaaatttcgtcgaagatcgaggcgttgaacgagaagactccctccctcgcgaaggctatcgccgcctggaagctgcagctggaggacgactatgccttccaagaattcaattggaaagccgatgtcgtggaagcatggatcgccgacaaggagacaagtctgaagaccaatggtaatggggccgatctgggagactttctgaccctgttagctaaacaggacactcttgacgcctcgctgcagtcattccagcaggaacgcctcccagagataaccgacctgaaggataagctaatctctgctcagcacaatcagtccaaggccattgaggaaaggtatgccgccttgttgaaacggtgggagcagctgttagaggctagcgccgtgcaccggcaaaagctcctggaaaagcagttaccacttcagaaagcagaagaccttttcgttgaattcgcccacaaagcctccgccctcaataattggtgcgaaaaaatggaggagaatctttccgagcccgtccattgcgtttctctcaatgaaattcggcaattacagaaggatcatgaagatttccttgccagcctggccagagctcaagctgactttaaatgtctgctagagcttgatcagcagatcaaagcgctgggagtccctagctccccttatacctggctgaccgttgaggtcctcgaaaggacgtggaagcatctgagcgacataatagaagagcgagagcaagaactgcagaaggaggaagcccgccaagttaagaattttgagatgtgccaggaattcgagcagaatgcctcaacatttctgcagtggatactcgaaacccgagcctatttcctggatggatcactgttgaaggaaacaggcacactggagtctcagctcgaggccaataaacggaagcagaaggagatccaagctatgaagagacagcttacaaagatagtggatctgggcgataacctggaggatgcgcttattctggacattaagtattctacaatcgggctagcccaacaatgggaccagctatatcaactggggctgaggatgcagcacaatttggaacagcagatccaggcgaaggatatcaaaggcgtctccgaagaaacacttaaagagttctccacgatctacaagcactttgacgaaaacctgacaggccggctgacccacaaggagttccggtcctgtttgagggggctgaattattatctgccaatggtcgaagaagacgaacacgaaccgaagttcgagaagtttctggatgctgttgaccctggtcggaagggatatgtatccttagaagattacacagccttcttgatcgacaaagaaagtgagaacatcaagtcttccgacgagatcgaaaatgcttttcaggctttggcggaaggcaagtcctacatcacgaaggaagatatgaaacaggcactgaccccagagcaggtgagtttttgtgccacccatatgcagcaatacatggacccacgcggacgatctcacctatcaggctacgattatgttggttttacaaatagctatttcggtaattag

SEQ ID NO: 298845 - DNA, 7251 bp, Artificial Sequence
  derived and/or modified sequence
atggagcagttccccaaggagaccgtggtggagagcagcggccccaaggtgctggagacagctgaggagatccaggagcggcggcaggaggtgctgacccgctaccagagcttcaaggagcgggtggccgagcggggccagaagctggaggacagctaccacctgcaggtgttcaagagagatgctgatgacctgggcaagtggatcatggagaaggtgaacatcctgacagacaagagctatgaggaccccaccaacatccagggcaagtaccagaagcaccagagcctggaggccgaggtgcagaccaagagccggctgatgtctgagctggagaagacccgggaggagcgcttcaccatgggccacagcgcccacgaggagaccaaggcccacatcgaggagctgcggcacctgtgggacctgctgctggagctgaccctggagaagggggaccagctgctgcgggccctgaagttccagcagtatgtgcaggagtgtgccgacatcctggagtggattggagacaaggaggccatcgccacctctgtggagctgggggaggactgggagaggacagaggtgctgcacaagaagtttgaggacttccaggtggagctggtggccaaggagggccgggtggtggaggtgaaccagtatgccaatgaatgtgccgaggagaaccacccagacctgcccctcatccagagcaagcagaatgaggtgaatgctgcctgggagcggctgcggggcctggccctgcagaggcagaaggccctgagcaatgctgccaacctgcagcgcttcaagagagatgtgacagaggccatccagtggatcaaggagaaggagcctgtgctgaccagcgaggactatggcaaggacctggtggccagcgagggcctcttccacagccacaagggcctggagaggaacctggccgtgatgtctgacaaggtgaaggagctgtgtgccaaggccgagaagctgaccctgagccaccccagtgatgccccccagatccaggagatgaaggaggacctggtgtcctcctgggagcacatccgggccctggccaccagccgctatgagaagctgcaggccacctactggtaccaccgcttcagcagtgactttgatgagctgagcggctggatgaatgagaagacagctgccatcaatgctgatgagctgcccacagatgtggccggcggggaggtgctgctggacagacaccagcagcacaagcatgaaattgacagctatgatgaccgcttccagagcgcagatgagaccggccaggacctggtgaatgccaaccacgaggccagtgatgaggtgcgggagaagatggagatcctggacaacaactggacagccctgctggagctgtgggatgagcggcaccggcagtatgagcagtgcctggacttccacctgttctacagagattctgagcaggtggacagctggatgagccggcaggaggccttcctggagaatgaagacctgggcaacagcctgggcagcgctgaggccctgctgcagaagcatgaagattttgaggaggccttcaccgcccaggaggagaagatcatcaccgtggacaagacagccaccaagctgattggagatgaccactatgacagcgagaacatcaaggccatcagagatggcctgctggccaggagagatgccctgcgggagaaggccgccacccggcggcggctgctgaaggagagcctgctgctgcagaagctgtatgaagattctgatgacctgaagaactggatcaacaagaagaagaagctggctgatgatgaggactacaaggacatccagaacctgaagagccgggtgcagaagcagcaggtgtttgagaaggagctggccgtgaacaagacccagctggagaacatccagaagacaggccaggagatgattgagggcggccactacgccagtgacaacgtgaccacccggctgtctgaggtggccagcctgtgggaggagctgctggaggccaccaagcagaagggcacccagctgcacgaggccaaccagcagctgcagtttgaaaataatgctgaggacctgcagcgctggctggaggatgtggagtggcaggtgaccagtgaagattatggcaagggcctggccgaggtgcagaaccggctgaggaagcacggcctgctggagagcgctgtggccgcccggcaggaccaggtggacatcctgacagacctggccgcctactttgaggagatcggccacccagacagcaaggacatccgggcccggcaggagagcctggtgtgccgctttgaggccctgaaggagcccctggccaccaggaagaagaagctgctggacctgctgcacctgcagctgatctgccgggacacagaagatgaggaggcctggatccaggagacagagcccagcgccaccagcacctacctgggcaaggacctgattgccagcaagaagctgctgaacagacacagggtcatcctggagaacatcgccagccatgagccccgcatccaggagatcacagagcggggcaacaagatggtggaggagggccactttgctgctgaagatgtggccagccgggtgaagagcctgaaccagaacatggagagcctgcgggcccgggccgcccggcggcagaatgacctggaggccaacgtgcagttccagcagtacctggccgacctgcatgaagctgagacctggatccgggagaaggagcccatcgtggacaacaccaactatggagcagatgaggaggccgccggggccctgctgaagaagcatgaggccttcctgctggacctgaacagctttggagacagcatgaaggccctgaggaaccaggccaatgcctgccagcagcagcaggccgcccctgtggagggcgtggccggggagcagagggtgatggccctgtatgacttccaggcccggagcccccgggaggtgaccatgaagaagggagatgtgctgaccctgctgagcagcatcaacaaggactggtggaaggtggaggccgctgaccaccagggcatcgtgcctgctgtgtatgtgcggcggctggcccatgatgagttccccatgctgccccagaggcggcgggaggagcccggcaacatcacccagaggcaggagcagatcgagaaccagtaccgcagcctgctggacagagctgaggagaggagaagaaggctgctgcagcgctacaatgagttcctgctggcctatgaagctggggacatgctggagtggatccaggagaagaaggccgagaacacaggagtggagctggatgatgtgtgggagctgcagaagaagtttgatgagttccagaaggacctgaacaccaatgagccccggctgcgggacatcaacaaggtggctgatgacctgctgtttgagggcctgctgaccccagagggcgcccagatccggcaggagctgaacagccgctggggcagcctgcagaggctggctgatgagcagaggcagctgctgggcagcgcccatgctgtggaggtgttccaccgggaggctgatgacaccaaggagcagatcgagaagaagtgccaggccctgtctgctgctgaccccggcagtgacctcttctctgtgcaggccctgcagaggagacatgagggctttgagcgggacctggtgcccctgggggacaaggtgaccatcctgggggagacagctgagcggctgtctgagagccacccagatgccacagaggacctgcagaggcagaagatggagctgaatgaggcctgggaggacctgcagggccgcaccaaggacaggaaggagagcctgaatgaggcccagaagttctacctgttcctgagcaaggcccgggacctgcagaactggatcagcagcatcggcggcatggtgagcagccaggagctggccgaggacctgaccggcatcgagatcctgctggagcggcaccaggagcacagagctgacatggaggccgaggcccccaccttccaggccctggaggacttctctgctgagctgattgacagcggccaccacgccagccctgagattgagaagaagctgcaggccgtgaagctggagagagatgacctggagaaggcctgggagaagaggaagaagatcctggaccagtgcctggagctgcagatgttccagggcaactgtgaccaggtggagagctggatggtggcccgggagaacagcctgcggagtgatgacaagagcagcctggacagcctggaggccctgatgaagaagagagatgacctggacaaggccatcacagcccaggagggcaagatcacagacctggagcactttgctgagagcctgattgctgatgagcactacgccaaggaggagatcgccacccggctgcagagggtgctggaccgctggaaggccctgaaggcccagctgattgatgagaggaccaagctgggggactatgccaacctgaagcagttctacagagacctggaggagctggaggagtggatcagcgagatgctgcccacagcctgtgatgagagctacaaggatgccaccaacatccagaggaagtacctgaagcaccagacctttgcccacgaggtggatggccgctctgagcaggtgcacggcgtcatcaacctgggcaacagcctgattgaatgttctgcctgtgatggaaatgaggaggccatgaaggagcagctggagcagctgaaggagcactgggaccacctgctggagaggaccaatgacaagggcaagaagctgaatgaggccagccggcagcagcgcttcaacaccagcatccgggactttgagttctggctgtctgaggccgagaccctgctggccatgaaggaccaggcccgggacctggccagcgctggcaacctgctgaagaagcaccagctgctggagcgggagatgctggcccgggaggatgccctgaaggacctgaacaccctggccgaggacctgctgagcagcggcaccttcaacgtggaccagatcgtgaagaagaaggacaacgtgaacaagcgcttcctgaatgtgcaggagctggccgccgcccaccacgagaagctgaaggaggcctatgccctcttccagttcttccaggacctggatgatgaggagagctggattgaggagaagctgatccgggtgagcagccaggactatggccgggacctgcagggcgtgcagaacctgctgaagaagcacaagaggctggagggggagctggtggcccacgagcccgccatccagaatgtgctggacatggccgagaagctgaaggacaaggctgctgtgggccaggaggagatccagctgcggctggcccagtttgtggagcactgggagaagctgaaggagctggccaaggcccggggcctgaagctggaggagagcctggagtacctgcagttcatgcagaatgctgaggaggaggaggcctggatcaatgagaagaatgccctggccgtgcggggggactgtggggacaccctggccgccacccagagcctgctgatgaagcatgaggccctggagaatgactttgctgtgcatgagaccagggtgcagaatgtgtgtgcccagggcgaggacatcctgaacaaggaggagagccagaacaaggagatcagcagcaagattgaggccctgaatgagaagacccccagcctggccaaggccatcgccgcctggaagctgcagctggaggatgattatgccttccaggagttcaactggaaggcagatgtggtggaggcctggattgctgacaaggagaccagcctgaagaccaatggaaatggagctgacctgggggacttcctgaccctgctggccaagcaggacaccctggatgccagcctgcagagcttccagcaggagcggctgcctgagatcacagacctgaaggacaagctgatcagcgcccagcacaaccagagcaaggccatcgaggagagatatgctgccctgctgaagcgctgggagcagctgctggaggccagcgctgtgcaccggcagaagctgctggagaagcagctgcccctgcagaaggccgaggacctgtttgtggagtttgcccacaaggccagcgccctgaacaactggtgtgagaagatggaggagaacctgtctgagcctgtgcactgtgtgtccctgaatgagatccggcagctgcagaaggaccacgaggacttcctggccagcctggcccgggcccaggccgacttcaagtgcctgctggagctggaccagcagatcaaggccctgggcgtgcccagcagcccctacacctggctgactgtggaggtgctggagaggacctggaagcacctgagtgacatcatcgaggagcgggagcaggagctgcagaaggaggaggcccggcaggtgaagaactttgagatgtgccaggagtttgagcagaatgccagcaccttcctgcagtggatcctggagacccgggcctacttcctggatggcagcctgctgaaggagaccggcaccctggagagccagctggaggccaacaagaggaagcagaaggagatccaggccatgaagaggcagctgaccaagatcgtggacctgggggacaacctggaggatgccctgatcctggacatcaagtacagcaccatcggcctggcccagcagtgggaccagctgtaccagctgggcctgaggatgcagcacaacctggagcagcagatccaggccaaggacatcaagggcgtgtctgaggagaccctgaaggagttcagcaccatctacaagcactttgatgagaacctgaccggccgcctgacccacaaggagttccgcagctgcctgcggggcctgaactactacctgcccatggtggaggaggatgagcacgagcccaagtttgagaagttcctggatgctgtggaccccggcaggaagggctacgtgtccctggaggactacacagccttcctgattgacaaggagagcgagaacatcaagagcagtgatgaaattgaaaatgccttccaggccctggccgagggcaagagctacatcaccaaggaggacatgaagcaggccctgaccccagagcaggtgtccttctgtgccacccacatgcagcagtacatggacccccggggccgcagccacctgagcggctatgactatgtgggcttcaccaacagctacttcggcaactag

SEQ ID NO: 298846 - DNA, 7260 bp, Artificial Sequence
  derived and/or modified sequence
atggagcagttccccaaggagaccgtggtggagagcagcggccccaaggtgctggagacagctgaggagatccaggagcggcggcaggaggtgctgacccgctaccagagcttcaaggagcgggtggccgagcggggccagaagctggaggacagctaccacctgcaggtgttcaagagagatgctgatgacctgggcaagtggatcatggagaaggtgaacatcctgacagacaagagctatgaggaccccaccaacatccagggcaagtaccagaagcaccagagcctggaggccgaggtgcagaccaagagccggctgatgtctgagctggagaagacccgggaggagcgcttcaccatgggccacagcgcccacgaggagaccaaggcccacatcgaggagctgcggcacctgtgggacctgctgctggagctgaccctggagaagggggaccagctgctgcgggccctgaagttccagcagtatgtgcaggagtgtgccgacatcctggagtggattggagacaaggaggccatcgccacctctgtggagctgggggaggactgggagaggacagaggtgctgcacaagaagtttgaggacttccaggtggagctggtggccaaggagggccgggtggtggaggtgaaccagtatgccaatgaatgtgccgaggagaaccacccagacctgcccctcatccagagcaagcagaatgaggtgaatgctgcctgggagcggctgcggggcctggccctgcagaggcagaaggccctgagcaatgctgccaacctgcagcgcttcaagagagatgtgacagaggccatccagtggatcaaggagaaggagcctgtgctgaccagcgaggactatggcaaggacctggtggccagcgagggcctcttccacagccacaagggcctggagaggaacctggccgtgatgtctgacaaggtgaaggagctgtgtgccaaggccgagaagctgaccctgagccaccccagtgatgccccccagatccaggagatgaaggaggacctggtgtcctcctgggagcacatccgggccctggccaccagccgctatgagaagctgcaggccacctactggtaccaccgcttcagcagtgactttgatgagctgagcggctggatgaatgagaagacagctgccatcaatgctgatgagctgcccacagatgtggccggcggggaggtgctgctggacagacaccagcagcacaagcatgaaattgacagctatgatgaccgcttccagagcgcagatgagaccggccaggacctggtgaatgccaaccacgaggccagtgatgaggtgcgggagaagatggagatcctggacaacaactggacagccctgctggagctgtgggatgagcggcaccggcagtatgagcagtgcctggacttccacctgttctacagagattctgagcaggtggacagctggatgagccggcaggaggccttcctggagaatgaagacctgggcaacagcctgggcagcgctgaggccctgctgcagaagcatgaagattttgaggaggccttcaccgcccaggaggagaagatcatcaccgtggacaagacagccaccaagctgattggagatgaccactatgacagcgagaacatcaaggccatcagagatggcctgctggccaggagagatgccctgcgggagaaggccgccacccggcggcggctgctgaaggagagcctgctgctgcagaagctgtatgaagattctgatgacctgaagaactggatcaacaagaagaagaagctggctgatgatgaggactacaaggacatccagaacctgaagagccgggtgcagaagcagcaggtgtttgagaaggagctggccgtgaacaagacccagctggagaacatccagaagacaggccaggagatgattgagggcggccactacgccagtgacaacgtgaccacccggctgtctgaggtggccagcctgtgggaggagctgctggaggccaccaagcagaagggcacccagctgcacgaggccaaccagcagctgcagtttgaaaataatgctgaggacctgcagcgctggctggaggatgtggagtggcaggtgaccagtgaagattatggcaagggcctggccgaggtgcagaaccggctgaggaagcacggcctgctggagagcgctgtggccgcccggcaggaccaggtggacatcctgacagacctggccgcctactttgaggagatcggccacccagacagcaaggacatccgggcccggcaggagagcctggtgtgccgctttgaggccctgaaggagcccctggccaccaggaagaagaagctgctggacctgctgcacctgcagctgatctgccgggacacagaagatgaggaggcctggatccaggagacagagcccagcgccaccagcacctacctgggcaaggacctgattgccagcaagaagctgctgaacagacacagggtcatcctggagaacatcgccagccatgagccccgcatccaggagatcacagagcggggcaacaagatggtggaggagggccactttgctgctgaagatgtggccagccgggtgaagagcctgaaccagaacatggagagcctgcgggcccgggccgcccggcggcagaatgacctggaggccaacgtgcagttccagcagtacctggccgacctgcatgaagctgagacctggatccgggagaaggagcccatcgtggacaacaccaactatggagcagatgaggaggccgccggggccctgctgaagaagcatgaggccttcctgctggacctgaacagctttggagacagcatgaaggccctgaggaaccaggccaatgcctgccagcagcagcaggccgcccctgtggagggcgtggccggggagcagagggtgatggccctgtatgacttccaggcccggagcccccgggaggtgaccatgaagaagggagatgtgctgaccctgctgagcagcatcaacaaggactggtggaaggtggaggccgctgaccaccagggcatcgtgcctgctgtgtatgtgcggcggctggcccatgatgagttccccatgctgccccagaggcggcgggaggagcccggcaacatcacccagaggcaggagcagatcgagaaccagtaccgcagcctgctggacagagctgaggagaggagaagaaggctgctgcagcgctacaatgagttcctgctggcctatgaagctggggacatgctggagtggatccaggagaagaaggccgagaacacaggagtggagctggatgatgtgtgggagctgcagaagaagtttgatgagttccagaaggacctgaacaccaatgagccccggctgcgggacatcaacaaggtggctgatgacctgctgtttgagggcctgctgaccccagagggcgcccagatccggcaggagctgaacagccgctggggcagcctgcagaggctggctgatgagcagaggcagctgctgggcagcgcccatgctgtggaggtgttccaccgggaggctgatgacaccaaggagcagatcgagaagaagtgccaggccctgtctgctgctgaccccggcagtgacctcttctctgtgcaggccctgcagaggagacatgagggctttgagcgggacctggtgcccctgggggacaaggtgaccatcctgggggagacagctgagcggctgtctgagagccacccagatgccacagaggacctgcagaggcagaagatggagctgaatgaggcctgggaggacctgcagggccgcaccaaggacaggaaggagagcctgaatgaggcccagaagttctacctgttcctgagcaaggcccgggacctgcagaactggatcagcagcatcggcggcatggtgagcagccaggagctggccgaggacctgaccggcatcgagatcctgctggagcggcaccaggagcacagagctgacatggaggccgaggcccccaccttccaggccctggaggacttctctgctgagctgattgacagcggccaccacgccagccctgagattgagaagaagctgcaggccgtgaagctggagagagatgacctggagaaggcctgggagaagaggaagaagatcctggaccagtgcctggagctgcagatgttccagggcaactgtgaccaggtggagagctggatggtggcccgggagaacagcctgcggagtgatgacaagagcagcctggacagcctggaggccctgatgaagaagagagatgacctggacaaggccatcacagcccaggagggcaagatcacagacctggagcactttgctgagagcctgattgctgatgagcactacgccaaggaggagatcgccacccggctgcagagggtgctggaccgctggaaggccctgaaggcccagctgattgatgagaggaccaagctgggggactatgccaacctgaagcagttctacagagacctggaggagctggaggagtggatcagcgagatgctgcccacagcctgtgatgagagctacaaggatgccaccaacatccagaggaagtacctgaagcaccagacctttgcccacgaggtggatggccgctctgagcaggtgcacggcgtcatcaacctgggcaacagcctgattgaatgttctgcctgtgatggaaatgaggaggccatgaaggagcagctggagcagctgaaggagcactgggaccacctgctggagaggaccaatgacaagggcaagaagctgaatgaggccagccggcagcagcgcttcaacaccagcatccgggactttgagttctggctgtctgaggccgagaccctgctggccatgaaggaccaggcccgggacctggccagcgctggcaacctgctgaagaagcaccagctgctggagcgggagatgctggcccgggaggatgccctgaaggacctgaacaccctggccgaggacctgctgagcagcggcaccttcaacgtggaccagatcgtgaagaagaaggacaacgtgaacaagcgcttcctgaatgtgcaggagctggccgccgcccaccacgagaagctgaaggaggcctatgccctcttccagttcttccaggacctggatgatgaggagagctggattgaggagaagctgatccgggtgagcagccaggactatggccgggacctgcagggcgtgcagaacctgctgaagaagcacaagaggctggagggggagctggtggcccacgagcccgccatccagaatgtgctggacatggccgagaagctgaaggacaaggctgctgtgggccaggaggagatccagctgcggctggcccagtttgtggagcactgggagaagctgaaggagctggccaaggcccggggcctgaagctggaggagagcctggagtacctgcagttcatgcagaatgctgaggaggaggaggcctggatcaatgagaagaatgccctggccgtgcggggggactgtggggacaccctggccgccacccagagcctgctgatgaagcatgaggccctggagaatgactttgctgtgcatgagaccagggtgcagaatgtgtgtgcccagggcgaggacatcctgaacaaggtgctgcaggaggagagccagaacaaggagatcagcagcaagattgaggccctgaatgagaagacccccagcctggccaaggccatcgccgcctggaagctgcagctggaggatgattatgccttccaggagttcaactggaaggcagatgtggtggaggcctggattgctgacaaggagaccagcctgaagaccaatggaaatggagctgacctgggggacttcctgaccctgctggccaagcaggacaccctggatgccagcctgcagagcttccagcaggagcggctgcctgagatcacagacctgaaggacaagctgatcagcgcccagcacaaccagagcaaggccatcgaggagagatatgctgccctgctgaagcgctgggagcagctgctggaggccagcgctgtgcaccggcagaagctgctggagaagcagctgcccctgcagaaggccgaggacctgtttgtggagtttgcccacaaggccagcgccctgaacaactggtgtgagaagatggaggagaacctgtctgagcctgtgcactgtgtgtccctgaatgagatccggcagctgcagaaggaccacgaggacttcctggccagcctggcccgggcccaggccgacttcaagtgcctgctggagctggaccagcagatcaaggccctgggcgtgcccagcagcccctacacctggctgactgtggaggtgctggagaggacctggaagcacctgagtgacatcatcgaggagcgggagcaggagctgcagaaggaggaggcccggcaggtgaagaactttgagatgtgccaggagtttgagcagaatgccagcaccttcctgcagtggatcctggagacccgggcctacttcctggatggcagcctgctgaaggagaccggcaccctggagagccagctggaggccaacaagaggaagcagaaggagatccaggccatgaagaggcagctgaccaagatcgtggacctgggggacaacctggaggatgccctgatcctggacatcaagtacagcaccatcggcctggcccagcagtgggaccagctgtaccagctgggcctgaggatgcagcacaacctggagcagcagatccaggccaaggacatcaagggcgtgtctgaggagaccctgaaggagttcagcaccatctacaagcactttgatgagaacctgaccggccgcctgacccacaaggagttccgcagctgcctgcggggcctgaactactacctgcccatggtggaggaggatgaacatgagcccaagtttgagaagttcctggatgctgtggaccccggcaggaagggctacgtgtccctggaggactacacagccttcctgattgacaaggagagcgagaacatcaagagcagtgatgaaattgaaaatgccttccaggccctggccgagggcaagagctacatcaccaaggaggacatgaagcaggccctgaccccagagcaggtgtccttctgtgccacccacatgcagcagtacatggacccccggggccgcagccacctgagcggctatgactatgtgggcttcaccaacagctactttggaaattag

SEQ ID NO: 298847 - DNA, 7251 bp, Artificial Sequence
  derived and/or modified sequence
atggagcagttccccaaggagaccgtggtggagagcagcggccccaaggtactggaaacagcggaggagattcaggagcgacggcaggaggtcttgacacgctatcagtcctttaaagagcgcgtagccgagagagggcagaaactcgaagatagttatcaccttcaagtctttaaaagggacgcggacgaccttggcaagtggatcatggagaaagtgaacattctaacagacaagtcatacgaggaccccactaatattcagggcaagtaccaaaaacatcagtccctggaggccgaggtgcagacgaagtcacggctcatgtctgagctggagaagaccagggaagagcggtttaccatggggcattccgcccacgaggagactaaggctcacatagaggagctgcgccacctgtgggacctgttactggagctaacactggaaaagggggatcaactgcttcgggctctcaaattccaacagtatgtgcaagagtgcgctgatattcttgaatggataggtgataaggaagccatcgcgacctccgtagagctgggggaggattgggagcgcaccgaggttctacacaagaagtttgaagactttcaggtggagctcgtcgccaaagagggaagagtcgtggaggtgaatcagtacgctaacgagtgtgcggaagagaatcaccctgacctccccttaattcagtccaagcagaatgaggtgaatgctgcctgggagcggttgagggggttagccttgcaaagacagaaagctcttagcaatgctgcgaacctccagaggttcaagcgagatgtgacggaggcgattcagtggattaaggagaaggagcccgtgctaacatctgaagactacggaaaggatctcgtggcgagtgaggggctgtttcactctcacaaaggcctggagcgaaaccttgcagtcatgtcagacaaggtgaaagagctatgcgctaaggctgagaagttgaccctttcacatccatctgacgctccacagattcaggaaatgaaagaggatttggttagttcttgggagcacatccgagccctcgcaaccagccgctacgagaagctgcaggcaacttattggtaccatagattcagctctgatttcgacgagctcagcggatggatgaacgagaaaaccgccgccattaatgctgacgagctgcccacagacgtagccgggggtgaagtgctcctcgacagacaccagcagcacaagcatgagatcgattcttatgatgacagatttcagagcgcggatgagacaggccaggatctcgtgaacgccaatcacgaagcttctgacgaagtgcgtgagaagatggagatcttggataataattggaccgccctcctcgagctttgggatgaaagacacaggcagtatgaacagtgcctcgacttccacttattttatagagattccgaacaggttgatagttggatgagcaggcaggaggctttcctggaaaatgaggaccttggaaatagtctggggagcgctgaagcccttctgcagaagcacgaggattttgaggaagcttttaccgcacaggaggaaaagataatcactgtcgataaaaccgcgaccaaattgattggcgacgaccattatgactccgaaaacatcaaagctattcgagacgggctgctcgcccgaagagatgccttgcgcgaaaaggcagcaaccagacgaagactgctcaaggaatctctgttgctccagaaactgtatgaggattccgatgatttaaagaactggataaataagaagaaaaagttagccgatgatgaagactataaggatatacagaacctcaagtcgcgtgtgcagaagcagcaagtgtttgagaaggaactggcagtcaataaaacacagctcgaaaatatccagaaaacaggacaggaaatgatagagggaggacactatgcctccgataacgtgaccactaggctgtctgaggtagcctccctgtgggaggaactgcttgaagcgactaagcaaaaggggactcagcttcatgaggcaaaccagcagctacagtttgaaaacaatgccgaggacttacagagatggctagaggacgtagagtggcaggtcaccagcgaggactacgggaagggactggctgaagtgcagaatagattacggaaacacggcctgttggaatccgctgtggccgcgcgtcaagatcaggttgacatccttaccgatctggctgcctatttcgaagaaatcggccacccagacagcaaggacatacgggccaggcaagaaagtctcgtttgccgctttgaggctctgaaggagcctctagctacccggaaaaagaagcttctggatttacttcacctgcaactcatctgccgggacaccgaagatgaagaggcctggattcaggaaaccgagccctctgctactagtacctacctaggaaaagatttgattgccagcaagaaactactcaacagacaccgggttatcctcgaaaacattgcatctcatgagccccgaatccaggaaattacagagcgcggcaacaaaatggtggaagaagggcatttcgccgcggaggatgtggccagccgagtgaaaagtctcaaccagaacatggaatccttaagggcgcgcgccgcccgaagacaaaacgaccttgaagcaaacgttcagttccagcagtaccttgctgatttacacgaagccgaaacgtggatacgcgagaaggagcctattgtcgacaatactaactacggggcagatgaagaagcagccggggcattgttaaaaaaacatgaggctttcctcctggacctgaactcttttggggatagtatgaaggctctgaggaatcaagctaatgcatgccagcagcagcaggccgccccagttgagggggtggctggagagcagcgcgtgatggctctgtacgacttccaagctcgtagtccgagggaggtgaccatgaagaagggcgatgtccttacccttctgtcttccattaataaggactggtggaaggtggaggccgccgatcatcagggtattgtacccgccgtgtacgttagacgcctggcacatgacgagttccccatgttaccccaaaggcgtcgggaagagcctggaaatatcacgcagcgccaggaacagatcgaaaatcagtatagaagcctgcttgacagggctgaggaaaggaggaggcggctgctgcagcggtataatgagtttctgctcgcctacgaggcaggagacatgctggagtggatccaggagaaaaaggccgagaacaccggagtggaactggatgacgtctgggagctgcagaaaaaattcgatgaattccaaaaggatctcaatacaaacgaaccacgcctccgggacatcaataaggtggccgacgaccttctattcgaaggactgctgacacctgaaggagcccagattcgtcaggagctcaactcccggtggggaagcctgcaaaggcttgctgatgagcagagacaactcctgggctccgcacatgcagtagaggtgttccatagggaggccgatgacactaaggaacaaatcgagaaaaaatgccaggccctgagtgctgccgacccagggtcagacttgttctcagtccaggcccttcaaagaagacatgagggattcgagcgagatctcgtgcccctcggagacaaggttactatcctgggagagacggcagaacggctcagcgagagccaccctgacgccactgaggacctgcaaaggcagaagatggagctgaacgaggcttgggaggacctccaggggaggactaaggacagaaaagagagtctcaatgaggcacagaagttttacttgtttctgagcaaggcgagagaccttcagaactggatatcttcaatcggcggcatggttagcagtcaagagctggccgaggacctgaccggtatcgaaatcctattggaaagacatcaggagcacagagctgacatggaagccgaagcacctactttccaggctctggaggactttagcgccgagctcattgactctggacaccatgcctccccagagattgaaaaaaaactccaggcggtaaagctagagcgcgacgatctcgagaaagcttgggagaagcgaaaaaagatcctggaccagtgcttggagctccaaatgttccagggcaattgtgaccaggttgagagctggatggtcgctagggaaaatagcctcaggtcagacgataagtcctcgctggattcactggaggctcttatgaagaaacgcgatgatcttgataaggctatcacggctcaggagggcaaaatcaccgacctggaacacttcgctgagtccctgattgccgatgagcactacgcaaaagaagagatcgcgacaaggctgcagcgcgtgctggacaggtggaaagcactcaaggcgcagcttattgatgagcgtacaaagctcggagactacgccaatctgaagcaattttatcgtgacctcgaagagctggaggagtggatcagcgagatgctgcccaccgcatgcgacgaatcatacaaagacgcaactaacatacaacgcaagtatctgaaacaccagacattcgcccacgaggttgacggcaggtctgagcaggtccacggtgtcatcaatcttggcaactccctcatagagtgttccgcatgcgacggcaacgaagaggcaatgaaagaacagctggaacagctgaaagagcactgggaccacttactggagcgaactaatgacaaggggaagaagttgaacgaggccagcaggcagcagcgcttcaatacaagtatccgtgatttcgagttctggttgagtgaggccgagaccctactggcaatgaaggaccaggcacgcgacttagcctccgcagggaaccttctgaaaaaacaccagctgttagagcgggagatgctggcccgcgaagatgctctgaaagatcttaatacacttgcagaagacctgttatcgtcggggactttcaatgtcgatcagatcgtaaagaagaaggacaatgtcaacaaacgctttttgaatgttcaggaattggccgctgcacatcacgagaaattaaaggaggcctacgccctctttcagttcttccaggacttggacgacgaggaaagctggatagaggaaaagttgattagagtcagctcacaggactatggaagagacctgcagggtgtccaaaacctgttgaaaaaacacaagcgtttagaaggagagttggtggcccatgagcccgccatccagaatgtgctggatatggccgagaagctgaaggacaaggccgctgtcggtcaggaggaaattcaattacgtctggcccagtttgtcgagcactgggaaaagttgaaggagctggcaaaggcgcggggattgaaactggaagagtccctcgagtacctacagtttatgcagaatgcggaagaggaggaggcatggattaatgagaagaacgcccttgcagttcggggagattgcggagatacattggcagccactcaatctctgttgatgaagcatgaagcattggagaacgactttgcagtgcacgagacaagagtccagaacgtttgcgcccaaggagaggatattctgaacaaggaggaatctcaaaacaaagagatctcctctaaaatagaagccctgaatgagaaaaccccgtcactggccaaagccatcgcagcttggaagctgcagttggaggacgactatgccttccaagagtttaactggaaggctgacgtggtagaagcatggattgccgacaaagagactagtttgaagaccaacggtaatggtgccgacctgggtgatttcctaactttgctggccaaacaagacactcttgatgcttcactgcaatcctttcagcaagagcgattgccagagatcactgatcttaaagacaaactaattagtgcccagcacaatcagtcaaaagccatagaagaaaggtatgctgccctgttgaagcgctgggaacagctgttggaggcctctgctgtgcatcgacagaaactactcgaaaagcagctaccacttcagaaggcagaggacctattcgtggagttcgcccacaaggcctcggcccttaataattggtgtgagaagatggaagagaatctgagtgagcccgtccactgtgtctcgctgaacgaaattcgccagctgcagaaggaccatgaagatttccttgctagcctggcccgggcccaggcggattttaagtgcctgctggaactagatcaacagatcaaagcactgggcgtgcctagctctccatacacctggctgaccgtggaggtcctagagcgcacgtggaaacacctgagtgacattatagaagagcgagaacaggagctgcaaaaggaggaggctagacaggtcaaaaacttcgaaatgtgccaggagtttgaacagaacgcttccacattcctccagtggattctggaaaccagagcctacttccttgatggatctctccttaaagagaccgggacattggaatcacagctagaagctaataagaggaagcagaaggagatccaggccatgaagcgacaactgacaaagattgtggatctgggcgacaatctggaggatgcactcatactggacataaagtattctacgattgggctggcccagcaatgggaccagttgtaccagctgggcttaaggatgcaacacaacctggagcagcaaatccaggccaaggatatcaagggggtgtctgaagaaacgttaaaggaattcagcacaatctataagcatttcgacgaaaacttgacagggcgactgactcataaggagtttcgctcatgcctcagaggcctcaactattacctgcctatggttgaggaagacgagcacgagcctaagtttgagaagttcttagatgcggttgaccccggccgaaagggatacgttagtctggaagactatacggcctttcttatcgataaggaatccgagaatatcaagagcagcgacgaaatagaaaatgccttccaagcactcgcggaagggaaatcctacatcacaaaggaggatatgaagcaggctcttacgcccgaacaggtgtcgttctgtgcaactcacatgcagcagtacatggaccccaggggaagatcccatctgagtggttacgactatgttggttttacgaattcatactttggcaattag

SEQ ID NO: 298848 - DNA, 7260 bp, Artificial Sequence
  derived and/or modified sequence
atggagcagttccccaaggagaccgtggtggagagcagcggccccaaagtccttgagaccgccgaggagattcaagagagacgtcaggaggtgctgacgcgatatcaatcttttaaggagagagtcgctgaaagggggcagaagcttgaagattcgtaccacctccaggtctttaaaagagacgccgatgacctcggtaaatggattatggaaaaggtcaacatcttgaccgataagtcctacgaagacccaactaacattcagggtaagtaccaaaaacatcagtctcttgaagctgaggtgcagacaaaatcgcgcctgatgagtgagcttgagaagactagggaagagaggttcaccatggggcacagcgcacacgaagaaacgaaggcacatattgaggagcttcgccatttatgggaccttctgctcgagttgacacttgagaagggtgaccagctgttgcgggcactgaagtttcagcagtacgtacaagaatgtgccgatatccttgaatggattggcgacaaggaagcaatagccacgtctgttgagttaggcgaggactgggagcgtactgaggtattgcataagaaattcgaagactttcaagttgagctcgtggccaaggaggggcgggtagttgaggtgaatcagtacgcaaatgaatgcgcggaagaaaaccatcccgacctccctctcatacagagcaagcaaaatgaagtcaatgcagcttgggagcgcctccgtggcctggctctgcagcgtcagaaagccttatccaatgccgctaacttgcagcgattcaaaagggatgtgacagaagccattcagtggattaaggaaaaagagcccgtgctgacatcggaggattacggaaaagaccttgtcgcctccgaggggctgttccattctcacaagggcctggagcgcaacttggcggtcatgagtgacaaagtgaaggagttatgcgcgaaggcagagaaactgacactgtcccatccaagcgacgcgccccagatccaggaaatgaaagaggacctcgtgtctagttgggagcatatcagagctctggcgacatccagatacgaaaaactgcaggcgacttattggtaccacaggttctcctcagactttgatgagctttccggctggatgaatgaaaagaccgcagccattaacgccgacgaactgccaaccgatgtagctggcggtgaggtgctgctcgacaggcatcagcagcacaagcacgaaatagatagttatgacgacagatttcagtccgccgacgaaactggccaggatctggtgaatgctaaccacgaagccagtgatgaggttcgggagaaaatggagattctggataacaactggacagcccttttggaactgtgggatgagaggcacaggcagtacgagcagtgcctcgatttccatctattctatcgcgattccgagcaggttgatagctggatgagcaggcaagaggcattcctggagaacgaggatctcggcaactctttgggatctgctgaagccctgctccagaagcacgaggacttcgaggaagccttcactgcccaagaggaaaaaattataactgttgacaaaactgctactaaactgatcggcgacgaccattacgactctgaaaatatcaaagccattcgggatgggctgctggcaagaagagatgctctgcgtgaaaaggccgctactaggcgacgtctgctgaaggagagtctgctgctgcagaagttgtacgaggactctgacgacctgaaaaactggattaacaaaaaaaaaaagcttgctgacgacgaggactataaggacatccagaaccttaagtccagagttcaaaagcagcaagtttttgaaaaggaactggccgtcaacaagacgcagttagagaatattcaaaaaacaggccaggagatgatcgaaggcgggcactacgcttctgataacgtgactaccaggttgagtgaagtggcttcactctgggaggagctgttggaggcgactaagcagaagggcacgcagttgcatgaggccaaccaacagttgcagttcgagaacaacgcagaagatttacagcgttggctcgaggacgtggaatggcaagtgacgtccgaggactatggcaaagggctggccgaagtgcagaatcggctcaggaaacacgggctgctggagtcagcagtcgccgccaggcaagatcaagtggacattctcacagacctggccgcctactttgaagagatcggccatcctgactccaaggacattcgggcacgacaggaaagtctggtctgtcgattcgaagccctcaaggaacccctcgcgacccggaagaagaaattactggatcttctgcatctgcaactgatctgccgagatactgaggatgaagaggcttggattcaggagacggagccttcagcaacgtccacttacctgggaaaggacttgatagccagcaaaaagttgcttaacagacaccgcgtgattctggaaaacatcgcatctcacgaaccgagaattcaggagattaccgaacgcggcaacaagatggtcgaggaaggccatttcgccgcagaagacgttgcgtcacgtgtgaaatcactcaaccagaacatggagtcactgcgcgcaagagcagcacgcaggcagaatgacctcgaggccaacgtgcagttccagcagtacctagccgacctgcacgaggctgaaacctggatcagggaaaaggagcccattgtcgacaacactaactatggggccgatgaagaagctgccggggccctgttgaaaaagcatgaggccttccttttagatctcaatagttttggggactcgatgaaagctcttcgcaatcaggctaacgcctgccagcagcaacaggcagcaccggtggaaggtgttgccggggaacagcgagtgatggctctgtacgatttccaagcccggagccctcgggaggtaactatgaaaaaaggagacgtccttaccttgctgtcctccatcaataaagactggtggaaagtggaggccgccgaccaccaaggtatcgtgcccgccgtctatgtgagacgcctcgcccacgatgagttcccaatgctgcctcaacgcagaagggaagagcctgggaatattacacagcgccaggagcaaatcgagaaccagtatcgatccctactggacagagccgaggagagacggaggaggcttttacagcggtataatgaatttctgctagcctacgaagccggagatatgctcgagtggattcaggagaaaaaagccgagaacaccggtgttgagcttgacgacgtctgggagctacagaagaagttcgacgaatttcaaaaggacctgaatacgaacgaaccgaggttaagagacattaacaaggtcgccgatgatctgctctttgaaggtctcctgactcctgaaggcgcacagattcgacaagagctgaactctcgatggggatcattgcagaggctggcagacgaacagcgccagctcctgggctccgcccacgccgttgaagtgtttcaccgagaggcagacgacaccaaggagcaaatagagaaaaagtgccaagctctgtcagcggccgatcctggtagcgaccttttttcggtacaagcacttcagcggcggcatgaggggtttgaacgagatctcgtgcccctaggcgacaaggtgacgattctcggggaaacggctgagagactaagcgaaagtcacccggacgctactgaggatttacagaggcagaagatggaactaaacgaggcgtgggaagacctccaaggacgtactaaggatagaaaggaatcactcaatgaggcgcagaagttctacttattcctttccaaggccagggatctgcagaattggatttccagtattggcggaatggtgtcctcccaggaattggctgaggatctgacaggcatagagatcctactggaacggcaccaagagcatcgtgccgacatggaagcggaggcacccacttttcaagctctggaagatttctcagctgagctcatcgattccggacaccatgctagtcccgagatcgaaaaaaagcttcaggccgtgaaacttgagcgcgatgaccttgagaaggcttgggaaaagcgaaaaaagatcctggatcaatgcctggaactgcaaatgtttcagggtaattgcgaccaggtggaaagctggatggtcgccagagaaaattcacttcggagtgatgacaagtcctctctggatagtctggaagccttaatgaaaaagagagacgacttggataaagctattacagcccaggaaggaaagattacagatctggaacacttcgctgagagcctcatagcggacgagcactacgcgaaagaggaaattgctacgagactccagcgtgtgctggatcggtggaaagctctgaaggcacagcttattgacgagagaaccaagttgggagattatgcaaacctgaagcagttctatagagatttggaggagctagaggagtggattagcgagatgttaccaacagcatgcgacgagagctacaaggacgccacaaatatacagcgcaagtacttgaagcatcagaccttcgctcacgaagtggacgggcgctcagagcaggtacacggagtcattaacttgggcaactcactaatcgaatgtagtgcatgcgatgggaatgaggaagcgatgaaggagcaactggaacagctgaaagagcactgggaccacttgctcgaaaggacaaatgataaaggaaaaaaactcaacgaggcgtcaaggcagcagcggtttaatacttccattcgcgatttcgagttctggttatctgaagcagagactttactggctatgaaagaccaggccagagacctcgcctccgctggcaacctgcttaagaaacatcagcttttagaacgggaaatgttggcacgggaggacgcgctcaaagaccttaacacactggccgaagacctgctgtcctctggaacctttaatgtggaccagatagtaaagaaaaaagacaatgtcaacaaacggtttttaaacgtccaggaactcgcagccgctcaccatgaaaaactcaaagaggcctacgccttgtttcagttcttccaggacctcgacgatgaggagagctggattgaagaaaaattaatcagagtatcatctcaggattacggtcgagacttacagggcgtccagaatctgttaaagaagcataagcgcctcgagggagaacttgtggctcatgagcccgctatacagaacgtgctggacatggcagagaagctcaaggacaaggcagccgtgggccaggaggaaattcagctccgactagctcagttcgtggagcattgggagaagttgaaagaactggcaaaggcgcgcgggttgaagctcgaggaatcattggagtacctccagttcatgcagaacgcagaggaggaagaagcatggatcaatgaaaaaaacgccctcgcagtccgaggagactgcggagataccctggctgccacccagagtctgctgatgaagcacgaggctctggagaatgacttcgcagtccatgagacaagagttcagaatgtgtgtgcccaaggtgaggacattctcaacaaggtgctacaagaggaaagtcagaacaaagagatttcaagcaaaattgaggcgctgaatgaaaagactccgagccttgccaaagcaatcgccgcttggaagttgcagctggaagacgattacgccttccaagagttcaactggaaagctgacgtcgtggaagcatggattgctgataaagagacctccctcaagactaatgggaatggcgctgatctaggtgattttctgacattgctagctaaacaagatacgttggatgctagcctgcaaagctttcagcaggaaaggcttccagagattactgatttaaaggacaagttgatctcggcacaacacaatcagagcaaggcaatcgaagaacggtatgcagctctcttaaaaaggtgggagcagttgctggaagcctccgctgtgcacagacagaagctgttggagaagcaactgccgctccagaaagccgaagatctgtttgtagaattcgcacataaagccagtgcgcttaataactggtgtgaaaagatggaagagaatctctccgagcctgtgcattgtgtttccctcaatgagatcaggcagttgcaaaaggatcatgaagattttctcgcctctctggctcgcgcccaggctgatttcaagtgtctgttagagttagaccagcaaatcaaagcgctgggtgtgccttcctctccttacacatggctcacagtcgaggtgctggagaggacatggaagcacttgtcggacatcatagaagagagagaacaggagctccagaaagaagaggcaagacaggtgaaaaacttcgaaatgtgccaggagtttgaacaaaatgccagtactttccttcagtggatcttggagacacgcgcttatttcctggacggtagtctactcaaagagacaggaactctggaatctcagctcgaagctaacaaacggaaacagaaagagattcaggcgatgaagcggcagctgactaagatagtcgacttgggagataaccttgaggacgcacttatcttggatatcaagtatagtaccatcggcctcgcacagcaatgggatcaactgtaccagctaggactgagaatgcaacataacttagagcagcagatccaggctaaggacataaaaggggtgtcagaagagaccctcaaggagtttagtacaatctataagcattttgatgagaacctcacaggccgtttaacccataaagagttcagaagttgtctacgaggccttaattactatctgcctatggtcgaagaggacgaacacgaacctaagttcgagaagttcctcgacgctgtcgacccaggccggaagggatacgtctcactggaggattacaccgccttcctgatagataaggaatcagagaatatcaagagtagcgatgaaatagagaatgccttccaggcactcgcagagggcaagagctatatcaccaaagaagatatgaaacaggctcttaccccagagcaggtgtccttctgtgcaacgcacatgcagcagtacatggatcctagagggagatcccacttgtctggttatgactacgtgggtttcacaaattcctactttggaaactag

SEQ ID NO: 298849 - DNA, 7250 bp, Artificial Sequence
  derived and/or modified sequence
atggagcagttccccaaagagaccgtagttgaaagctcaggcccaaaggtgctggagacagctgaggagattcaagaaagaaggcaagaggttctgactaggtaccagtccttcaaagagcgagtggccgaaagagggcaaaagttggaagacagctaccacctgcaggtatttaagcgagacgcagatgatctcgggaaatggattatggaaaaggttaatatcctgaccgacaagtcttacgaggaccccaccaatatccaagggaagtaccagaagcaccagtctctcgaagcagaagtgcagactaagtccaggcttatgtccgagctggaaaaaacccgagaagaacgctttaccatgggacattcagctcacgaggagaccaaggcacatatcgaggaactccgtcatctctgggatctgctgctggagcttactcttgaaaaaggtgaccagctcctcagggccctgaagtttcagcaatacgtgcaggaatgtgccgacatccttgaatggatcggagacaaggaagctattgcaaccagtgtggagctgggcgaggattgggaaagaacggaggtgttgcacaaaaaatttgaggattttcaggtggaactggtggctaaggagggtagagtagtggaggtgaatcagtacgccaacgaatgcgccgaggaaaatcatcctgatcttcccctaatccagtctaaacagaacgaagtgaacgccgcatgggaacggcttcgcggactggccctgcagagacagaaggctctgtccaacgccgctaacttgcagcggtttaagagagatgtcacggaagcaattcagtggatcaaagagaaggaacctgtgttgacatctgaagattatgggaaggacctggtggcatccgagggtctgttccactctcataaagggctagagaggaacctggccgtgatgagcgacaaggtgaaggagctctgcgcgaaagccgagaaactgactctgtctcaccccagcgacgcccctcagatacaagaaatgaaggaagatttggtgtcctcatgggaacacattagggctttagccacctcgcggtacgaaaagctccaagcaacctactggtatcaccggttctcttccgatttcgacgaactgagtggatggatgaacgaaaaaactgctgcaataaacgcagacgagctccctacagacgtggccggaggtgaagtcctgctggatagacaccagcagcataaacatgagattgatagctacgatgatagattccaaagcgctgatgagacaggacaagacctcgtcaatgcaaaccacgaggccagcgatgaggtacgggagaagatggagatactcgacaacaattggaccgcgctgctcgaattatgggatgagaggcacagacagtacgagcaatgccttgacttccatctgttttatagggactccgaacaagtggactcgtggatgtcaagacaggaagccttcctcgagaacgaggatcttggaaactccctgggctctgctgaggctctgctgcaaaaacatgaggacttcgaggaggcattcacggcgcaagaagagaagattatcaccgtggacaaaacggctacaaaactaataggcgacgaccactatgattccgaaaacatcaaagctattagggacgggctgttggctcgcagagatgctcttagggaaaaggccgctacccgaaggaggctgctgaaagaaagcctgctgctccagaaactgtacgaagattcagacgatctcaagaactggatcaataagaaaaagaagctggccgatgacgaggactataaggacatccagaatctgaagtcccgcgtccagaaacaacaggtattcgagaaggaactagcggtcaataagactcagttagagaatatacagaaaacaggccaggaaatgatcgaagggggtcactacgcctcggacaatgtgactaccagactaagcgaggtggcaagcttgtgggaagagttactggaagccaccaaacagaagggaactcaacttcatgaggccaatcagcagcttcagtttgaaaacaatgccgaggacctgcagcgatggctggaggacgtggaatggcaggtgactagcgaagactatggcaagggcctggcagaggtacagaatcggctgcggaagcacggactcctggaaagcgctgtggctgctaggcaggatcaggtggacatcctaaccgatcttgccgcttacttcgaagagatcgggcacccagattctaaggacatcagggccaggcaagaatccctcgtctgtagatttgaggctctgaaagaacctcttgctacccgcaaaaagaaactcctggacctactgcacttacaactcatttgccgcgacacagaagacgaggaagcttggatccaagagaccgaacctagcgctacttctacttacctcgggaaggatctgatcgcaagtaagaaattattgaatcggcatcgagtgatactggagaatatagctagtcatgagcctcgcatccaggagatcacagaacgagggaacaagatggtggaagaaggacacttcgcagctgaggatgtggccagcagagtgaaaagcctgaatcagaatatggagtccctccgagctcgcgcagccaggaggcagaacgacttggaggccaatgtgcagttccagcaatatttagcagacttgcatgaagcagagacctggataagagagaaagaaccaatcgttgataataccaactacggggcagatgaggaagctgccggtgctttgctaaagaagcatgaggcctttttacttgatctcaattccttcggggattccatgaaagcactgcggaatcaggccaacgcatgtcagcagcaacaggcggcacccgtggagggcgtggcaggcgaacagcgcgtcatggctctgtacgactttcaggcgaggagccccagggaggtcaccatgaagaaaggggatgtgctcacccttttgagcagcataaacaaagattggtggaaggttgaggctgcggaccatcaggggatcgtgcctgctgtatatgttaggcgactggcgcacgacgaattccctatgcttcctcagagacgccgtgaggagcctggtaatatcacacagcgccaagaacagatagaaaaccagtatcgctctttgctcgatagagcggaagagcgaaggaggcgactgctgcagcgatacaatgagttcttactggcgtacgaagcaggtgatatgctcgagtggatacaagaaaaaaaggcggagaatactggggtggagctggacgatgtgtgggaattacagaaaaaatttgacgaattccaaaaggacttgaatacaaatgaacctcgactgcgcgatatcaataaagtggccgacgacttgctttttgaaggcctgctgaccccggaaggagcacaaattcgtcaagagttgaatagccgctggggcagtctgcagaggctcgccgacgaacagcgccaattgctcgggtcagcccacgctgtagaggttttccaccgcgaagctgacgatacaaaagaacagatcgagaaaaaatgccaggccctgagcgccgctgatccaggaagtgatttgttttcggtccaagcgctccagcgtcggcatgaaggcttcgagcgggatctggtgcctttgggagataaagtgaccatccttggggaaaccgccgagcgcctgtctgaatcccatccagacgccactgaggatttgcagcgtcagaagatggagctcaatgaggcgtgggaggatcttcaaggccgaaccaaggacaggaaagaatctctgaacgaagcccagaagttttatctgttcctcagcaaagcacgcgacctgcaaaactggattagctccataggaggtatggtctcctctcaggagctggctgaagacctgactggaattgagattcttctggagagacaccaggaacatcgcgcagacatggaggccgaggcccctacctttcaagccctcgaggatttcagcgctgagctgatcgattcaggtcaccacgcatcccccgaaatcgaaaaaaaactgcaggctgtgaaattagaacgcgacgacctggaaaaagcgtgggaaaaacggaaaaagatcctggatcaatgtctcgagttacagatgtttcaagggaactgtgaccaagtggagtcttggatggtcgcaagagaaaatagtctgcgctccgacgataaaagttcgctagatagcctggaggctttgatgaagaaaagggacgatctggacaaagcgattaccgcccaggagggaaagattaccgacctggaacatttcgccgagtctctaattgccgacgaacattacgctaaagaggagatcgcgacccgactgcagcgcgtgttggaccgatggaaggcccttaaggcacagctgatcgacgagcgcaccaagctgggcgactacgcaaatctgaaacagttctatcgcgaccttgaagaattggaagagtggatctcagagatgctccccaccgcgtgtgacgagtcttataaagatgctacaaatatacaacgaaagtatctgaaacatcagactttcgcacacgaggtggatggccgatccgagcaggtgcacggggtgatcaatcttggcaattcactgatcgagtgttccgcatgcgatgggaatgaagaggccatgaaagaacagctagagcagctcaaagaacactgggatcatctgttagagcgcacgaacgacaaaggcaaaaaactgaacgaggcttccaggcagcagcgctttaatactagcattagagatttcgaattttggctcagcgaggccgagactctgctggctatgaaggatcaggccagggacctagcatcggctggaaacctgctgaaaaaacaccagctacttgaaagggaaatgcttgcccgagaagacgcactaaaagatctgaacacccttgcagaggatttgttgagctcgggaacatttaatgtcgaccaaatagtgaagaaaaaggataatgtgaataaaaggttcctgaacgtgcaagagctggccgcagcacaccatgagaagctcaaggaagcttacgccctgtttcagttcttccaggatctggatgacgaggagtcttggatcgaggagaagctcatcagggttagcagtcaggactacgggagggatctgcagggagtacagaatttgctgaagaaacacaagcgcctggaaggagaattggtggcacacgagcccgcaattcaaaatgtgctggacatggcagagaaactaaaggacaaggccgctgtgggtcaggaagaaatccagctgaggttagcccagttcgttgaacattgggagaagttgaaggagctcgctaaggccaggggactgaagcttgaggaatcattggagtacctccagtttatgcagaacgccgaggaggaggaagcctggatcaacgaaaaaaacgctttggccgtgaggggggattgcggcgatacactggccgcaacccagtccctgctgatgaagcacgaggcactggagaacgacttcgccgtgcacgaaactagggtgcaaaacgtgtgcgcgcaaggggaggacatcctgaataaagaggaaagtcagaataaggagatttcctcaaaaatagaggctctgaacgagaaaaccccatcccttgccaaggcgatcgccgcatggaagttacaactggaggatgactatgcgttccaggagtttaactggaaggcggacgtggtagaagcatggatcgcagacaaggaaacttcattgaagaccaatggcaacggggcagatctgggcgactttctgaccctgctggctaagcaagatactcttgatgccagcttgcaaagctttcagcaggaaaggctaccagaaattaccgatctcaaggataagcttatatccgcgcaacacaatcagtcaaaggccatcgaagagcggtacgccgctttgctgaaaaggtgggagcagctgttggaggcctcggccgttcaccgccagaaactcctcgagaagcagctgcctctgcagaaagctgaagatttattcgtggagttcgcgcataaggcgtcagcccttaacaattggtgtgaaaagatggaagaaaacctgtcagagccggtccactgtgtcagtctgaatgaaattcgccagctacagaaggatcacgaggattttctcgcctctctggcaagggctcaggcagatttcaagtgtctgctagaattagatcagcagattaaagctctcggcgtgcccagtagtccttatacatggctgaccgtggaggttctggagcgaacatggaagcaccttagcgatatcatcgaagagagggagcaggaattgcagaaggaggaggcccgacaagttaaaaactttgaaatgtgccaggaattcgaacagaacgccagcacattcctgcaatggatactggagacaagggcatacttcctggacggctcgctgctgaaggagaccggtactcttgaaagccagctcgaagccaataaaaggaagcagaaggaaatccaggccatgaaaagacagctgactaaaatcgtagacctgggagacaatcttgaggacgccttgatcctggatattaagtactccaccatcggcctggcccaacagtgggaccaattgtaccagcttggtctgcggatgcaacacaacctcgagcagcagatccaggcaaaggacataaagggcgtgtctgaggagaccctcaaggagtttagcactatttataaacactttgacgaaaaccttaccggccgtctcactcacaaggagttccggtcttgcctcagggggctgaactactacctcccaatggttgaggaggatgaacatgaacctaaattcgagaagttcctggacgctgtcgaccccggaagaaagggctatgtcagcctagaggattatactgcgtttctgattgacaaggaaagcgaaaatatcaagagctctgacgaaatagagaacgccttccaggccctcgctgagggtaaatcctatataactaaggaagatatgaagcaggccctaacaccagagcaggtgtctttctgcgcaacacacatgcagcagtatatggacccgaggggcaggtctcatctctccgggtacgactacgttgggtttaccaattcctacttcggaaacta

SEQ ID NO: 298850 - DNA, 7259 bp, Artificial Sequence
  derived and/or modified sequence
atggagcaatttcccaaagaaactgttgtcgaatcaagcggccctaaggtccttgagactgccgaggaaatccaagagagaaggcaggaggtgctcacaagatatcaaagctttaaagaaagagtcgctgagaggggtcagaagcttgaggactcctaccacttgcaagtcttcaaacgggacgcagacgacctggggaaatggatcatggaaaaagtcaacattctgaccgacaagtcctacgaggatcctaccaatatccaggggaagtatcaaaaacatcagagcctggaggccgaggtacaaaccaagagtcggcttatgtcagaactggaaaagacgcgggaggaaagattcacaatgggacattctgctcacgaggagacaaaggctcacatcgaagagctgcgccatctttgggacttgcttttggagctcaccctggaaaagggcgatcaacttttgcgcgctctcaagtttcagcagtacgtccaggaatgcgccgatatattagaatggatcggagataaagaagccatcgctacatccgtcgagttgggcgaggattgggagaggactgaggtcctccacaagaagttcgaggacttccaggtggaacttgtggccaaagaaggaagggtggtggaagtcaaccagtacgccaatgagtgcgccgaagagaatcatcctgacttgcctctaatccagtccaagcagaatgaggtcaacgcagcatgggaaagactacgcggtctggctttgcagcgccagaaggccttaagtaacgccgcaaacctacagcggttcaaaagagacgtcactgaagcaatacagtggatcaaggaaaaagaacctgtgttaacaagcgaggattacggcaaggaccttgtggcctctgaggggcttttccactcccacaaaggattggagcggaacctggcagttatgagcgataaagtcaaggaactatgcgccaaagccgaaaagctgacactgtcccatcccagtgatgcccctcagattcaggagatgaaggaggacctggtgtcttcatgggagcacattcgagccctggccacgagtcggtacgagaagttacaagccacttattggtaccacagattttccagcgactttgatgagttatctgggtggatgaatgagaagaccgctgcaatcaatgctgatgaactgccgaccgatgtggctggcggagaagtgttattggaccgccaccagcagcacaagcacgaaattgattcatacgatgaccggttccagtccgccgatgagactggccaggatttagtgaatgctaaccatgaagcttccgatgaagtacgagagaagatggagattctagacaacaactggactgccctcctcgagctgtgggatgagaggcacagacagtatgagcagtgtcttgattttcacctcttctatagagattctgagcaggtggattcctggatgtcccgccaggaagcctttcttgagaatgaggaccttgggaactctctagggtcagccgaggccctgcttcaaaaacacgaggactttgaggaggctttcacagcccaggaagagaagataatcacagtcgacaaaacagcgacaaaactgatcggggacgaccactatgattcggaaaatattaaagccataagagatggcttacttgctcggagggacgctctgagagaaaaagcggctaccagacgcagactgctgaaagagagtctcctactccagaagctgtacgaggattccgatgacttaaaaaattggattaacaagaaaaagaagctagctgatgatgaggactataaagatattcaaaacctaaagtctagagtccagaagcagcaggtttttgagaaggaactggcagtcaacaaaactcagctggaaaatatccagaagacaggtcaggagatgatcgagggcggtcactatgcatccgacaacgtgacgaccaggctgtccgaggtggcctctctgtgggaggagttactagaggccactaagcagaaggggactcagctgcatgaagccaatcagcagttacaattcgagaataatgcagaagatctgcagcgctggctggaagacgtggagtggcaagtcaccagcgaagattatgggaaggggctcgcagaggtgcagaatcggctgcggaaacatggactcctcgaatccgccgtagcagccaggcaggaccaagtggatattttgaccgacttagccgcatactttgaggagataggtcatcctgactcaaaagatattagagcacgtcaggagtccttggtgtgccgcttcgaagcacttaaagagccactcgccacgcgtaagaagaagttgcttgacctgcttcatctgcaattgatatgtcgagataccgaggatgaagaggcgtggatccaggagaccgaaccctccgcgacgtccacgtacctcgggaaagacctgatcgccagcaagaagctgctgaaccggcatagggtgatacttgagaacatcgcgagccatgagcctcggatacaggagatcaccgaacgcggtaacaaaatggttgaagaaggtcacttcgcagccgaagatgttgcaagccgggtgaagagtcttaaccagaatatggagtcactgagggctcgggctgccagaaggcaaaatgatctggaagcaaacgtacaatttcaacaatatttggctgaccttcacgaagctgagacatggattagggaaaaggagccaatcgtggataacaccaattacggtgcagatgaggaagcagctggcgctctgctgaaaaaacatgaagccttcttactggatctgaatagtttcggagattccatgaaggccctgagaaaccaggctaatgcctgccagcagcagcaggcagctccagttgagggcgtcgcgggagagcaaagagtgatggccctgtacgatttccaggccagatccccgagagaggtcacaatgaaaaaaggcgacgtgcttactctgttgtcaagcattaacaaagattggtggaaggtggaggctgcagatcaccaaggtattgtgcccgctgtctacgtccggaggcttgcccacgacgaatttccgatgctgccccaacgccgacgggaggagccgggaaacatcacacaacgtcaggagcagatcgagaatcaatataggagcctgctcgatcgtgccgaagaacggaggcggagactgttgcagcgctacaatgaatttcttctcgcatacgaggccggagatatgctggaatggatacaggagaagaaagctgaaaacaccggggttgagcttgatgacgtttgggagctgcagaagaagttcgacgagttccagaaagaccttaacactaatgaacctagattaagagacattaacaaagtagccgacgacctgctgtttgaagggctgctgaccccagagggagctcagatccgccaggaattgaactccaggtgggggtcacttcagcggctggccgatgaacagcgccaattgctagggagcgcccatgctgtggaggtattccatagggaggctgacgacaccaaggagcagattgagaaaaagtgtcaagcattgtctgctgcggaccccggaagcgatctcttcagtgtacaggccctgcagagaagacatgagggattcgaacgggatttagtcccattaggggacaaagtgacgattctcggcgagaccgctgagaggctctccgaaagtcatcctgatgcgacggaggatctgcagagacagaaaatggagctgaacgaggcctgggaggatctgcaaggacgcaccaaggaccgaaaggagagcctaaacgaggcacagaagttctacctatttcttagcaaggccagggatttacaaaattggatatcatctattgggggtatggtgagttcgcaagaactcgccgaagatttgaccggaattgaaattttgctggagcggcatcaagagcatagggccgacatggaggctgaagcacctacttttcaagctcttgaggatttcagcgctgagctgatcgatagtggccaccacgcttccccggagattgagaagaaactgcaggcggtcaaattagaacgcgacgatcttgagaaagcctgggagaagcggaaaaaaatcctggatcagtgcctggaactgcagatgttccaagggaactgcgaccaagtggaaagctggatggtggctcgcgaaaattcacttcgatctgatgacaaaagcagcctggacagtctcgaagctcttatgaaaaaacgagatgacctggataaggccataaccgcccaggaaggaaaaataactgacttggaacatttcgctgagtcactcatagctgatgagcattatgcaaaagaggaaatagcgaccaggctgcagcgggtgctggaccgttggaaggcactcaaagctcagctgatcgatgaaagaaccaagctgggggattatgccaacctgaagcagttttacagggatctcgaagagctggaagaatggatttctgagatgctccccactgcctgcgatgaatcgtataaagatgccacgaacatacagcgaaagtatctgaagcatcagacatttgcacacgaggtggatggcagatcagagcaggtccatggcgtcattaatctgggcaattctttgattgaatgcagtgcgtgcgacggcaatgaggaggcgatgaaggaacagcttgagcagctaaaggagcactgggaccacctgttggagcgtacaaacgacaaggggaagaagcttaatgaggcctcaagacaacagagatttaatacaagtatcagggactttgaattttggctgtccgaggctgagacacttttggctatgaaagaccaggcccgagacctggcttcagccggaaacctcctgaagaagcaccaactgctggagcgagagatgttggctcgggaggatgcactcaaggatctaaataccctcgcagaggacttgctctcatctggcacatttaacgtggatcaaatcgttaaaaagaaggacaatgtcaataagagattcctgaatgtgcaagaattagcggctgcacatcacgagaagctgaaagaggcctatgccctttttcagttcttccaggatctggacgacgaagaaagttggatcgaagagaagctcattcgggtgagcagccaggactatggcagagacctccagggagtgcagaaccttttgaagaagcacaagcgattagaaggagaactggtagctcatgaaccagcgatccaaaacgtcttagatatggcagagaagcttaaggataaggccgcagtgggacaggaagagatccagttaaggctggctcaattcgtggaacattgggagaaactgaaggagctcgctaaggcgagggggttgaaactggaggaatctctagagtatctgcaatttatgcagaatgctgaagaggaggaggcctggatcaacgagaagaacgccctggccgtgcgcggtgactgtggggataccctggccgcaacccagtccttacttatgaaacacgaagccctagaaaatgacttcgccgtacatgagaccagggtgcagaacgtgtgcgcacagggcgaggacattctgaataaagtcttgcaagaagaaagccagaataaagagattagctctaaaattgaggccctgaacgagaaaaccccctcactggcgaaagccatcgctgcgtggaagcttcaactcgaggacgactacgcattccaggaatttaactggaaggctgacgttgtggaggcctggattgccgacaaagagacatctctgaagaccaacggaaacggcgcagacctgggtgattttttgaccttgttggccaaacaagacacacttgatgcaagtctgcagtccttccagcaggagcggctccccgagattaccgacctgaaggacaagctgatcagcgctcagcataaccagtccaaagctattgaagaacgatatgctgccctgcttaagcggtgggaacagctgctagaagcttccgcagttcaccgccaaaaactgctggagaaacaactgcctttgcaaaaagccgaggacctgttcgttgaatttgctcataaagcctcagctttgaacaactggtgcgagaagatggaggaaaatttgagcgagccagtgcattgtgtttcgctgaacgagattcgccagctccagaaagaccacgaggacttcctggcaagtctcgcacgtgcacaggccgattttaagtgcctcctggaactggatcagcagatcaaagccttaggggtgccttcctctccatacacctggcttacagtggaggtgcttgaacgcacctggaagcatctaagcgatataatcgaggagcgtgagcaggaactccagaaggaagaagcgaggcaggttaaaaatttcgaaatgtgccaagagttcgagcagaatgctagcacttttctacagtggattcttgagacccgggcatactttctcgatggcagtcttcttaaagaaaccggcactctggagagccagctggaggctaataagcgcaagcaaaaggaaatccaggcgatgaaaaggcaactgacgaagatcgtggatctgggtgacaatcttgaagatgcccttattctcgatattaagtattcgaccataggcctcgcccagcagtgggaccagctataccagctggggcttagaatgcagcataacctggaacagcagatccaggctaaagacataaaaggcgtcagcgaggaaactctgaaagaattttctactatctacaagcactttgatgagaacctgactggccgtctgacgcataaagagtttcgctcttgcctgagaggccttaactattacctccctatggtggaggaggacgaacatgagccgaagttcgaaaagtttctcgatgctgtggaccccggtagaaagggttatgtatcactggaggactatacggcgttccttatcgataaggagtccgaaaacataaaaagttcagatgagatcgagaatgcgttccaggcgctcgcagaaggaaaatcctatattaccaaagaggatatgaaacaggctctgacccctgagcaggtaagtttctgtgctacgcatatgcagcagtacatggaccccagaggcagatcccacctgagcgggtatgactacgtgggattcaccaatagctatttcggaaatta

SEQ ID NO: 298851 - DNA, 8047 bp, Artificial Sequence
  derived and/or modified sequence
ggtttttttttttcccccacatacttaacgtttctatatttctatttgaattcgactggacagttccatttgaattatttctctctctctctctctctgacacattttatcttgccaggttctaaacctttaggaaaaatggagcaatttccaaaggaaaccgttgtggagagcagtgggccaaaggttttggaaacagcagaagagatccaggagaggcgtcaggaagtgttgactcggtatcaaagtttcaaggagcgggtcgctgagaggggtcagaagcttgaggattcctatcacttacaagttttcaagcgagatgcagatgatctggggaagtggatcatggagaaagtcaatatcttaaccgataagagctatgaagacccaactaatatacaggggaaatatcagaagcatcaatcccttgaagcagaggtgcaaacaaaatcaagactcatgtctgaactggaaaaaacaagggaagaacgatttaccatgggtcattctgcccacgaagaaacgaaggcccatatagaggagctacgccacctgtgggacctgctgttagagctgaccctggagaagggtgaccagttgctgcgggccctgaagttccagcagtatgtacaggagtgtgctgacatcttagagtggattggagacaaggaggctatagcgacatcagtggagctaggtgaagactgggagcgcaccgaagttctgcataagaaatttgaagacttccaagtggagctggtagctaaagaagggagagttgttgaagtgaaccaatatgccaatgagtgtgccgaggaaaaccatcctgacctacccttaattcagtctaagcaaaatgaggtgaatgctgcctgggagcgccttcgtggtttggctctccagagacagaaagctctgtccaatgctgcaaacttacaacgattcaaaagggatgtgactgaagccatccagtggatcaaggagaaggaacctgtactcacctctgaggactatggcaaagaccttgttgcctctgaaggactgtttcacagtcacaagggacttgagagaaatcttgctgtcatgagtgacaaggtgaaggagttatgtgctaaagcagagaagctgacactttcccatccttcagatgcacctcagatccaggagatgaaagaagatctggtctccagctgggagcatattcgtgccctggccaccagcagatatgaaaaactgcaggctacttattggtaccatcgattttcatctgactttgatgaactctcaggctggatgaacgagaagactgctgcgatcaatgctgatgagctgccaacagatgtggctggtggagaagttctgctggacaggcatcagcagcataagcatgagattgactcttacgatgaccgatttcaatctgctgatgagactggtcaagacctcgtgaatgccaatcatgaagcctctgatgaagttcgggaaaagatggaaatacttgacaacaactggactgccctgctggaactgtgggacgagcgtcatcgtcagtatgagcagtgcttggactttcatctcttctacagagacagtgagcaagtggacagttggatgagtagacaagaggccttcctggaaaacgaggatctgggaaactcactgggcagtgcagaagcccttcttcagaagcatgaagactttgaggaagcctttactgcccaggaagagaagatcataactgtagacaagactgcaaccaaattgattggtgatgaccattatgattcagagaacatcaaggctatccgtgacgggctgttagcccggcgggatgccctacgtgaaaaggctgccactagacgtagattgctgaaggagtcattgcttctgcaaaaactgtatgaggactcagatgacctaaagaactggatcaacaagaagaaaaagttggcagatgatgaagattacaaggacatacagaacttgaagagcagggttcaaaagcagcaagtctttgaaaaggagttggcagttaataagacccagctggaaaacatacagaaaactggccaagagatgattgagggtggtcactatgcctctgacaatgtgaccactcgtctgagtgaagttgccagcctctgggaggagttgctggaggctacaaaacagaaagggacccagttgcatgaggccaaccagcagctgcaatttgaaaataatgcagaagatttgcagcgctggctggaggatgttgagtggcaagtcacctctgaggattatgggaaaggcctggccgaggtacagaatcgactcaggaaacacggcctcctggagtcggctgtggctgctcgtcaggatcaggtggatatccttacagacctggctgcatattttgaagaaataggccatcctgattctaaggatataagggcaaggcaagagtccttggtatgccgatttgaagctctgaaagagccactggccacccgaaagaagaagctcttagaccttctccatctgcagctgatttgtagagacacagaggatgaggaggcctggatccaagagactgaaccctcagctacttccacctaccttggaaaggacctgattgcttccaaaaagcttctgaataggcatagagtcatcctggagaacattgccagccatgaaccacgcattcaagagataacagaaaggggaaacaaaatggtagaggaaggacactttgctgcagaagatgtggcctctagggtcaagagtttgaaccagaatatggagtctctccgtgctcgagctgctaggcgacaaaatgatcttgaagccaatgtccagttccagcagtacctggctgacctgcatgaagcagaaacatggatcagagagaaggaacctattgtagataatactaactatggtgctgatgaagaagcagctggggctcttctaaagaagcatgaggcctttctattagatctcaattcatttggagacagtatgaaagctctgcggaatcaggcaaacgcctgccagcaacaacaggctgcaccagtggagggagttgctggagaacaaagggtcatggctttatatgacttccaggcccgcagcccccgagaagtcaccatgaagaaaggtgatgtcttaacgctgctcagttccatcaataaggactggtggaaggtggaagctgctgatcatcagggcattgtcccagctgtctatgtcagaagactggcccacgatgagttcccgatgctcccacagcggcgacgagaagagccaggaaacatcacccagcgccaggagcagattgagaaccaataccgctccctcttggatcgggcagaagaacgcagacgtcgtctattgcaacgttataatgaatttttattggcctatgaggcaggagacatgctggaatggattcaagagaaaaaggcagaaaacactggagtggaactagatgatgtttgggagctgcagaaaaagtttgatgagttccaaaaggatttgaataccaatgagcctcggctaagggatatcaacaaggtagctgatgatctactatttgaaggacttctaacaccagaaggagctcaaatccggcaggaattgaattcccgctggggttctttgcagaggcttgcagatgaacagcggcagctgctgggcagtgcccatgctgttgaagtgtttcacagagaagcagatgacacgaaggagcagattgagaagaaatgccaggccctcagtgctgcagaccctggctcagatctgttcagtgttcaggctcttcagcgacggcatgagggctttgaaagggacctcgtacccctgggagataaggtgaccatactgggggagacagcagagcggctcagtgagtcccatccagatgccactgaggacctgcagagacagaaaatggagctgaatgaggcctgggaagacctgcaggggcgtacaaaggatcgtaaggagagcctaaatgaggcccagaaattctacctgttcctcagcaaggccagggatctgcagaactggatcagtagcattggtggcatggtatcatcacaggagctggccgaagacttaactggcatagagatcttgctggagagacatcaggagcaccgtgctgacatggaggcagaggctcccaccttccaggccttagaggacttcagtgcagaacttatcgacagtgggcaccatgctagccctgaaattgaaaaaaagcttcaagctgtcaagctagagagagatgatttggagaaggcttgggaaaaacgcaagaagatcctagaccagtgcctggagttgcagatgttccaggggaactgtgatcaagttgagagctggatggtggcacgtgagaattccctgaggtcagatgacaaaagttccttagacagtctggaggctttgatgaagaaacgggacgatttggacaaagcaatcactgcccaggaagggaagatcactgacctagaacattttgctgagagcctcattgctgatgaacactatgccaaagaagagattgctacgcggctccaacgtgtactagacaggtggaaggctctcaaagcacaactgattgatgagcggacaaagcttggagactatgccaacctaaaacaattctaccgagaccttgaggagctggaagaatggatcagtgagatgctgcccacagcctgtgatgaatcctacaaagacgccactaacattcagaggaaatacctgaaacaccagacctttgcacatgaagtcgatggccgatctgagcaggtgcatggcgtcatcaacctggggaactccctgattgagtgtagcgcttgtgatggcaatgaagaggccatgaaggagcaactggaacagctgaaggaacattgggatcatctgcttgagagaacaaatgacaaagggaagaagctcaatgaggccagtcgtcaacagaggttcaacacaagcatccgggactttgagttctggctctcagaggcagagacattgctggccatgaaagatcaggccagggacttggcttcagcaggaaacctactcaagaagcatcagctattggagagagagatgttggctcgagaggatgcactcaaggacctgaatacattggctgaagatttgctctccagcgggactttcaacgttgatcagattgtgaagaaaaaagataatgtcaacaagcgtttcctgaatgtccaagaattggcagctgcacaccacgaaaaattgaaagaggcctatgccttgttccagttcttccaggatctagatgatgaggaatcctggatagaggagaagttgatacgagtgagctcccaggactatgggagagatcttcagggggttcagaacttgctgaagaagcacaaacgcctagagggggagctggtggcccatgagcctgccatccagaatgtgctggatatggcagagaagctgaaagacaaggctgctgtggggcaagaggagatccagttgcggctggctcagtttgttgaacactgggagaagctcaaagagttggccaaggcccgaggacttaagttggaagaatccctagaatacttgcaattcatgcagaatgctgaggaagaggaagcttggatcaatgaaaagaatgctttggctgtccgaggagattgtggagatacattagctgctactcagagcttgctaatgaagcatgaagctttggaaaatgactttgctgtccatgagacccgagtacaaaatgtgtgtgcacaaggagaagacatcctaaataaggaggaaagtcagaacaaagagatttcttccaagatagaggctctgaatgaaaagaccccttctctggctaaggcaatagctgcttggaagttgcaattggaagacgattatgcctttcaggaattcaactggaaggctgatgtggtagaggcttggatagctgataaggaaacaagcctaaagaccaatggcaatggtgcagaccttggtgacttcctcactcttctggcaaaacaggacactctggatgccagtctgcagagtttccagcaagagagacttcccgagatcactgacctgaaggacaaactgatttctgctcaacacaaccagtctaaagccattgaagagcgttatgccgctctgctgaagcgctgggaacagttgctggaagcctcggcagtccacagacagaaattgctggagaaacagctgcctctacagaaggctgaggacctgttcgtggaatttgcacataaggcttcagctttgaacaactggtgtgaaaagatggaagaaaacttgtcagagcctgtgcactgtgtctccctgaatgaaattcggcagctgcagaaagaccatgaggacttcttggcctccctggctagggctcaagcagactttaaatgtttgctggagctagaccagcagattaaggccttaggtgtgccttccagcccttatacctggttaacagtggaggtgctggaaaggacctggaagcacctatctgacatcattgaggaacgggagcaggagctgcaaaaggaagaggcaagacaggtcaagaactttgagatgtgtcaggagtttgaacagaatgccagtaccttccttcaatggatcctggaaaccagggcttactttctggatggatcattgctcaaagaaacaggaactctggaatctcagctggaagcaaataaaagaaaacagaaggagatccaggcgatgaagcgtcaactaaccaagattgtggacctgggggacaacttggaagacgctctgatccttgatatcaaatacagcaccattggattggctcagcagtgggaccagctctaccagcttgggttgcggatgcaacacaacctggagcaacagatccaggccaaggacatcaaaggtgtgagtgaagagactctaaaggaatttagcacaatctataaacactttgatgagaatttgacagggcgcctgactcacaaagagttccggtcctgcctgagaggactcaattactacttgcccatggtggaggaggatgaacatgagcccaagtttgagaagttcctggatgctgtggatccagggaggaagggctatgtctcactggaggactatactgctttcctgattgacaaggagtcagaaaacatcaagtccagtgatgaaatagagaatgccttccaagccctggcagagggcaagtcatatattaccaaagaagacatgaagcaggcccttaccccagagcaagtgtcattctgtgccacacatatgcagcaatatatggacccacggggtcgaagccatctctctggctatgactacgttggcttcaccaattcctactttggcaactaataagcagctcctcgtggatcgtagaaaatcttagtgtcgtgggaaatttactggggggcaaagagtacaggcaaatgtggaagataaagatggcctcgtgtgtgtgtgtgtgtgtgtgtgtgtgtgtgtgtgcttgtgtttgtgtgcatattacatttattgtaggatcttaaaaaatctcaagggtgggagatagaaaggttaatagagttggaggagtggaagctattttgtatgcaactagtcactgctgaggggtgtcaaagtttctatttttatttgttctgttttgcacgtctttatcattttgctttattccgattatagaataaagtaattctttttaaaaatattttttggggcaaagttaagtaaaatgttgagcttctatatttctgggaactgtactcatataagagtgggcagctaattttactgtaaagaagggccatggtatagtagataaataaaatccaaggcaattttcaaacaatttttttaaactttggaatgtgtttaaatttaaatttgaaaataaagatatttgattttctggggaacatgaatattttagtttgtacaatgaaacaacacacagatcagcataacacctgttttcttcttgttttttttccatacttcaaaattattgtagatg

SEQ ID NO: 298852 - DNA, 8217 bp, Artificial Sequence
  derived and/or modified sequence
tgtcgattgtgtatggctgatgggattctaggaccaagcaagaggtttttttttttcccccacatacttaacgtttctatatttctatttgaattcgactggacagttccatttgaattatttctctctctctctctctctgacacattttatcttgccaggttctaaacctttaggaaaaatggagcaatttccaaaggaaaccgttgtggagagcagtgggccaaaggttttggaaacagcagaagagatccaggagaggcgtcaggaagtgttgactcggtatcaaagtttcaaggagcgggtcgctgagaggggtcagaagcttgaggattcctatcacttacaagttttcaagcgagatgcagatgatctggggaagtggatcatggagaaagtcaatatcttaaccgataagagctatgaagacccaactaatatacaggggaaatatcagaagcatcaatcccttgaagcagaggtgcaaacaaaatcaagactcatgtctgaactggaaaaaacaagggaagaacgatttaccatgggtcattctgcccacgaagaaacgaaggcccatatagaggagctacgccacctgtgggacctgctgttagagctgaccctggagaagggtgaccagttgctgcgggccctgaagttccagcagtatgtacaggagtgtgctgacatcttagagtggattggagacaaggaggctatagcgacatcagtggagctaggtgaagactgggagcgcaccgaagttctgcataagaaatttgaagacttccaagtggagctggtagctaaagaagggagagttgttgaagtgaaccaatatgccaatgagtgtgccgaggaaaaccatcctgacctacccttaattcagtctaagcaaaatgaggtgaatgctgcctgggagcgccttcgtggtttggctctccagagacagaaagctctgtccaatgctgcaaacttacaacgattcaaaagggatgtgactgaagccatccagtggatcaaggagaaggaacctgtactcacctctgaggactatggcaaagaccttgttgcctctgaaggactgtttcacagtcacaagggacttgagagaaatcttgctgtcatgagtgacaaggtgaaggagttatgtgctaaagcagagaagctgacactttcccatccttcagatgcacctcagatccaggagatgaaagaagatctggtctccagctgggagcatattcgtgccctggccaccagcagatatgaaaaactgcaggctacttattggtaccatcgattttcatctgactttgatgaactctcaggctggatgaacgagaagactgctgcgatcaatgctgatgagctgccaacagatgtggctggtggagaagttctgctggacaggcatcagcagcataagcatgagattgactcttacgatgaccgatttcaatctgctgatgagactggtcaagacctcgtgaatgccaatcatgaagcctctgatgaagttcgggaaaagatggaaatacttgacaacaactggactgccctgctggaactgtgggacgagcgtcatcgtcagtatgagcagtgcttggactttcatctcttctacagagacagtgagcaagtggacagttggatgagtagacaagaggccttcctggaaaacgaggatctgggaaactcactgggcagtgcagaagcccttcttcagaagcatgaagactttgaggaagcctttactgcccaggaagagaagatcataactgtagacaagactgcaaccaaattgattggtgatgaccattatgattcagagaacatcaaggctatccgtgacgggctgttagcccggcgggatgccctacgtgaaaaggctgccactagacgtagattgctgaaggagtcattgcttctgcaaaaactgtatgaggactcagatgacctaaagaactggatcaacaagaagaaaaagttggcagatgatgaagattacaaggacatacagaacttgaagagcagggttcaaaagcagcaagtctttgaaaaggagttggcagttaataagacccagctggaaaacatacagaaaactggccaagagatgattgagggtggtcactatgcctctgacaatgtgaccactcgtctgagtgaagttgccagcctctgggaggagttgctggaggctacaaaacagaaagggacccagttgcatgaggccaaccagcagctgcaatttgaaaataatgcagaagatttgcagcgctggctggaggatgttgagtggcaagtcacctctgaggattatgggaaaggcctggccgaggtacagaatcgactcaggaaacacggcctcctggagtcggctgtggctgctcgtcaggatcaggtggatatccttacagacctggctgcatattttgaagaaataggccatcctgattctaaggatataagggcaaggcaagagtccttggtatgccgatttgaagctctgaaagagccactggccacccgaaagaagaagctcttagaccttctccatctgcagctgatttgtagagacacagaggatgaggaggcctggatccaagagactgaaccctcagctacttccacctaccttggaaaggacctgattgcttccaaaaagcttctgaataggcatagagtcatcctggagaacattgccagccatgaaccacgcattcaagagataacagaaaggggaaacaaaatggtagaggaaggacactttgctgcagaagatgtggcctctagggtcaagagtttgaaccagaatatggagtctctccgtgctcgagctgctaggcgacaaaatgatcttgaagccaatgtccagttccagcagtacctggctgacctgcatgaagcagaaacatggatcagagagaaggaacctattgtagataatactaactatggtgctgatgaagaagcagctggggctcttctaaagaagcatgaggcctttctattagatctcaattcatttggagacagtatgaaagctctgcggaatcaggcaaacgcctgccagcaacaacaggctgcaccagtggagggagttgctggagaacaaagggtcatggctttatatgacttccaggcccgcagcccccgagaagtcaccatgaagaaaggtgatgtcttaacgctgctcagttccatcaataaggactggtggaaggtggaagctgctgatcatcagggcattgtcccagctgtctatgtcagaagactggcccacgatgagttcccgatgctcccacagcggcgacgagaagagccaggaaacatcacccagcgccaggagcagattgagaaccaataccgctccctcttggatcgggcagaagaacgcagacgtcgtctattgcaacgttataatgaatttttattggcctatgaggcaggagacatgctggaatggattcaagagaaaaaggcagaaaacactggagtggaactagatgatgtttgggagctgcagaaaaagtttgatgagttccaaaaggatttgaataccaatgagcctcggctaagggatatcaacaaggtagctgatgatctactatttgaaggacttctaacaccagaaggagctcaaatccggcaggaattgaattcccgctggggttctttgcagaggcttgcagatgaacagcggcagctgctgggcagtgcccatgctgttgaagtgtttcacagagaagcagatgacacgaaggagcagattgagaagaaatgccaggccctcagtgctgcagaccctggctcagatctgttcagtgttcaggctcttcagcgacggcatgagggctttgaaagggacctcgtacccctgggagataaggtgaccatactgggggagacagcagagcggctcagtgagtcccatccagatgccactgaggacctgcagagacagaaaatggagctgaatgaggcctgggaagacctgcaggggcgtacaaaggatcgtaaggagagcctaaatgaggcccagaaattctacctgttcctcagcaaggccagggatctgcagaactggatcagtagcattggtggcatggtatcatcacaggagctggccgaagacttaactggcatagagatcttgctggagagacatcaggagcaccgtgctgacatggaggcagaggctcccaccttccaggccttagaggacttcagtgcagaacttatcgacagtgggcaccatgctagccctgaaattgaaaaaaagcttcaagctgtcaagctagagagagatgatttggagaaggcttgggaaaaacgcaagaagatcctagaccagtgcctggagttgcagatgttccaggggaactgtgatcaagttgagagctggatggtggcacgtgagaattccctgaggtcagatgacaaaagttccttagacagtctggaggctttgatgaagaaacgggacgatttggacaaagcaatcactgcccaggaagggaagatcactgacctagaacattttgctgagagcctcattgctgatgaacactatgccaaagaagagattgctacgcggctccaacgtgtactagacaggtggaaggctctcaaagcacaactgattgatgagcggacaaagcttggagactatgccaacctaaaacaattctaccgagaccttgaggagctggaagaatggatcagtgagatgctgcccacagcctgtgatgaatcctacaaagacgccactaacattcagaggaaatacctgaaacaccagacctttgcacatgaagtcgatggccgatctgagcaggtgcatggcgtcatcaacctggggaactccctgattgagtgtagcgcttgtgatggcaatgaagaggccatgaaggagcaactggaacagctgaaggaacattgggatcatctgcttgagagaacaaatgacaaagggaagaagctcaatgaggccagtcgtcaacagaggttcaacacaagcatccgggactttgagttctggctctcagaggcagagacattgctggccatgaaagatcaggccagggacttggcttcagcaggaaacctactcaagaagcatcagctattggagagagagatgttggctcgagaggatgcactcaaggacctgaatacattggctgaagatttgctctccagcgggactttcaacgttgatcagattgtgaagaaaaaagataatgtcaacaagcgtttcctgaatgtccaagaattggcagctgcacaccacgaaaaattgaaagaggcctatgccttgttccagttcttccaggatctagatgatgaggaatcctggatagaggagaagttgatacgagtgagctcccaggactatgggagagatcttcagggggttcagaacttgctgaagaagcacaaacgcctagagggggagctggtggcccatgagcctgccatccagaatgtgctggatatggcagagaagctgaaagacaaggctgctgtggggcaagaggagatccagttgcggctggctcagtttgttgaacactgggagaagctcaaagagttggccaaggcccgaggacttaagttggaagaatccctagaatacttgcaattcatgcagaatgctgaggaagaggaagcttggatcaatgaaaagaatgctttggctgtccgaggagattgtggagatacattagctgctactcagagcttgctaatgaagcatgaagctttggaaaatgactttgctgtccatgagacccgagtacaaaatgtgtgtgcacaaggagaagacatcctaaataaggtgttgcaggaggaaagtcagaacaaagagatttcttccaagatagaggctctgaatgaaaagaccccttctctggctaaggcaatagctgcttggaagttgcaattggaagacgattatgcctttcaggaattcaactggaaggctgatgtggtagaggcttggatagctgataaggaaacaagcctaaagaccaatggcaatggtgcagaccttggtgacttcctcactcttctggcaaaacaggacactctggatgccagtctgcagagtttccagcaagagagacttcccgagatcactgacctgaaggacaaactgatttctgctcaacacaaccagtctaaagccattgaagagcgttatgccgctctgctgaagcgctgggaacagttgctggaagcctcggcagtccacagacagaaattgctggagaaacagctgcctctacagaaggctgaggacctgttcgtggaatttgcacataaggcttcagctttgaacaactggtgtgaaaagatggaagaaaacttgtcagagcctgtgcactgtgtctccctgaatgaaattcggcagctgcagaaagaccatgaggacttcttggcctccctggctagggctcaagcagactttaaatgtttgctggagctagaccagcagattaaggccttaggtgtgccttccagcccttatacctggttaacagtggaggtgctggaaaggacctggaagcacctatctgacatcattgaggaacgggagcaggagctgcaaaaggaagaggcaagacaggtcaagaactttgagatgtgtcaggagtttgaacagaatgccagtaccttccttcaatggatcctggaaaccagggcttactttctggatggatcattgctcaaagaaacaggaactctggaatctcagctggaagcaaataaaagaaaacagaaggagatccaggcgatgaagcgtcaactaaccaagattgtggacctgggggacaacttggaagacgctctgatccttgatatcaaatacagcaccattggattggctcagcagtgggaccagctctaccagcttgggttgcggatgcaacacaacctggagcaacagatccaggccaaggacatcaaaggtgtgagtgaagagactctaaaggaatttagcacaatctataaacactttgatgagaatttgacagggcgcctgactcacaaagagttccggtcctgcctgagaggactcaattactacttgcccatggtggaggaggatgaacatgagcccaagtttgagaagttcctggatgctgtggatccagggaggaagggctatgtctcactggaggactatactgctttcctgattgacaaggagtcagaaaacatcaagtccagtgatgaaatagagaatgccttccaagccctggcagagggcaagtcatatattaccaaagaagacatgaagcaggcccttaccccagagcaagtgtcattctgtgccacacatatgcagcaatatatggacccacggggtcgaagccatctctctggctatgactacgttggcttcaccaattcctactttggcaactaataagcagctcctcgtggatcgtagaaaatcttagtgtcgtgggaaatttactggggggcaaagagtacaggcaaatgtggaagataaagatggcctcgtgtgtgtgtgtgtgtgtgtgtgtgtgtgtgtgtgcttgtgtttgtgtgcatattacatttattgtaggatcttaaaaaatctcaagggtgggagatagaaaggttaatagagttggaggagtggaagctattttgtatgcaactagtcactgctgaggggtgtcaaagtttctatttttatttgttctgttttgcacgtctttatcattttgctttattccgattatagaataaagtaattctttttaaaaatattttttggggcaaagttaagtaaaatgttgagcttctatatttctgggaactgtactcatataagagtgggcagctaattttactgtaaagaagggccatggtatagtagataaataaaatccaaggcaattttcaaacaatttttttaaactttggaatgtgtttaaatttaaatttgaaaataaagatatttgattttctggggaacatgaatattttagtttgtacaatgaaacaacacacagatcagcataacacctgttttcttcttgttttttttccatacttcaaaattattgtagatgttattactctcagaaagacaaaattccagcatagcagggctttctcttgtcctccaagctcccgtattttctcttaagttttaatgtaataaaaataatacttcaatatcctgttaaa

SEQ ID NO: 298853 - DNA, 792 bp, Artificial Sequence
  derived and/or modified sequence
atgcccctgaccgccctgctgagaaacctgggcaagatgaccgccaacagcgtgctggagcccggcaacagcgaggtgagcctggtgtgcgagaagctgtgcaacgagaagctgctgaagaaggccagaatccaccccttccacatcctgatcgccctggagacctacaagaccggccacggcctgagaggcaagctgaagtggagacccgacgaggagatcctgaaggccctggacgccgccttctacaagaccttcaagaccgtggagcccaccggcaagagattcctgctggccgtggacgtgagcgccagcatgaaccagagagtgctgggcagcatcctgaacgccagcaccgtggccgccgccatgtgcatggtggtgaccagaaccgagaaggacagctacgtggtggccttcagcgacgagatggtgccctgccccgtgaccaccgacatgaccctgcagcaggtgctgatggccatgagccagatccccgccggcggcaccgactgcagcctgcccatgatctgggcccagaagaccaacacccccgccgacgtgttcatcgtgttcaccgacaacgagaccttcgccggcggcgtgcaccccgccatcgccctgagagagtacagaaagaagatggacatccccgccaagctgatcgtgtgcggcatgaccagcaacggcttcaccatcgccgaccccgacgacagaggcatgctggacatgtgcggcttcgacaccggcgccctggacgtgatcagaaacttcaccctggacatgatctag

SEQ ID NO: 298854 - DNA, 792 bp, Artificial Sequence
  derived and/or modified sequence
atgcctcttaccgctctcctgcgaaacctggggaagatgaccgcaaacagtgttttggaacctggaaatagtgaagtatccctggtgtgcgagaagctctgcaatgagaagcttctaaaaaaagcgagaattcacccctttcacattcttatcgccctggaaacttataagactggtcacggactgagggggaagctcaagtggagacccgacgaagagatactgaaggcactggacgcggcgttctataagactttcaagacagttgaacctactggaaaacggtttttactggctgtggatgttagtgcctccatgaatcagcgagtgctgggctcgatcctgaacgcatctactgttgcagccgccatgtgcatggtggtgaccaggacggaaaaggattcatacgttgtggcctttagcgacgaaatggtcccatgccctgtcacaactgacatgactctgcagcaggtcctgatggcaatgtctcagattcctgctggcggtactgattgcagtttacccatgatctgggctcaaaaaactaacacccctgctgatgttttcattgtgttcactgacaatgagacatttgcgggaggagttcatcctgctatcgctctgagggaatatcgtaaaaagatggatatccccgccaaactaatcgtgtgcggaatgaccagtaacggattcaccatcgcagaccccgatgaccgagggatgctcgatatgtgcggattcgatactggcgccttggatgtcatccgaaattttacacttgacatgatatag

SEQ ID NO: 298855 - DNA, 792 bp, Artificial Sequence
  derived and/or modified sequence
atgcccctgacagccctgctgaggaacctgggcaagatgacagccaacagcgtgctggagcccggcaacagcgaggtgtccctggtgtgtgagaagctgtgcaatgagaagctgctgaagaaggcccgcatccaccccttccacatcctgattgccctggagacctacaagacaggccacggcctgcggggcaagctgaagtggaggccagatgaggagatcctgaaggccctggatgctgccttctacaagaccttcaagacagtggagcccaccgggaagcgcttcctgctggccgtggatgtgtctgcctccatgaaccagagggtgctgggcagcatcctgaatgccagcacagtggccgccgccatgtgcatggtggtgaccaggacagagaaggacagctatgtggtggccttcagtgatgagatggtgccctgccctgtgaccacagacatgaccctgcagcaggtgctgatggccatgagccagatcccagctgggggcacagactgcagcctgcccatgatctgggcccagaagaccaacaccccagcagatgtgttcatcgtgttcacagacaatgagacctttgctggaggagtgcacccagccatcgccctgcgggagtacaggaagaagatggacatcccagccaagctgattgtgtgtggcatgaccagcaatggcttcaccatcgctgaccctgatgaccggggcatgctggacatgtgtggctttgacacaggagccctggatgtgatccggaacttcaccctggacatgatctag

SEQ ID NO: 298856 - DNA, 792 bp, Artificial Sequence
  derived and/or modified sequence
atgcccctgaccgccctgctgcggaacctgggcaagatgaccgccaactcggtgctggagcctggaaacagcgaggtgagcctggtttgcgaaaagctgtgcaacgagaaactgctgaagaaggcgcgcattcaccctttccacatcctaattgccctcgaaacatataaaacgggacacgggctgagaggaaaacttaagtggcggccagacgaggagattctgaaggccttagacgcagcattttacaaaactttcaagaccgtggagcctactggaaagcgattcttattggccgtcgatgtgagtgcgagcatgaatcagcgagtattggggtccattttaaacgcttcgactgtcgcagcggccatgtgtatggtggtgacaagaactgaaaaggacagctacgtggtcgccttttctgacgagatggtcccttgtccagtgacgaccgacatgacgctgcagcaggtcttgatggcgatgtctcaaatccctgcaggaggaaccgattgctccctccctatgatttgggctcagaagacaaacacacctgctgatgtgttcattgtattcaccgacaatgaaaccttcgctgggggagtgcaccctgcgatcgccctcagagagtatagaaaaaaaatggatatcccagccaagcttatagtgtgcggcatgacttctaatggcttcacgatagctgatccggatgaccgaggtatgttggatatgtgcggcttcgacaccggagcattggacgtcatcaggaactttacccttgacatgatttag

SEQ ID NO: 298857 - DNA, 792 bp, Artificial Sequence
  derived and/or modified sequence
atgcctttgacagctctcctgcggaacctgggcaagatgaccgctaacagtgtgttagagcctggcaattcagaggtgagcctcgtgtgcgagaaactgtgtaacgagaaattactcaagaaggcacgcattcacccattccacattttgatcgccctcgagacatataaaacaggacacggactgcgtgggaagctgaagtggcgacctgatgaggaaattctgaaggcattggatgccgcattctataaaacattcaagactgtggagccaactggcaagcgtttcctccttgccgtcgacgtgtcggcgtccatgaaccagcgcgtgttaggttctatcttaaatgccagtacggtcgccgcagctatgtgtatggtggttacaagaacagaaaaggactcatacgtcgtggcattttcagacgagatggtcccttgtccagtaaccacagatatgacactgcaacaggtgctgatggctatgtctcagatccccgcaggaggcacagactgctcccttccaatgatctgggcccagaaaaccaacacacctgccgatgtgttcatagtctttacagataacgaaactttcgctgggggagtccatcccgcaatcgccctgcgggagtacaggaagaagatggatataccagcgaaactcattgtgtgtgggatgactagcaacggcttcaccatagctgacccagatgacagaggcatgctagacatgtgtgggtttgatacaggggcactggatgtcatcagaaatttcaccctcgacatgatatag

SEQ ID NO: 298858 - protein, 183 aa, Artificial Sequence
  derived and/or modified sequence
MRLLSFVVLALFAVTQAEEGARLLASKSLLNRYAVEGRDLTLQYNIYNVGSSAALDVELSDDSFPPEDFGIVSGMLNVKWDRIAPASNVSHTVVLRPLKAGYFNFTSATITYLAQEDGPVVIGSTSAPGQGGILAQREFDRRFSPHFLDWAAFGVMTLPSIGIPLLLWYSSKRKYDTPKTKKN

SEQ ID NO: 298859 - protein, 85 aa, Artificial Sequence
  derived and/or modified sequence
MRLLSFVVLALFAVTQAEEGARLLASKSLLNRYAVEGRDLTLQYNIYNVGSSAALDVELSDDSFPPEDFGIVSGMLNVKWDRIAP

SEQ ID NO: 298860 - protein, 147 aa, Artificial Sequence
  derived and/or modified sequence
MRLLSFVVLALFAVTQAEEGARLLASKSLLNRYAVEGRDLTLQYNIYNVGSSAALDVELSDDSFPPEDFGIVSGMLNVKWDRIAPASNVSHTVVLRPLKAGYFNFTSATITYLAQEDGPVVIGSTSAPGQGGILAQREFDRRFSPHF

SEQ ID NO: 298861 - DNA, 1116 bp, Artificial Sequence
  derived and/or modified sequence
tttccggtctttcggatgctgacgctctcttcctgtctttgtggctccggaaaggcgtttgggatgccaacgatgaggctgctgtcatttgtggtgttggctctatttgctgtcactcaagcagaggaaggagccaggcttttggcttccaaatcactgctgaacagatacgccgtggagggacgagacctgaccttgcagtacaacatctacaatgttggctcaagtgctgcattagacgtggaactatctgatgattccttccctccagaagactttggcattgtgtctggaatgctcaatgtcaaatgggaccggattgcccctgctagcaatgtctcccacactgtggtcctgcgccctctcaaggctggttatttcaacttcacctcggcaacaattacttacctggcccaggaggatgggcccgttgtgattggctctaccagtgcacctggacagggaggaatcctggctcagcgggagtttgacaggcgattctcccctcattttctggactgggcagcctttggggtcatgacccttccctccatcggcatccccctgctattgtggtactccagcaagaggaaatatgacactcccaaaacgaagaagaactgattggggcttccacagccctcctctcccaagaaatccaggctcctctcccaagaaatccaggtgctttccagactccaaagggtatcttaaatgcaatctcttctctcttagcccttggccactttctcctggatcctgccctgctctcagccatagtgaaggaccagccctaggagtctgcgagagcctccttggttccatcgtgaagccataaacaggaatgcctttggcaatagccttgagcctagagggccctctgatgccccactgaggtgctgttggtttattgctggcaacgtgaattctctcaggggtctaggaggggcattttggagactgcctgacaccacccctatcccctgcctccccctctcagaagagggtggaagatgaaatgaaagctatgggactcttggaggatacccagtgtctattctgggttagagaagtgcttactaaggggttttctaataaaaacaaatgccacattga

SEQ ID NO: 298862 - DNA, 555 bp, Artificial Sequence
  derived and/or modified sequence
ggcagaggacgcggtggctggaggacgtgtaaccttgcaagaggcgggaggcggggggcagaggtgattgacccccgcccccccgcccgtgggaccaagaaagggatgtgacagatgaggctgctgtcatttgtggtgttggctctatttgctgtcactcaagcagaggaaggagccaggcttttggcttccaaatcactgctgaacagatacgccgtggagggacgagacctgaccttgcagtacaacatctacaatgttggctcaagtgctgcattagacgtggaactatctgatgattccttccctccagaagactttggcattgtgtctggaatgctcaatgtcaaatgggaccggattgcccctgctagcaatgtctcccacactgtggtcctgcgccctctcaaggctggttatttcaacttcacctcggcaacaattacttacctggcccaggaggatgggcccgttgtgattggctctaccagtgcacctggacagggaggaatcctggctcagcgggagtttgacaggcgattctcccctcatttt

SEQ ID NO: 298863 - DNA, 552 bp, Artificial Sequence
  derived and/or modified sequence
atgagactactgagcttcgttgtacttgctctattcgcagtgacacaggccgaggagggggcacggttgctggcctctaaaagcctcctgaatagatatgccgtggagggaagagatctgaccctgcaatataatatttacaacgtgggatcctccgcggccctggacgtggaactgtcggacgatagctttcctcccgaggatttcggcattgttagcggcatgctgaacgtcaaatgggataggatcgcgccagcttccaatgtttcccacaccgttgtgctcagacccctgaaggctggctattttaacttcacaagcgccactatcacatatttggcccaagaggacgggcctgtggtaatcgggagtacctccgctcccggtcaaggaggcattctggcacaaagggagttcgataggaggttttctcctcacttcctcgactgggctgcgtttggcgtgatgacactgcctagtatagggatccctctcctcctttggtattcaagcaaacgaaagtacgacacaccaaaaaccaagaaaaattag

SEQ ID NO: 298864 - DNA, 552 bp, Artificial Sequence
  derived and/or modified sequence
atgcgactgttgtcttttgtggtccttgcactgtttgcagttactcaggctgaagaaggcgcaagactcctggcctccaaatcgctgctcaacagatacgccgtggagggccgcgacctgacccttcagtataacatttacaacgtggggtcatcagccgcactcgatgtagaactgagcgatgactcttttcctcccgaagacttcggaatcgttagtggaatgctcaacgtaaagtgggatcgaatagccccagctagtaatgtgtcacatactgtcgtacttcggccactgaaagccggatacttcaatttcacctctgccacaattacctacttggcccaagaggacgggcccgtggttataggttccacatctgctccaggccaaggaggcattctcgcacagagggagttcgatcgcagattttcaccacatttcctcgattgggctgcgttcggtgtgatgaccctaccaagtatcggaattccgctactgttgtggtatagttcaaaacggaagtacgatacccccaaaacaaagaagaactag

SEQ ID NO: 298865 - DNA, 258 bp, Artificial Sequence
  derived and/or modified sequence
atgcgcctattatcattcgttgttctcgcactgtttgcagtcactcaggccgaggagggagctcggctccttgccagcaagtcacttctgaatcgatacgctgtagagggacgcgaccttacattacagtataacatctacaatgtaggctctagtgctgctcttgacgtcgagctttccgatgattcattcccccccgaggacttcggaattgtcagcggcatgctgaatgttaagtgggacagaatcgccccctag

SEQ ID NO: 298866 - DNA, 444 bp, Artificial Sequence
  derived and/or modified sequence
atgcgattgttgtcttttgtagttctggcactgttcgccgtgacacaagctgaggagggagctcgactcttggcaagtaaatctctgctcaaccgatatgccgttgaagggagagacctgacgctgcaatataatatttacaatgtggggtcaagtgcagctctggatgtggaattaagcgatgattcattcccaccggaggatttcggcattgtgtctggcatgttaaatgtgaagtgggataggatcgcgcctgcaagtaacgtgtcccatacggtggttttacgcccattaaaagcaggttatttcaacttcaccagtgccaccatcacgtaccttgctcaggaagacggcccggtcgtcatcgggtctacatctgcgccgggtcagggtggcattctcgcccagagagaatttgatcgtagattttcaccccatttttag

SEQ ID NO: 298867 - DNA, 552 bp, Artificial Sequence
  derived and/or modified sequence
atgaggctgctgagctttgtggtgctggccctgtttgctgtgacccaggccgaggagggcgcccggctgctggccagcaagagcctgctgaacagatatgctgtggagggccgggacctgaccctgcagtacaacatctacaacgtgggcagcagcgctgccctggatgtggagctgagtgatgacagcttccccccagaagattttggaattgtgtctggcatgctgaatgtgaagtgggacagaattgccccagccagcaatgtgagccacacagtggtgctgcggcccctgaaggccggctacttcaacttcaccagcgccaccatcacctacctggcccaggaggatggccctgtggtgattggcagcaccagcgcccctggccagggcggcatcctggcccagcgggagtttgaccggcgcttcagcccccacttcctggactgggccgcctttggagtgatgaccctgcccagcatcggcatccccctgctgctgtggtacagcagcaagaggaaatatgacacccccaagaccaagaagaactag

SEQ ID NO: 298868 - DNA, 258 bp, Artificial Sequence
  derived and/or modified sequence
atgaggctgctgagctttgtggtgctggccctgtttgctgtgacccaggccgaggagggcgcccggctgctggccagcaagagcctgctgaacagatatgctgtggagggccgggacctgaccctgcagtacaacatctacaacgtgggcagcagcgctgccctggatgtggagctgagtgatgacagcttccccccagaagattttggaattgtgtctggcatgctgaatgtgaagtgggacagaattgccccctag

SEQ ID NO: 298869 - DNA, 444 bp, Artificial Sequence
  derived and/or modified sequence
atgaggctgctgagctttgtggtgctggccctgtttgctgtgacccaggccgaggagggcgcccggctgctggccagcaagagcctgctgaacagatatgctgtggagggccgggacctgaccctgcagtacaacatctacaacgtgggcagcagcgctgccctggatgtggagctgagtgatgacagcttccccccagaagattttggaattgtgtctggcatgctgaatgtgaagtgggacagaattgccccagccagcaatgtgagccacacagtggtgctgcggcccctgaaggccggctacttcaacttcaccagcgccaccatcacctacctggcccaggaggatggccctgtggtgattggcagcaccagcgcccctggccagggcggcatcctggcccagcgggagtttgaccggcgcttcagcccccacttctag

SEQ ID NO: 298870 - DNA, 552 bp, Artificial Sequence
  derived and/or modified sequence
atgcggctgctgagcttcgtggtgctggccctgttcgccgtgacccaggccgaggaaggagcaaggttgctggcaagcaagtctctgctgaaccgctatgccgtcgaaggcagagacctgacattgcagtacaacatctacaacgtagggagcagcgccgctctggacgtcgagcttagtgacgattcttttccacctgaggacttcgggattgtatcaggaatgctgaacgtaaaatgggacagaatcgcacctgccagcaacgtgtctcataccgtagtgctgagacctttgaaggcagggtactttaacttcaccagcgccactatcacctatcttgcacaggaagacggaccagtggtgatcgggagcacatcagcacccgggcagggtggaatcctcgctcagagagaattcgacaggcgctttagtccccattttctggattgggccgcatttggggtgatgaccctgccaagtatcggcatcccactgcttctttggtattcttctaaaaggaaatatgataccccaaagaccaagaagaactag

SEQ ID NO: 298871 - DNA, 552 bp, Artificial Sequence
  derived and/or modified sequence
atgcggctgctgagcttcgtggtgctggccctgttcgccgtgacccaggctgaggagggggcccgtctgttggcctccaagagtctcctgaaccgatatgctgtggaaggccgagaccttaccctgcagtacaatatctacaatgtcggctcttctgctgccctggatgtagaactatcagatgatagtttccctccggaagatttcggcattgtctccggcatgctgaacgttaagtgggaccgcatcgcacctgcctcgaatgtaagccacactgtagttctccggcccctgaaggcaggatatttcaattttacctctgccacgatcacctatctggcccaagaagatgggccggttgtgatcggatcaacaagtgcacccgggcaaggaggcattctcgcccagcgtgaatttgacaggcgcttttcgccccatttccttgactgggccgcatttggcgtgatgaccctgccatctatcggaatacctttgttgctgtggtattcttcaaagagaaagtatgacactccgaagacaaaaaagaactag

SEQ ID NO: 298872 - DNA, 258 bp, Artificial Sequence
  derived and/or modified sequence
atgcggctgctgagcttcgtggtgctggccctgttcgccgtgacccaggccgaggaaggagctagacttcttgcctccaaaagcctcttaaaccggtacgccgtcgaaggccgggatctaacccttcagtacaacatttataacgtgggctcatcagctgctctggacgtggaactgtccgacgactcattccctcctgaggacttcggaatagtgtccgggatgctcaatgtcaagtgggaccgtatcgccccatag

SEQ ID NO: 298873 - DNA, 444 bp, Artificial Sequence
  derived and/or modified sequence
atgcggctgctgagcttcgtggtgctggccctgttcgccgtgacccaggcagaggaaggcgcaaggctattggcttctaagagtctgctgaaccgatacgctgtggagggcagagacttaacacttcagtacaatatctacaacgtggggagtagcgccgctttagatgttgagctgagcgacgacagtttccctcccgaagattttggaattgtttccggaatgttaaatgttaagtgggacaggattgcaccagctagcaacgtgagccataccgtagtcctcaggccactaaaggctgggtattttaattttacatccgcaaccatcacctaccttgcccaagaggatggccccgtcgtaattggaagtacatccgcccctgggcagggtggtattcttgcccagagagaatttgaccgccgctttagcccacacttttag

SEQ ID NO: 298874 - DNA, 552 bp, Artificial Sequence
  derived and/or modified sequence
atgcgtctgttaagttttgtggtcctagctctgtttgcagtcactcaggccgaggaaggtgcgagacttttagcaagcaagtcgctgctgaacagatacgccgtggagggacgggatttgaccctgcagtacaacatctacaatgttggctctagtgctgcgctggatgttgaactgagcgacgatagctttccgcctgaggattttggcatagtgtccggaatgctgaatgtgaagtgggatagaatagccccagccagtaacgtgtcacacactgtggtacttcgacccctaaaagcagggtatttcaactttacaagtgcaacgattacatacctggctcaggaagacgggccagtcgtcatcggttctacgtctgctcctggccaggggggaattctggcccagcgggagttcgatcgaaggttcagcccgcattttctggactgggctgcattcggggtcatgacactgcctagtatcggaatccctctgctactttggtattcctcaaaacggaagtacgatacccctaagactaaaaagaattag

SEQ ID NO: 298875 - DNA, 552 bp, Artificial Sequence
  derived and/or modified sequence
atgagactgctgagctttgtcgtcctcgcgttgttcgctgtgactcaagctgaggagggcgctcggttattagcctccaagagccttctcaaccgctatgccgttgagggtcgcgacttgactctgcaatacaacatatataacgtgggctcctcagcggctctggatgtagagttgtcagacgatagcttcccacctgaggatttcggcattgtgagtgggatgctgaacgttaagtgggacagaatagccccagctagtaatgtctcccacaccgtagtccttagacctcttaaggcgggttactttaacttcacatccgcgaccatcacatatctcgcacaagaagacggccctgttgtgatcggttctactagcgcaccaggacaggggggaattcttgcccaaagggagttcgatcggagattctcccctcacttcctggattgggcggcttttggcgtgatgactctgcctagcattggcatccccctccttctgtggtacagctccaaaagaaaatatgacaccccaaaaaccaagaagaactag

SEQ ID NO: 298876 - DNA, 258 bp, Artificial Sequence
  derived and/or modified sequence
atgaggctgttgtcttttgtggttctggctctgtttgctgtcacacaggccgaggaaggggctaggctcctcgctagtaaatccctattaaacagatatgccgtggaaggacgggatctgacacttcagtacaacatctacaacgttggaagctctgctgcattagacgtggagttgtccgacgacagcttcccgccagaggattttggaatcgtgtccggaatgcttaacgtcaaatgggacagaatagccccttag

SEQ ID NO: 298877 - DNA, 444 bp, Artificial Sequence
  derived and/or modified sequence
atgcggctgctttccttcgtggtgctagcactatttgccgttacacaagctgaggagggagccagattgctggcatccaagtctcttctgaatcggtacgccgtggagggacgggatctaactctccagtacaatatctataatgtgggctcttccgctgcattggacgtggagctttctgacgactcttttccacctgaggacttcgggattgtttccggtatgctcaacgtgaaatgggaccgcatagcgcctgcctcaaatgtgagccatactgtcgtgctgcgccctctgaaagctggctattttaacttcacctccgctacgattacatatctagcccaagaggacggaccagttgtgattggcagcacatccgctcccggtcagggtggtatcctggctcagcgcgaattcgatcggaggttcagccctcatttctag

SEQ ID NO: 298878 - DNA, 895 bp, Artificial Sequence
  derived and/or modified sequence
cggtaagtccggaggcttagggcgtccgaacgggagaggcgagagcctcgtgtccgcgcatcaccccgtggctgggggttagctaggggagggcgggaagggcagaggacgcggtggctggaggacgtgtaaccttgcaagaggcgggaggcggggggcagagatgaggctgctgtcatttgtggtgttggctctatttgctgtcactcaagcagaggaaggagccaggcttttggcttccaaatcactgctgaacagatacgccgtggagggacgagacctgaccttgcagtacaacatctacaatgttggctcaagtgctgcattagacgtggaactatctgatgattccttccctccagaagactttggcattgtgtctggaatgctcaatgtcaaatgggaccggattgcccctgctagcaatgtctcccacactgtggtcctgcgccctctcaaggctggttatttcaacttcacctcggcaacaattacttacctggcccaggaggatgggcccgttgtgattggctctaccagtgcacctggacagggaggaatcctggctcagcgggagtttgacaggcgattctcccctcattttctggactgggcagcctttggggtcatgacccttccctccatcggcatccccctgctattgtggtactccagcaagaggaaatatgacactcccaaaacgaagaagaactgattggggcttccacagccctcctctcccaagaaatccaggctcctctcccaagaaatccaggtgctttccagactccaaagggtatcttaaatgcaatctcttctctcttagcccttggccactttctcctggatcctgccctgctctcagccatagtgaaggaccagccctaggagtctg

SEQ ID NO: 298879 - DNA, 351 bp, Artificial Sequence
  derived and/or modified sequence
gtttgggatgccaacgggtgaagatggtaggagagtctggagaacgggtctgctctggtggcttatggactactctgtggaaggggctgctgttctgatgaggctgctgtcatttgtggtgttggctctatttgctgtcactcaagcagaggaaggagccaggcttttggcttccaaatcactgctgaacagatacgccgtggagggacgagacctgaccttgcagtacaacatctacaatgttggctcaagtgctgcattagacgtggaactatctgatgattccttccctccagaagactttggcattgtgtctggaatgctcaatgtcaaatgggaccggattgcccc

SEQ ID NO: 298880 - DNA, 552 bp, Artificial Sequence
  derived and/or modified sequence
atgagactgctgagcttcgtggtgctggccctgttcgccgtgacccaggccgaggagggcgccagactgctggccagcaagagcctgctgaacagatacgccgtggagggcagagacctgaccctgcagtacaacatctacaacgtgggcagcagcgccgccctggacgtggagctgagcgacgacagcttcccccccgaggacttcggcatcgtgagcggcatgctgaacgtgaagtgggacagaatcgcccccgccagcaacgtgagccacaccgtggtgctgagacccctgaaggccggctacttcaacttcaccagcgccaccatcacctacctggcccaggaggacggccccgtggtgatcggcagcaccagcgcccccggccagggcggcatcctggcccagagagagttcgacagaagattcagcccccacttcctggactgggccgccttcggcgtgatgaccctgcccagcatcggcatccccctgctgctgtggtacagcagcaagagaaagtacgacacccccaagaccaagaagaactag

SEQ ID NO: 298881 - DNA, 258 bp, Artificial Sequence
  derived and/or modified sequence
atgagactgctgagcttcgtggtgctggccctgttcgccgtgacccaggccgaggagggcgccagactgctggccagcaagagcctgctgaacagatacgccgtggagggcagagacctgaccctgcagtacaacatctacaacgtgggcagcagcgccgccctggacgtggagctgagcgacgacagcttcccccccgaggacttcggcatcgtgagcggcatgctgaacgtgaagtgggacagaatcgccccctag

SEQ ID NO: 298882 - DNA, 444 bp, Artificial Sequence
  derived and/or modified sequence
atgagactgctgagcttcgtggtgctggccctgttcgccgtgacccaggccgaggagggcgccagactgctggccagcaagagcctgctgaacagatacgccgtggagggcagagacctgaccctgcagtacaacatctacaacgtgggcagcagcgccgccctggacgtggagctgagcgacgacagcttcccccccgaggacttcggcatcgtgagcggcatgctgaacgtgaagtgggacagaatcgcccccgccagcaacgtgagccacaccgtggtgctgagacccctgaaggccggctacttcaacttcaccagcgccaccatcacctacctggcccaggaggacggccccgtggtgatcggcagcaccagcgcccccggccagggcggcatcctggcccagagagagttcgacagaagattcagcccccacttctag

SEQ ID NO: 298883 - DNA, 1052 bp, Artificial Sequence
  derived and/or modified sequence
atgtctgacatagaagaggtggtggaagagtacgaggaggaaatggcagccccccagcaccaggaggaggcagcggaagaggatgctgaagcagaggctgagaccgaggagaccagggcagaagatgaagaagaagaggaagcaaaggaggctgaagatggcccaatggaggagtccaaaccaaagcccaggtcgttcatgcccaacttggtgcctcccaagatccccgatggagagagagtggactttgatgacatccaccggaagcgcatggagaaggacctgaatgagttgcaggcgctgatcgaggctcactttgagaacaggaagaaagaggaggaggagctcgtttctctcaaagacaggatcgagagacgtcgggcagagcgggccgagcagcagcgcatccggaatgagcgggagaaggagcggcagaaccgcctggctgaagagagggctcgacgagaggaggaggagaacaggaggaaggctgaggatgaggcccggaagaagaaggctttgtccaacatgatgcattttgggggttacatccagaagcaccctccagacagagcggaaaagtgggaagaggcagactgagcgggaaaagaagaagaagattctggctgagaggaggaaggtgctggccattgaccacctgaatgaagatcagctgagggagaaggccaaggagctgtggcagagcatctataacttggaggcagagaagttcgacctgcaggagaagttcaagcagcagaaatatgagatcaatgttctccgaaacaggatcaacgataaccagaaagtctccaagacccgcgggaaggctaaagtcaccgggcgctggaaatagagcctggcctccttcaccaaagatctgctcctcgctcgcacctgcctccggcctgcactcccccagttcccgggccctcctgggcaccccaggcagctcctgtttggaaatggggagctggcctaggtgggagccaccactcctgcctgcccccacacccactccacaccagtaataaaaagccaccacacactga

SEQ ID NO: 298884 - protein, 283 aa, Artificial Sequence
  derived and/or modified sequence
MSDIEEVVEEYEEEAKLEQEEAAEEDAEAEAETEETRAEEDEEEEEAKEAEDGPMEESKPKPRSFMPNLVPPKIPDGERVDFDDIHRKRMEKDLNELQALIEAHFENRKKEEEELVSLKDRIERRRAERAEQQRIRNEREKERQNRLAEERARREEEENRRKAEDEARKKKALSNMMHFGGYIQKQAQTERKSGKRQTEREKKKKILAERRKVLAIDHLNEDQLREKAKELWQSIYNLEAEKFDLQEKFKQQKYEINVLRNRINDNQKVSKTRGKAKVTGRWK

SEQ ID NO: 298885 - DNA, 852 bp, Artificial Sequence
  derived and/or modified sequence
atgagcgacatcgaggaggtggtggaggagtacgaggaggaggccaagctggagcaggaggaggccgccgaggaggacgccgaggccgaggccgagaccgaggagaccagagccgaggaggacgaggaggaggaggaggccaaggaggccgaggacggccccatggaggagagcaagcccaagcccagaagcttcatgcccaacctggtgccccccaagatccccgacggcgagagagtggacttcgacgacatccacagaaagagaatggagaaggacctgaacgagctgcaggccctgatcgaggcccacttcgagaacagaaagaaggaggaggaggagctggtgagcctgaaggacagaatcgagagaagaagagccgagagagccgagcagcagagaatcagaaacgagagagagaaggagagacagaacagactggccgaggagagagccagaagagaggaggaggagaacagaagaaaggccgaggacgaggccagaaagaagaaggccctgagcaacatgatgcacttcggcggctacatccagaagcaggcccagaccgagagaaagagcggcaagagacagaccgagagagagaagaagaagaagatcctggccgagagaagaaaggtgctggccatcgaccacctgaacgaggaccagctgagagagaaggccaaggagctgtggcagagcatctacaacctggaggccgagaagttcgacctgcaggagaagttcaagcagcagaagtacgagatcaacgtgctgagaaacagaatcaacgacaaccagaaggtgagcaagaccagaggcaaggccaaggtgaccggcagatggaagtag

SEQ ID NO: 298886 - DNA, 867 bp, Artificial Sequence
  derived and/or modified sequence
atgagcgacatcgaggaggtggtggaggagtacgaggaggaggagcaggaggaggccgccgtggaggagcaggaggaggccgccgaggaggacgccgaggccgaggccgagaccgaggagaccagagccgaggaggacgaggaggaggaggaggccaaggaggccgaggacggccccatggaggagagcaagcccaagcccagaagcttcatgcccaacctggtgccccccaagatccccgacggcgagagagtggacttcgacgacatccacagaaagagaatggagaaggacctgaacgagctgcaggccctgatcgaggcccacttcgagaacagaaagaaggaggaggaggagctggtgagcctgaaggacagaatcgagagaagaagagccgagagagccgagcagcagagaatcagaaacgagagagagaaggagagacagaacagactggccgaggagagagccagaagagaggaggaggagaacagaagaaaggccgaggacgaggccagaaagaagaaggccctgagcaacatgatgcacttcggcggctacatccagaagcaggcccagaccgagagaaagagcggcaagagacagaccgagagagagaagaagaagaagatcctggccgagagaagaaaggtgctggccatcgaccacctgaacgaggaccagctgagagagaaggccaaggagctgtggcagagcatctacaacctggaggccgagaagttcgacctgcaggagaagttcaagcagcagaagtacgagatcaacgtgctgagaaacagaatcaacgacaaccagaaggtgagcaagaccagaggcaaggccaaggtgaccggcagatggaagtag

SEQ ID NO: 298887 - DNA, 852 bp, Artificial Sequence
  derived and/or modified sequence
atgagcgatatagaagaggtcgtagaagaatacgaagaggaggccaaactggagcaagaagaggccgcagaagaggacgcggaggccgaagccgagaccgaggagactcgagccgaagaggacgaagaggaggaagaggccaaggaagctgaggacgggccgatggaggaatctaagcccaaaccccgatctttcatgcccaatctagtgcccccgaaaataccggacggagagagggtggacttcgacgacatacatagaaaacggatggaaaaagacttgaatgagctgcaggctcttatcgaggcccattttgaaaatcggaaaaaggaagaggaagaactcgtctccctgaaggaccgaatcgaaaggaggagagctgagcgcgctgaacagcagcgaattcggaacgaacgcgagaaggagcggcaaaaccggcttgcagaagagagagcccgccgagaggaagaggaaaaccgccggaaggcagaggacgaggcccggaaaaaaaaggcattaagcaatatgatgcactttgggggctacattcagaaacaggcccaaacggaacggaaatctggaaagcggcaaacagagagagaaaagaaaaaaaaaattcttgctgaaaggaggaaggtgcttgctattgaccacttgaatgaagatcagctgcgagagaaagcgaaggaactctggcagagcatatataatctcgaggcagagaagttcgatctccaagaaaaattcaagcagcagaagtacgaaataaatgtgctgagaaaccgtatcaacgataaccagaaagtgtcaaaaaccaggggcaaggccaaagtgacaggccgctggaagtag

SEQ ID NO: 298888 - DNA, 867 bp, Artificial Sequence
  derived and/or modified sequence
atgagtgatattgaagaggtagtagaggagtacgaagaggaggaacaagaagaggcagcagttgaggagcaggaggaggcagccgaagaggatgcagaggccgaagctgaaactgaagagacaagagccgaagaagatgaagaggaggaagaggccaaagaggccgaggatggtcctatggaagagagcaagcccaagcccaggagctttatgcccaacctcgttcccccaaagattcctgacggagaaagggtggacttcgatgacattcaccggaagcgcatggagaaggacctgaacgaactgcaggcactgatagaggcgcactttgagaaccggaaaaaagaggaggaagaacttgtgtccctgaaagaccggatcgagcgacggcgagccgaaagggccgaacagcagagaatcaggaatgaacgagagaaggagcgccagaaccgtttggcggaggaacgggcaagaagggaggaggaagaaaatcgtcggaaggctgaagatgaggcccgaaaaaaaaaggcgctgagcaatatgatgcactttggcggctacatccagaaacaggcccagactgagaggaagagcgggaaacggcaaaccgagagagagaagaaaaagaagattttagctgagaggagaaaggtgctcgcaatcgatcacttgaacgaggaccagctccgtgaaaaagccaaggagctgtggcagtcaatttataatctcgaagcagaaaagttcgatctgcaggaaaagtttaaacagcaaaagtacgaaattaacgttttgcgtaatagaatcaacgataaccagaaagtgtctaaaacgagaggcaaagccaaagtaactgggcgctggaagtag

SEQ ID NO: 298889 - DNA, 867 bp, Artificial Sequence
  derived and/or modified sequence
atgagtgacatcgaagaggtggtcgaggagtacgaggaagaggaacaggaggaagccgcggtggaggaacaggaggaggcagcagaagaggacgccgaggcggaggcagaaacagaagaaacgcgcgctgaggaagacgaggaagaggaggaagccaaagaggcagaagacggtccaatggaagagtcaaaacccaaacctaggtcgtttatgccaaaccttgtccccccaaaaatccctgatggcgagcgcgtcgacttcgatgatattcataggaaacgcatggagaaggacctgaatgaattacaggccctgattgaggcgcacttcgaaaatcggaaaaaggaagaagaggagctggtatctctcaaggaccggattgagagaaggcgcgccgaacgggctgagcagcagagaatacggaacgaacgcgaaaaagaacgccaaaatcggctggccgaggaacgagccaggcgcgaggaagaagagaacaggcgcaaggcagaagatgaggccagaaaaaagaaggccctctctaatatgatgcatttcggaggatatatccagaaacaggcacagaccgagaggaagtctgggaaacgccagacagagagagagaagaaaaaaaagattcttgctgagcggaggaaggtgcttgcgatcgatcacttaaacgaagaccagttaagggagaaagcaaaagaactgtggcagtccatttataaccttgaagcagagaaattcgatctacaagagaagttcaaacaacaaaaatatgagatcaatgttttaagaaatcgcatcaatgacaatcagaaggtgagtaagactcggggcaaagccaaggtgacgggcaggtggaagtag

SEQ ID NO: 298890 - DNA, 867 bp, Artificial Sequence
  derived and/or modified sequence
atgagcgacatagaggaggtggtggaagagtatgaagaggaggagcaggaagaggctgctgtggaagaacaggaagaggcggccgaagaggatgccgaggccgaagccgagacagaagagaccagagctgaggaggacgaggaagaggaggaagcgaaagaagccgaggacggaccaatggaggaaagtaagcccaagcccagatcctttatgcctaatcttgttccccctaagatacccgacggcgagagagtggattttgatgacatccaccggaaaagaatggagaaagatctgaatgaattacaagccctgatcgaggctcactttgagaatagaaagaaggaagaggaggagctagtctcacttaaggatcgtatagaaaggagacgcgcagagcgggcggaacagcaacgaatccgcaatgaacgtgagaaggaaaggcagaacagattggccgaggagagggcacgccgggaggaggaggagaatcgacgcaaggcggaagacgaggcccgaaagaagaaagctctcagcaacatgatgcactttggagggtacattcagaaacaggcacagactgagagaaaatctggcaagcggcaaaccgagagggaaaaaaagaagaaaatcctggcggagcgacggaaggtgctggccattgaccatttgaatgaggatcagctaagggagaaagctaaggaattatggcaaagcatatacaacttggaggccgaaaagtttgaccttcaagaaaagtttaaacagcagaaatatgaaatcaatgtcctcagaaaccgcatcaacgacaatcagaaagtatccaagacaagaggcaaggctaaggttaccggccggtggaaatag

SEQ ID NO: 298891 - DNA, 852 bp, Artificial Sequence
  derived and/or modified sequence
atgtctgacatcgaggaggtggtggaggagtatgaggaggaggccaagctggagcaggaggaggccgcagaagaagatgctgaggccgaggccgagacagaggagaccagggctgaggaggatgaggaggaggaggaggccaaggaggctgaagatggccccatggaggagagcaagcccaagcccaggagcttcatgcccaacctggtgccccccaagatcccagatggagagcgggtggactttgatgacatccacaggaagaggatggagaaggacctgaatgagctgcaggccctgattgaggcccactttgagaacaggaagaaggaggaggaggagctggtgtccctgaaggaccgcatcgagaggagaagagctgagcgggcagagcagcagaggatcagaaatgaaagagagaaggagcggcagaaccggctggccgaggagcgggcccggcgggaggaggaggagaacagaaggaaggccgaggatgaggccaggaagaagaaggccctgagcaacatgatgcactttggaggctacatccagaagcaggcccagacagagaggaagagcggcaagaggcagacagagcgggagaagaagaagaagatcctggccgagaggaggaaggtgctggccatcgaccacctgaatgaagaccagctgcgggagaaggccaaggagctgtggcagagcatctacaacctggaggccgagaagtttgacctgcaggagaagttcaagcagcagaagtatgagatcaacgtgctgaggaaccgcatcaatgacaaccagaaggtgtccaagacccggggcaaggccaaggtgacaggccgctggaagtag

SEQ ID NO: 298892 - DNA, 867 bp, Artificial Sequence
  derived and/or modified sequence
atgtctgacatcgaggaggtggtggaggagtatgaggaggaggagcaggaggaggccgctgtggaggagcaggaggaggccgctgaggaggatgctgaggccgaggccgagacagaggagaccagggcagaagaagatgaggaggaggaggaggccaaggaggccgaggatggccccatggaggagagcaagcccaagcccaggagcttcatgcccaacctggtgccccccaagatcccagatggagagcgggtggactttgatgacatccacaggaagaggatggagaaggacctgaatgagctgcaggccctgattgaggcccactttgaaaataggaagaaggaggaggaggagctggtgtccctgaaggacagaattgaaagaagaagagctgagagagctgagcagcagaggatcagaaatgaaagagagaaggagcggcagaaccggctggccgaggagcgggcccggcgggaggaggaggagaacagaaggaaggcagaagatgaggccaggaagaagaaggccctgagcaacatgatgcactttggaggctacatccagaagcaggcccagacagagaggaagagcggcaagaggcagacagagcgggagaagaagaagaagatcctggccgagaggaggaaggtgctggccatcgaccacctgaatgaagaccagctgcgggagaaggccaaggagctgtggcagagcatctacaacctggaggccgagaagtttgacctgcaggagaagttcaagcagcagaagtatgagatcaacgtgctgaggaaccgcatcaatgacaaccagaaggtgtccaagacccggggcaaggccaaggtgacaggccgctggaagtag

SEQ ID NO: 298893 - DNA, 852 bp, Artificial Sequence
  derived and/or modified sequence
atgagcgacatcgaggaggtggtggaggagtacgaggaggaggccaagctggagcaagaggaggccgccgaggaggatgcagaggctgaggccgaaacagaagaaacccgggcagaagaggacgaggaggaagaagaggctaaagaggccgaggacgggccaatggaagagtctaaacctaaaccacgcagcttcatgccgaacttagtacctcctaagatacctgatggagaacgggttgatttcgatgacatccaccgcaagagaatggagaaggaccttaacgagctgcaggctctgatcgaagctcacttcgaaaatcgaaagaaggaggaagaggagttagtgtcactgaaagataggattgaacggcggcgggcagaacgagctgaacagcagcggataaggaacgaacgcgagaaagaacggcagaacaggcttgcagaggaacgggcgaggcgagaggaagaggagaaccgaaggaaggccgaagacgaagccaggaaaaaaaaagccctctcaaacatgatgcattttggcggatatatccagaagcaggcacagactgagaggaagagcggtaagcggcagaccgagagggagaagaagaaaaagatcctggcagagcgaagaaaagtgctggcaatcgaccacctgaacgaggatcagctgagggagaaagcaaaagagctgtggcagtccatctataacctcgaagcagaaaagttcgacctgcaggagaaatttaaacaacagaagtacgagatcaacgtccttcggaatcgaataaacgacaaccagaaagtgtccaaaacaaggggcaaagctaaagttactgggcgctggaaatag

SEQ ID NO: 298894 - DNA, 867 bp, Artificial Sequence
  derived and/or modified sequence
atgagcgacatcgaggaggtggtggaggagtacgaggaggaggagcaggaagaggcagccgtggaggaacaggaggaggccgctgaagaggacgcggaggccgaagcagaaactgaagagacccgcgccgaagaagacgaggaagaagaggaggcaaaggaggcggaggacggcccaatggaggaatccaagcccaaacccagatcatttatgcccaacctggtccctccaaagatccccgacggagaaagggtcgatttcgacgatatccaccgcaagagaatggaaaaggacttaaacgaattgcaggccctgattgaggcccactttgaaaacagaaagaaggaagaagaggaactcgtgtcgttgaaagatcgaatcgagaggcggcgggctgagagagcagagcagcaaaggattcggaacgaaagagaaaaggagagacaaaaccgccttgccgaggaaagggcccggagagaggaggaagagaaccgcagaaaagcagaggacgaggctaggaaaaagaaggccctctcgaatatgatgcattttggaggctatattcagaagcaagcacagaccgagagaaagtctggaaagagacagactgaaagagagaagaaaaaaaagatactagctgaacggcgtaaagtgctggccatagaccacttaaacgaggatcagttacgggaaaaggccaaggaattgtggcagtcgatttacaacctggaagcagaaaagttcgacttgcaggagaaattcaaacagcagaagtacgaaattaatgtgctgagaaatcgcattaacgacaaccagaaggtgtccaagactaggggaaaggctaaagtcaccggaaggtggaaatag

SEQ ID NO: 298895 - DNA, 867 bp, Artificial Sequence
  derived and/or modified sequence
atgagcgacatcgaggaggtggtggaggagtacgaggaggaggagcaggaggaagcggccgtagaagaacaggaagaagcagccgaagaagacgccgaggccgaggctgaaaccgaggaaacgcgtgccgaggaggacgaggaagaagaagaagccaaggaggccgaggacggccccatggaagaaagtaaacccaaaccacgatcattcatgcccaaccttgtgccgccaaaaattcctgacggtgagcgtgtcgatttcgacgatatccaccgaaaaaggatggagaaggatctcaacgaactccaggccttgattgaagcgcacttcgagaaccgtaaaaaagaagaggaggaactggtctcactcaaagacagaattgaaaggcggcgggcagagcgcgccgaacagcagagaatcagaaatgagagagaaaaggagaggcagaacaggttagctgaggagagagccagacgagaggaagaagagaataggcgcaaggccgaggacgaagctcggaagaaaaaggcgctgtcaaatatgatgcacttcggagggtatatccagaagcaggcccagactgagcgaaagagcggtaagagacagacggagagagagaagaagaagaagatcctagcagagaggcgcaaggtgctcgccatcgaccacttgaacgaagaccaactgcgagagaaagcaaaagagttgtggcagtccatctataatctcgaagcggagaaatttgacctccaagaaaaatttaaacagcaaaagtacgagatcaatgttctccggaatcggatcaatgataaccagaaggtgtccaaaacacgcggtaaggcaaaggtgactgggagatggaagtag

SEQ ID NO: 298896 - DNA, 867 bp, Artificial Sequence
  derived and/or modified sequence
atgagcgacatcgaggaggtggtggaggagtacgaggaggaggagcaggaggaagcggcagtggaggagcaagaagaggctgctgaagaggacgccgaagctgaggccgagacagaggagaccagagcagaggaagacgaggaagaagaagaggcgaaagaagccgaagatggccccatggaagaaagcaagcccaaacctaggtctttcatgccaaacttggtcccacccaagatccccgacggtgaacgtgtcgacttcgacgatattcaccggaaaaggatggagaaggacttaaacgagctacaagcattgatcgaggcacacttcgagaacaggaagaaagaggaggaggagctggtgtcattgaaggataggattgaaagacggagagccgagcgggcagagcagcagcggatcagaaatgaacgggagaaggagcgccaaaaccggctagctgaggaacgggccagaagagaagaggaagaaaacagacgtaaggccgaggatgaggcgcggaagaagaaggccctgagcaatatgatgcactttggtggatatatccagaaacaggcgcaaacagaacggaagtccggtaaaaggcagacggagcgcgaaaagaagaagaagattctcgccgaaagacgcaaagtcctggcgatcgaccacctgaacgaggatcaactccgcgagaaggccaaagagctttggcaatccatctacaatctggaagcagaaaagttcgacctgcaggaaaaatttaaacaacagaagtacgagatcaacgtcttaaggaaccggattaatgataaccagaaggtctcaaaaacccggggcaaggccaaggtaacgggcaggtggaagtag

SEQ ID NO: 298897 - DNA, 852 bp, Artificial Sequence
  derived and/or modified sequence
atgagtgacatcgaggaagtggtggaggaatacgaggaagaggcgaagctcgaacaggaagaggccgctgaagaggatgccgaggcggaggctgagactgaggaaacccgagccgaagaggatgaggaggaagaggaggcgaaggaggctgaggacggcccaatggaggagtccaaaccaaagccaagatcctttatgcctaatcttgtacctcccaaaatccctgacggcgagcgagtggactttgacgacatacacaggaaacggatggagaaagatcttaacgaactgcaggcactaattgaagctcacttcgagaaccgcaagaaggaagaagaagaacttgtctccctgaaggatagaatcgaaaggaggagggccgagcgcgctgagcagcagcggatacgcaacgagagggagaaggagcggcaaaatagattagccgaggaacgcgctcggagggaagaagaggagaacagacgtaaggcagaggacgaggcgcgaaagaagaaggccctgtccaacatgatgcatttcggcggttatatccaaaaacaagcccaaaccgaacggaaatctggtaagagacaaactgaaagagaaaaaaaaaaaaaaattctagcggaaaggagaaaggtactcgcgatcgatcacttaaatgaggatcaactgcgggagaaagctaaagagctgtggcagagtatttacaatctggaggcagagaagtttgacctgcaggaaaaatttaagcagcaaaagtacgaaattaatgtactgcgcaatcgaattaatgacaaccagaaagtttccaagacacgcggaaaggcaaaggtcaccggtcggtggaaatag

SEQ ID NO: 298898 - DNA, 867 bp, Artificial Sequence
  derived and/or modified sequence
atgagcgatatcgaggaagtggttgaagagtacgaagaagaagagcaagaggaggcggcagtcgaagagcaggaagaagccgcagaagaggacgcagaggccgaggctgagaccgaggaaacaagggccgaagaggacgaagaagaggaggaggctaaggaagctgaggatggtcccatggaggagtctaaacctaagccacggagttttatgcctaacttggttcccccaaagatcccggacggggagagggtggacttcgatgatatccacagaaaaagaatggagaaggacctgaatgagcttcaggcgctgatagaggcccactttgagaaccggaaaaaggaggaggaggaactggtctcacttaaggatcgcattgagaggagaagggcagaaagagccgagcagcagcggataaggaacgaacgagagaaagaacgccagaataggttggcggaagagcgggctcggagggaggaggaggagaaccgtcgaaaagccgaggacgaagctcggaagaaaaaggctttaagcaacatgatgcatttcgggggatacatacaaaaacaagcccaaacagaaaggaagagcgggaaacggcagaccgagagggagaagaaaaaaaagatacttgctgagagaaggaaggttctggccatcgaccacctaaatgaggatcagttgcgcgaaaaagccaaggagctttggcagagtatctacaatctcgaggctgagaaatttgacctacaggagaagttcaaacagcagaagtatgagattaacgtgttgaggaacaggatcaacgacaaccaaaaggttagcaagaccagggggaaggctaaggtgaccgggaggtggaaatag

SEQ ID NO: 298899 - DNA, 867 bp, Artificial Sequence
  derived and/or modified sequence
atgtccgacatcgaggaagtagttgaggagtatgaggaagaggagcaggaggaagccgcagtagaggagcaggaagaggcagctgaagaggatgctgaagctgaagccgagaccgaggagactagagccgaggaggacgaagaagaagaggaagcaaaggaggccgaagatggtcctatggaagagtcaaagcccaagccacgctcattcatgcctaacctggtgccaccaaagatccctgacggcgagcgggttgatttcgacgacatacatagaaaacggatggaaaaagacttgaatgagttgcaggcactgatcgaagcgcatttcgaaaataggaagaaagaagaggaagaactagtgtctctgaaggatagaattgagaggaggcgagcggaaagggccgagcagcagcggatccgaaatgaaagggagaaggaacgccagaatcgtcttgctgaagaaagagcacgaagggaggaggaagaaaatcgcagaaaggcagaagatgaggcccgtaagaagaaagctctgtccaatatgatgcactttggaggctacattcaaaagcaggctcagacggaaagaaaatcagggaaaagacagacggagcgggaaaaaaagaaaaagattctggctgaaagaaggaaagtcctggccatcgaccacctgaatgaagaccagctgcgggagaaagccaaggagctctggcaaagcatatacaatctagaggcagaaaagttcgacctgcaggaaaagtttaagcagcaaaagtatgagatcaacgtgctccggaaccgcattaacgacaaccagaaagtttcaaagacccgaggaaaggctaaggttactggaaggtggaaatag

SEQ ID NO: 298900 - DNA, 867 bp, Artificial Sequence
  derived and/or modified sequence
atgtcggatatcgaagaggtcgtcgaagaatatgaggaggaggagcaggaggaagcagctgtggaggagcaggaggaggccgcagaagaggatgccgaggccgaggcagagacagaagaaacccgcgctgaggaggatgaagaggaggaggaagcaaaagaggccgaagacgggcctatggaggaatccaaacccaaaccacggagctttatgcccaacttagttcctcccaaaatacccgatggcgagcgcgtggattttgacgacatccatcgcaaaaggatggagaaagacctgaatgagctgcaggccttgatcgaggcacacttcgagaacaggaagaaggaggaggaagagctcgtgagtcttaaggacaggatcgagcgacgacgcgctgagcgggctgaacagcaaaggatccggaacgagagagaaaaggaaagacagaacagattagcagaggagagagccagacgagaagaggaagagaacaggagaaaagccgaagatgaggccaggaagaaaaaagcattgtccaacatgatgcatttcggcggttacatacagaaacaggctcaaactgagcgcaagtcagggaagcggcagacagaacgtgagaaaaagaagaaaatcctcgccgagcgacgaaaagtcctcgccatagaccacctgaacgaagatcagctcagggaaaaagctaaagagctttggcagtccatatataacttagaggctgagaaatttgatttgcaggagaagttcaagcaacagaagtacgagatcaacgtcctgaggaataggataaatgacaaccagaaagtgtctaaaactcgaggcaaagccaaggtgacggggcgatggaagtag

SEQ ID NO: 298901 - DNA, 1048 bp, Artificial Sequence
  derived and/or modified sequence
atgtctgacatagaagaggtggtggaagagtacgaggaggaggctaagctggagcaggaggaggcagcggaagaggatgctgaagcagaggctgagaccgaggagaccagggcagaagaagatgaagaagaagaggaagcaaaggaggctgaagatggcccaatggaggagtccaaaccaaagcccaggtcgttcatgcccaacttggtgcctcccaagatccccgatggagagagagtggactttgatgacatccaccggaagcgcatggagaaggacctgaatgagttgcaggcgctgatcgaggctcactttgagaacaggaagaaagaggaggaggagctcgtttctctcaaagacaggatcgagagacgtcgggcagagcgggccgagcagcagcgcatccggaatgagcgggagaaggagcggcagaaccgcctggctgaagagagggctcgacgagaggaggaggagaacaggaggaaggctgaggatgaggcccggaagaagaaggctttgtccaacatgatgcattttgggggttacatccagaagcaggcccagacagagcggaaaagtgggaagaggcagactgagcgggaaaagaagaagaagattctggctgagaggaggaaggtgctggccattgaccacctgaatgaagatcagctgagggagaaggccaaggagctgtggcagagcatctataacttggaggcagagaagttcgacctgcaggagaagttcaagcagcagaaatatgagatcaatgttctccgaaacaggatcaacgataaccagaaagtctccaagacccgcgggaaggctaaagtcaccgggcgctggaaatagagcctggcctccttcaccaaagatctgctcctcgctcgcacctgcctccggcctgcactcccccagttcccgggccctcctgggcaccccaggcagctcctgtttggaaatggggagctggcctaggtgggagccaccactcctgcctgcccccacacccactccacaccagtaataaaaagccaccacacactga

SEQ ID NO: 298902 - DNA, 1063 bp, Artificial Sequence
  derived and/or modified sequence
atgtctgacatagaagaggtggtggaagagtacgaggaggaggagcaggaagaagcagctgttgaagagcaggaggaggcagcggaagaggatgctgaagcagaggctgagaccgaggagaccagggcagaagaagatgaagaagaagaggaagcaaaggaggctgaagatggcccaatggaggagtccaaaccaaagcccaggtcgttcatgcccaacttggtgcctcccaagatccccgatggagagagagtggactttgatgacatccaccggaagcgcatggagaaggacctgaatgagttgcaggcgctgatcgaggctcactttgagaacaggaagaaagaggaggaggagctcgtttctctcaaagacaggatcgagagacgtcgggcagagcgggccgagcagcagcgcatccggaatgagcgggagaaggagcggcagaaccgcctggctgaagagagggctcgacgagaggaggaggagaacaggaggaaggctgaggatgaggcccggaagaagaaggctttgtccaacatgatgcattttgggggttacatccagaagcaggcccagacagagcggaaaagtgggaagaggcagactgagcgggaaaagaagaagaagattctggctgagaggaggaaggtgctggccattgaccacctgaatgaagatcagctgagggagaaggccaaggagctgtggcagagcatctataacttggaggcagagaagttcgacctgcaggagaagttcaagcagcagaaatatgagatcaatgttctccgaaacaggatcaacgataaccagaaagtctccaagacccgcgggaaggctaaagtcaccgggcgctggaaatagagcctggcctccttcaccaaagatctgctcctcgctcgcacctgcctccggcctgcactcccccagttcccgggccctcctgggcaccccaggcagctcctgtttggaaatggggagctggcctaggtgggagccaccactcctgcctgcccccacacccactccacaccagtaataaaaagccaccacacactga

SEQ ID NO: 298903 - DNA, 1122 bp, Artificial Sequence
  derived and/or modified sequence
cagacgcctccaggatctgtcggcagctgctgttctgagggagagcagagaccatgtctgacatagaagaggtggtggaagagtacgaggaggaggagcaggaagaagcagctgttgaagagcaggaggaggcagcggaagaggatgctgaagcagaggctgagaccgaggagaccagggcagaagaagatgaagaagaagaggaagcaaaggaggctgaagatggcccaatggaggagtccaaaccaaagcccaggtcgttcatgcccaacttggtgcctcccaagatccccgatggagagagagtggactttgatgacatccaccggaagcgcatggagaaggacctgaatgagttgcaggcgctgatcgaggctcactttgagaacaggaagaaagaggaggaggagctcgtttctctcaaagacaggatcgagagacgtcgggcagagcgggccgagcagcagcgcatccggaatgagcgggagaaggagcggcagaaccgcctggctgaagagagggctcgacgagaggaggaggagaacaggaggaaggctgaggatgaggcccggaagaagaaggctttgtccaacatgatgcattttgggggttacatccagaagcaggcccagacagagcggaaaagtgggaagaggcagactgagcgggaaaagaagaagaagattctggctgagaggaggaaggtgctggccattgaccacctgaatgaagatcagctgagggagaaggccaaggagctgtggcagagcatctataacttggaggcagagaagttcgacctgcaggagaagttcaagcagcagaaatatgagatcaatgttctccgaaacaggatcaacgataaccagaaagtctccaagacccgcgggaaggctaaagtcaccgggcgctggaaatagagcctggcctccttcaccaaagatctgctcctcgctcgcacctgcctccggcctgcactcccccagttcccgggccctcctgggcaccccaggcagctcctgtttggaaatggggagctggcctaggtgggagccaccactcctgcctgcccccacacccactccacaccagtaataaaaagccaccacacactgactggca

SEQ ID NO: 298904 - DNA, 1330 bp, Artificial Sequence
  derived and/or modified sequence
acattcctccctccgcagggctggctcaccaggccccagcccacatgcctgcttaaagccctctccatcctctgcctcacccagtccccgctgagactgagcagacgcctccaggatctgtcggcagctgctgttctgaggtcacacagctcatgaggggtggaactagattcaccctaggcctcgctgatctctgtacaacgggggccagagctcttctgaggaaggcaggcttccctttgtacctgcactgacttttttctccttttggagggagagcagagaccatgtctgacatagaagaggtggtggaagagtacgaggaggaggagcaggaagaagcagctgttgaagagcaggaggaggcagcggaagaggatgctgaagcagaggctgagaccgaggagaccagggcagaagaagatgaagaagaagaggaagcaaaggaggctgaagatggcccaatggaggagtccaaaccaaagcccaggtcgttcatgcccaacttggtgcctcccaagatccccgatggagagagagtggactttgatgacatccaccggaagcgcatggagaaggacctgaatgagttgcaggcgctgatcgaggctcactttgagaacaggaagaaagaggaggaggagctcgtttctctcaaagacaggatcgagagacgtcgggcagagcgggccgagcagcagcgcatccggaatgagcgggagaaggagcggcagaaccgcctggctgaagagagggctcgacgagaggaggaggagaacaggaggaaggctgaggatgaggcccggaagaagaaggctttgtccaacatgatgcattttgggggttacatccagaagcaggcccagacagagcggaaaagtgggaagaggcagactgagcgggaaaagaagaagaagattctggctgagaggaggaaggtgctggccattgaccacctgaatgaagatcagctgagggagaaggccaaggagctgtggcagagcatctataacttggaggcagagaagttcgacctgcaggagaagttcaagcagcagaaatatgagatcaatgttctccgaaacaggatcaacgataaccagaaagtctccaagacccgcgggaaggctaaagtcaccgggcgctggaaatagagcctggcctccttcaccaaagatctgctcctcgctcgcacctgcctccggcctgcactcccccagttcccgggccctcctgggcaccccaggcagctcctgtttggaaatggggagctggcctaggtgggagccaccactcctgcctgcccccacacccactccacaccagtaat

SEQ ID NO: 298905 - DNA, 882 bp, Artificial Sequence
  derived and/or modified sequence
atgagcgacatcgaggaggtggtggaggagtacgaggaggagcaccccgaggaggaggaggactggagagaggacgaggacgagcaggaggaggccgccgaggaggacgccgaggccgaggccgagaccgaggagaccagagccgaggaggacgaggaggaggaggaggccaaggaggccgaggacggccccatggaggagagcaagcccaagcccagaagcttcatgcccaacctggtgccccccaagatccccgacggcgagagagtggacttcgacgacatccacagaaagagaatggagaaggacctgaacgagctgcaggccctgatcgaggcccacttcgagaacagaaagaaggaggaggaggagctggtgagcctgaaggacagaatcgagagaagaagagccgagagagccgagcagcagagaatcagaaacgagagagagaaggagagacagaacagactggccgaggagagagccagaagagaggaggaggagaacagaagaaaggccgaggacgaggccagaaagaagaaggccctgagcaacatgatgcacttcggcggctacatccagaagcaggcccagaccgagagaaagagcggcaagagacagaccgagagagagaagaagaagaagatcctggccgagagaagaaaggtgctggccatcgaccacctgaacgaggaccagctgagagagaaggccaaggagctgtggcagagcatctacaacctggaggccgagaagttcgacctgcaggagaagttcaagcagcagaagtacgagatcaacgtgctgagaaacagaatcaacgacaaccagaaggtgagcaagaccagaggcaaggccaaggtgaccggcagatggaagtag

SEQ ID NO: 298906 - DNA, 600 bp, Artificial Sequence
  derived and/or modified sequence
atgagcgacatcgaggaggtggtggaggagtacgaggaggagatggccgccccccagcaccaggaggaggccgccgaggaggacgccgaggccgaggccgagaccgaggagaccagagccgaggacgaggaggaggaggaggccaaggaggccgaggacggccccatggaggagagcaagcccaagcccagaagcttcatgcccaacctggtgccccccaagatccccgacggcgagagagtggacttcgacgacatccacagaaagagaatggagaaggacctgaacgagctgcaggccctgatcgaggcccacttcgagaacagaaagaaggaggaggaggagctggtgagcctgaaggacagaatcgagagaagaagagccgagagagccgagcagcagagaatcagaaacgagagagagaaggagagacagaacagactggccgaggagagagccagaagagaggaggaggagaacagaagaaaggccgaggacgaggccagaaagaagaaggccctgagcaacatgatgcacttcggcggctacatccagaagcacccccccgacagagccgagaagtgggaggaggccgactag

SEQ ID NO: 298907 - DNA, 876 bp, Artificial Sequence
  derived and/or modified sequence
atgagcgacatcgaggaggtggtggaggagtacgaggaggagtacctggagcacgccgaggccgccgtggaggagcaggaggaggccgccgaggaggacgccgaggccgaggccgagaccgaggagaccagagccgaggaggacgaggaggaggaggaggccaaggaggccgaggacggccccatggaggagagcaagcccaagcccagaagcttcatgcccaacctggtgccccccaagatccccgacggcgagagagtggacttcgacgacatccacagaaagagaatggagaaggacctgaacgagctgcaggccctgatcgaggcccacttcgagaacagaaagaaggaggaggaggagctggtgagcctgaaggacagaatcgagagaagaagagccgagagagccgagcagcagagaatcagaaacgagagagagaaggagagacagaacagactggccgaggagagagccagaagagaggaggaggagaacagaagaaaggccgaggacgaggccagaaagaagaaggccctgagcaacatgatgcacttcggcggctacatccagaagcacaccctgcagaccgagagaaagagcggcaagagacagaccgagagagagaagaagaagaagatcctggccgagagaagaaaggtgctggccatcgaccacctgaacgaggaccagctgagagagaaggccaaggagctgtggcagagcatctacaacctggaggccgagaagttcgacctgcaggagaagttcaagcagcagaagtacgagatcaacgtgctgagaaacagaatcaacgacaaccagaaggtgagcaagaccagaggcaaggccaaggtgaccggcagatggaagtag

SEQ ID NO: 298908 - DNA, 882 bp, Artificial Sequence
  derived and/or modified sequence
atgtcagatatcgaggaagtggtcgaggagtacgaggaagagcaccctgaggaagaggaggactggcgggaagacgaagatgagcaagaagaggccgccgaggaagacgctgaagccgaagcggagactgaggaaacgagggctgaggaagacgaagaggaagaggaagcgaaagaggccgaagacggccctatggaggagtcgaagccgaaaccgcgctcgtttatgcctaatttagtccctcccaaaattcccgacggagaaagagtggactttgatgatatccatcgtaagcggatggagaaagatcttaatgagcttcaggctcttattgaagcccattttgagaaccggaagaaagaagaggaggagcttgtatccttgaaggacagaatagagcggcgcagagcagagcgcgcggagcagcagcgcatccggaatgagcgagaaaaggagcgccagaacaggctggccgaggaacgggctcggcgcgaagaagaggagaaccgcagaaaggccgaagacgaagcaaggaagaaaaaagcgctaagcaacatgatgcattttggcggatatattcagaaacaggcacagacagaaagaaagagcggtaaacgtcagactgagcgtgagaagaagaagaaaatcctcgccgagcgccggaaggtgcttgccatcgatcacctaaatgaggatcagctgcgagagaaggcaaaagagttgtggcaatccatttacaaccttgaagccgaaaagttcgatctgcaggaaaaattcaagcagcagaaatatgagataaacgtcctccgtaatcggattaacgacaaccaaaaggtgagcaaaacacggggaaaagcaaaagtgactggacgctggaaatag

SEQ ID NO: 298909 - DNA, 600 bp, Artificial Sequence
  derived and/or modified sequence
atgagtgatatcgaagaggtggtagaggaatacgaagaggaaatggccgctccgcagcaccaggaggaggcggcagaagaggatgccgaagctgaggctgagaccgaagagacaagggctgaggacgaggaagaggaggaggcgaaggaagcagaagacggtccaatggaagagagtaagccaaaaccgaggtcctttatgccaaatctggttcctcctaagataccagacggggagcgagtagactttgatgatatccataggaagcgcatggaaaaggatctgaatgagctgcaagccctgattgaagcccattttgaaaaccgcaagaaagaggaggaggagttggtgtcactcaaagatagaatagagcgacgtcgcgccgagcgagccgaacagcagcggatacgaaatgagcgcgagaaggaacgacagaatcgcttggccgaggagcgggccaggcgggaagaagaggaaaacaggcggaaggccgaggatgaagcccggaagaagaaggctttgtcaaatatgatgcattttggcggctatatccagaagcatcctcctgatcgcgcagaaaaatgggaggaagctgattag

SEQ ID NO: 298910 - DNA, 876 bp, Artificial Sequence
  derived and/or modified sequence
atgagtgatatcgaggaggtggtcgaggaatacgaggaggaatacctggaacacgcagaggcagccgttgaggaacaggaggaggcagcggaggaagacgccgaggccgaggcagagaccgaggagactagggcggaggaagacgaggaagaggaagaagcaaaggaagctgaggatgggcccatggaggagtcgaagcctaagccgaggagcttcatgccaaaccttgtgcctcccaagatacccgacggggaacgagttgattttgacgacatacacaggaagaggatggagaaggacctcaatgagctgcaggccctcatcgaggcccatttcgagaatcgaaaaaaggaggaggaggaacttgtgagcctgaaggaccgcatcgagaggcgccgcgccgaacgggctgagcagcaaagaataaggaacgagcgggaaaaggaaaggcagaacaggttagcagaagagcgtgcgagaagagaggaggaggaaaatagacgcaaagcagaagacgaggcacggaaaaaaaaggcccttagtaacatgatgcattttggcggatatattcaaaaacacaccctgcagactgagcgaaagtctggtaagcgccaaacagaacgggagaaaaagaaaaaaatccttgccgaaaggagaaaagtgctggccatcgatcatctgaacgaagatcagctcagggaaaaagcgaaagagctctggcagtctatttacaatttggaagcagaaaaattcgatttgcaggagaagtttaaacaacagaagtacgaaattaacgtccttaggaatcggatcaacgataaccaaaaggtcagcaaaactcggggaaaagctaaggtgacgggccggtggaagtag

SEQ ID NO: 298911 - DNA, 882 bp, Artificial Sequence
  derived and/or modified sequence
atgtctgacatcgaggaggtggtggaggagtatgaggaggagcaccctgaggaggaggaggactggagagaagatgaagatgagcaggaggaggccgcagaagaagatgctgaggccgaggccgagacagaggagaccagggctgaggaggatgaggaggaggaggaggccaaggaggctgaagatggccccatggaggagagcaagcccaagcccaggagcttcatgcccaacctggtgccccccaagatcccagatggagagcgggtggactttgatgacatccacaggaagaggatggagaaggacctgaatgagctgcaggccctgattgaggcccactttgagaacaggaagaaggaggaggaggagctggtgtccctgaaggaccgcatcgagaggagaagagctgagcgggcagagcagcagaggatcagaaatgaaagagagaaggagcggcagaaccggctggccgaggagcgggcccggcgggaggaggaggagaacagaaggaaggccgaggatgaggccaggaagaagaaggccctgagcaacatgatgcactttggaggctacatccagaagcaggcccagacagagaggaagagcggcaagaggcagacagagcgggagaagaagaagaagatcctggccgagaggaggaaggtgctggccatcgaccacctgaatgaagaccagctgcgggagaaggccaaggagctgtggcagagcatctacaacctggaggccgagaagtttgacctgcaggagaagttcaagcagcagaagtatgagatcaacgtgctgaggaaccgcatcaatgacaaccagaaggtgtccaagacccggggcaaggccaaggtgacaggccgctggaagtag

SEQ ID NO: 298912 - DNA, 600 bp, Artificial Sequence
  derived and/or modified sequence
atgtctgacatcgaggaggtggtggaggagtatgaggaggagatggccgccccccagcaccaggaggaggccgcagaagaagatgctgaggccgaggccgagacagaggagaccagggcagaagatgaggaggaggaggaggccaaggaggccgaggatggccccatggaggagagcaagcccaagcccaggagcttcatgcccaacctggtgccccccaagatcccagatggagagcgggtggactttgatgacatccacaggaagaggatggagaaggacctgaatgagctgcaggccctgattgaggcccactttgaaaataggaagaaggaggaggaggagctggtgtccctgaaggacagaattgaaagaagaagagctgagagagctgagcagcagaggatcagaaatgaaagagagaaggagcggcagaaccggctggccgaggagcgggcccggcgggaggaggaggagaacagaaggaaggcagaagatgaggccaggaagaagaaggccctgagcaacatgatgcactttggaggctacatccagaagcaccccccagacagagctgagaagtgggaggaggccgactag

SEQ ID NO: 298913 - DNA, 876 bp, Artificial Sequence
  derived and/or modified sequence
atgtctgacatcgaggaggtggtggaggagtatgaggaggagtacctggagcacgccgaggccgctgtggaggagcaggaggaggccgctgaggaggatgctgaggccgaggccgagacagaggagaccagggcagaagaagatgaggaggaggaggaggccaaggaggccgaggatggccccatggaggagagcaagcccaagcccaggagcttcatgcccaacctggtgccccccaagatcccagatggagagcgggtggactttgatgacatccacaggaagaggatggagaaggacctgaatgagctgcaggccctgattgaggcccactttgaaaataggaagaaggaggaggaggagctggtgtccctgaaggacagaattgaaagaagaagagctgagagagctgagcagcagaggatcagaaatgaaagagagaaggagcggcagaaccggctggccgaggagcgggcccggcgggaggaggaggagaacagaaggaaggcagaagatgaggccaggaagaagaaggccctgagcaacatgatgcactttggaggctacatccagaagcacaccctgcagacagagaggaagagcggcaagaggcagacagagcgggagaagaagaagaagatcctggccgagaggaggaaggtgctggccatcgaccacctgaatgaagaccagctgcgggagaaggccaaggagctgtggcagagcatctacaacctggaggccgagaagtttgacctgcaggagaagttcaagcagcagaagtatgagatcaacgtgctgaggaaccgcatcaatgacaaccagaaggtgtccaagacccggggcaaggccaaggtgacaggccgctggaagtag

SEQ ID NO: 298914 - DNA, 882 bp, Artificial Sequence
  derived and/or modified sequence
atgagcgacatcgaggaggtggtggaggagtacgaggaggagcaccctgaggaggaagaagattggcgagaagacgaggatgaacaagaagaggccgccgaagaagacgccgaagccgaggcggagaccgaagagacacgggctgaagaggacgaagaggaggaagaagcgaaggaagccgaggacgggccaatggaagaatccaaacccaaaccgcgtagctttatgccgaacctggtgccgccaaagattccggatggggagagggtggactttgacgatatccatcgcaagaggatggagaaggacttaaacgaactgcaggcgttaattgaagctcacttcgagaaccggaagaaggaggaagaggaactcgtgagcctgaaggaccgcatagagcggcgacgcgctgaacgagccgaacagcaaaggattagaaacgagagggaaaaggagagacagaatcgactggccgaagagagggcccgtcgagaagaggaagagaatcggcgcaaagctgaggatgaagcccgcaaaaagaaagcactcagtaacatgatgcattttgggggctatatccaaaagcaagcccagaccgagaggaagtccggaaaacggcaaactgaacgtgaaaaaaagaagaagatattggcggagcgtagaaaggtgcttgcgatcgatcatttaaatgaagaccagctgcgggagaaggcaaaggagctctggcagtcaatctacaacctggaagcagagaagttcgatctccaggagaagttcaaacagcaaaaatacgaaattaatgtgttgcgcaaccgaatcaacgataatcagaaggtcagcaagacacgtggcaaagccaaggtcacggggcggtggaaatag

SEQ ID NO: 298915 - DNA, 600 bp, Artificial Sequence
  derived and/or modified sequence
atgagcgacatcgaggaggtggtggaggagtacgaggaggagatggctgccccacagcatcaggaggaggcagccgaggaggatgcggaagcagaggccgagactgaagagacacgagcagaggacgaagaagaggaagaagccaaagaagcagaggacgggccgatggaagagtccaagcccaaacctaggtcatttatgccaaacttagttccccctaaaatacctgacggggaaagagtcgacttcgacgacattcatcggaagcggatggaaaaggatctgaacgaactgcaggcgctgatcgaggctcactttgagaatagaaagaaagaggaagaggagctggtgagcctaaaggaccggattgagaggcgcagggcagagcgcgccgaacagcagcggatccggaatgagcgcgaaaaggaaagacagaaccgtctggcggaggaacgcgctagacgtgaggaggaggaaaatagaagaaaagccgaggatgaagccaggaagaaaaaagccttgtcaaatatgatgcactttggagggtatattcaaaagcatcctcccgacagagccgagaaatgggaggaagccgactag

SEQ ID NO: 298916 - DNA, 876 bp, Artificial Sequence
  derived and/or modified sequence
atgagcgacatcgaggaggtggtggaggagtacgaggaggagtacttagagcacgctgaagccgccgtcgaagagcaggaggaggctgcagaagaagacgctgaggcagaggcagaaactgaggagacaagggccgaagaagacgaggaagaagaggaggctaaggaagccgaagatgggcccatggaagagtcaaaacccaaaccccgctccttcatgccgaatttggtaccgccaaagatccctgatggagagcgggtggactttgatgatatccatagaaaaagaatggagaaagaccttaatgagcttcaggccctgattgaagcccattttgagaatcgaaaaaaagaagaggaagagctggtgtctctcaaagatcgcatcgaacggcggcgggcagaacgcgccgagcagcaaaggataagaaacgaacgcgagaaggagaggcaaaatcgactggccgaggagcgggcccgtcgggaggaggaggagaacagaaggaaagctgaggacgaggcacgtaaaaaaaaagcactgtcaaacatgatgcatttcggtggttacatccagaagcacaccctgcaaacagaaagaaaaagtggtaagcgccagaccgaaagagagaagaaaaagaagatcctggcagagagaagaaaagttctggctattgatcatctgaatgaagaccagcttcgagagaaagccaaggaactatggcaatcaatctacaacttggaggctgagaaattcgatcttcaagagaaatttaagcagcaaaaatatgagatcaacgttctcaggaacaggattaatgacaatcagaaggttagtaaaaccagggggaaagctaaggtgaccggcaggtggaaatag

SEQ ID NO: 298917 - DNA, 882 bp, Artificial Sequence
  derived and/or modified sequence
atgtctgatatcgaggaggtggtcgaagagtacgaagaggagcacccagaggaagaggaggattggagggaggatgaggacgagcaggaagaggccgctgaagaggacgccgaggcagaggccgagaccgaggagacccgcgctgaagaagacgaggaagaggaagaagccaaagaggcggaggatggacccatggaggagagcaaaccaaaacccagaagctttatgcccaacctggttccaccgaaaatcccggacggagagcgagttgatttcgacgacattcaccgcaaacgcatggaaaaggatcttaatgaactgcaggccctgatagaggcccattttgagaacagaaaaaaagaggaggaagagctcgtgtctctcaaagatcgcatagagcgcaggagagctgaaagggccgaacagcagagaatacggaatgagagggaaaaggaacggcaaaataggttagcagaagagagggcccgtcgagaggaagaggaaaaccgcagaaaggctgaggatgaggctcggaaaaagaaagcattatctaatatgatgcattttggcggatacatccaaaaacaggcgcaaacggagagaaaaagcggaaagcggcagaccgagagagaaaaaaagaaaaagatcctggcggagcgcaggaaggtcctcgcaatagatcacctgaacgaggatcagttgcgggagaaggcgaaggaattgtggcagagtatttataatctggaggccgagaaatttgatctccaggagaagttcaaacagcagaaatatgaaattaatgtgctccgtaacaggataaacgataaccaaaaggtctcaaaaacaagagggaaagcaaaggttacgggaaggtggaagtag

SEQ ID NO: 298918 - DNA, 600 bp, Artificial Sequence
  derived and/or modified sequence
atgtcagatattgaggaggtggtggaagagtatgaagaagaaatggcggctccccaacatcaggaagaagccgctgaagaagatgccgaagctgaagccgagacagaagagacccgggctgaagacgaagaagaagaggaagccaaggaagcggaagacggaccaatggaagagagcaagcctaagccaaggtcctttatgcctaatctggtgcctccaaaaattcctgacggcgaacgtgttgatttcgatgacatacaccggaagaggatggagaaagacctgaatgaactccaggcactgatagaggcccatttcgagaacagaaagaaggaggaggaggagctcgtctctctgaaagataggatcgaacgtagaagagccgagagagcagaacagcaaagaatcaggaacgaaagggaaaaggagcggcagaataggctggcagaggaaagagcaagaagggaagaagaagagaatcgcaggaaagcagaggacgaggcgcgaaaaaagaaggcactgagcaatatgatgcactttggtggctatatccaaaagcatccacccgaccgagctgagaaatgggaggaggctgactag

SEQ ID NO: 298919 - DNA, 876 bp, Artificial Sequence
  derived and/or modified sequence
atgtccgacattgaggaggttgtggaagagtatgaggaggaatatctggagcacgccgaagcagcagtcgaggagcaggaagaggccgctgaggaagatgcagaggccgaggctgagaccgaggagactcgggctgaagaagacgaggaagaggaggaagctaaggaagctgaggacggacctatggaggaaagcaagcccaaacccaggtcattcatgcccaacctggtgcccccaaaaatcccagatggcgagagggtcgactttgatgatattcaccgcaagcgcatggaaaaagatttaaacgagctgcaggccctgatcgaggcccacttcgagaatcgcaagaaggaagaggaggaactggtcagcctgaaggaccgtattgagaggcggagagcagagagagcggaacagcagcgcatcaggaacgaacgggagaaggagcgccagaaccgcctggctgaggagagggcccgtagggaggaagaggagaaccggcgaaaagcggaagatgaagctcggaaaaaaaaggccttaagcaacatgatgcactttgggggttatattcagaaacataccctgcagacagagaggaaatcaggcaaaagacagaccgaaagggagaagaaaaagaagatcctggccgaacgcaggaaggtcctggccatcgaccatctcaatgaggaccagctaagagagaaggccaaagagctctggcagtccatctataacctggaggcggagaagttcgatttgcaagagaaatttaaacaacagaaatacgagattaacgtgctacgtaatcgaataaatgacaaccagaaggtgagcaagacaaggggtaaagccaaggttacagggcgatggaagtag

SEQ ID NO: 298920 - DNA, 1078 bp, Artificial Sequence
  derived and/or modified sequence
atgtctgacatagaagaggtggtggaagagtacgaggaggagcaccccgaggaagaggaggactggagagaggacgaagacgagcaggaggaggcagcggaagaggatgctgaagcagaggctgagaccgaggagaccagggcagaagaagatgaagaagaagaggaagcaaaggaggctgaagatggcccaatggaggagtccaaaccaaagcccaggtcgttcatgcccaacttggtgcctcccaagatccccgatggagagagagtggactttgatgacatccaccggaagcgcatggagaaggacctgaatgagttgcaggcgctgatcgaggctcactttgagaacaggaagaaagaggaggaggagctcgtttctctcaaagacaggatcgagagacgtcgggcagagcgggccgagcagcagcgcatccggaatgagcgggagaaggagcggcagaaccgcctggctgaagagagggctcgacgagaggaggaggagaacaggaggaaggctgaggatgaggcccggaagaagaaggctttgtccaacatgatgcattttgggggttacatccagaagcaggcccagacagagcggaaaagtgggaagaggcagactgagcgggaaaagaagaagaagattctggctgagaggaggaaggtgctggccattgaccacctgaatgaagatcagctgagggagaaggccaaggagctgtggcagagcatctataacttggaggcagagaagttcgacctgcaggagaagttcaagcagcagaaatatgagatcaatgttctccgaaacaggatcaacgataaccagaaagtctccaagacccgcgggaaggctaaagtcaccgggcgctggaaatagagcctggcctccttcaccaaagatctgctcctcgctcgcacctgcctccggcctgcactcccccagttcccgggccctcctgggcaccccaggcagctcctgtttggaaatggggagctggcctaggtgggagccaccactcctgcctgcccccacacccactccacaccagtaataaaaagccaccacacactga

SEQ ID NO: 298921 - DNA, 1141 bp, Artificial Sequence
  derived and/or modified sequence
ccccgctgagactgagcagacgcctccaggatctgtcggcagctgctgttctgagggagagcagagaccatgtctgacatagaagaggtggtggaagagtacgaggaggagtatctggagcatgcagaagcagctgttgaagagcaggaggaggcagcggaagaggatgctgaagcagaggctgagaccgaggagaccagggcagaagaagatgaagaagaagaggaagcaaaggaggctgaagatggcccaatggaggagtccaaaccaaagcccaggtcgttcatgcccaacttggtgcctcccaagatccccgatggagagagagtggactttgatgacatccaccggaagcgcatggagaaggacctgaatgagttgcaggcgctgatcgaggctcactttgagaacaggaagaaagaggaggaggagctcgtttctctcaaagacaggatcgagagacgtcgggcagagcgggccgagcagcagcgcatccggaatgagcgggagaaggagcggcagaaccgcctggctgaagagagggctcgacgagaggaggaggagaacaggaggaaggctgaggatgaggcccggaagaagaaggctttgtccaacatgatgcattttgggggttacatccagaagcacaccctccagacagagcggaaaagtgggaagaggcagactgagcgggaaaagaagaagaagattctggctgagaggaggaaggtgctggccattgaccacctgaatgaagatcagctgagggagaaggccaaggagctgtggcagagcatctataacttggaggcagagaagttcgacctgcaggagaagttcaagcagcagaaatatgagatcaatgttctccgaaacaggatcaacgataaccagaaagtctccaagacccgcgggaaggctaaagtcaccgggcgctggaaatagagcctggcctccttcaccaaagatctgctcctcgctcgcacctgcctccggcctgcactcccccagttcccgggccctcctgggcaccccaggcagctcctgtttggaaatggggagctggcctaggtgggagccaccactcctgcctgcccccacacccactccacaccagtaataaaaagccaccacacactga

SEQ ID NO: 298922 - protein, 1358 aa, Artificial Sequence
  derived and/or modified sequence
MGADGETVVLKNMLIGINLILLGSMIKPSECQLEVTTERVQRQSVEEEGGIANYNTSSKEQPVVFNHVYNINVPLDNLCSSGLEASAEQEVSAEDETLAEYMGQTSDHESQVTFTHRINFPKKACPCASSAQVLQELLSRIEMLEREVSVLRDQCNANCCQESAATGQLDYIPHCSGHGNFSFESCGCICNEGWFGKNCSEPYCPLGCSSRGVCVDGQCICDSEYSGDDCSELRCPTDCSSRGLCVDGECVCEEPYTGEDCRELRCPGDCSGKGRCANGTCLCEEGYVGEDCGQRQCLNACSGRGQCEEGLCVCEEGYQGPDCSAVAPPEDLRVAGISDRSIELEWDGPMAVTEYVISYQPTALGGLQLQQRVPGDWSGVTITELEPGLTYNISVYAVISNILSLPITAKVATHLSTPQGLQFKTITETTVEVQWEPFSFSFDGWEISFIPKNNEGGVIAQVPSDVTSFNQTGLKPGEEYIVNVVALKEQARSPPTSASVSTVIDGPTQILVRDVSDTVAFVEWIPPRAKVDFILLKYGLVGGEGGRTTFRLQPPLSQYSVQALRPGSRYEVSVSAVRGTNESDSATTQFTTEIDAPKNLRVGSRTATSLDLEWDNSEAEVQEYKVVYSTLAGEQYHEVLVPRGIGPTTRATLTDLVPGTEYGVGISAVMNSQQSVPATMNARTELDSPRDLMVTASSETSISLIWTKASGPIDHYRITFTPSSGIASEVTVPKDRTSYTLTDLEPGAEYIISVTAERGRQQSLESTVDAFTGFRPISHLHFSHVTSSSVNITWSDPSPPADRLILNYSPRDEEEEMMEVSLDATKRHAVLMGLQPATEYIVNLVAVHGTVTSEPIVGSITTGIDPPKDITISNVTKDSVMVSWSPPVASFDYYRVSYRPTQVGRLDSSVVPNTVTEFTITRLNPATEYEISLNSVRGREESERICTLVHTAMDNPVDLIATNITPTEALLQWKAPVGEVENYVIVLTHFAVAGETILVDGVSEEFRLVDLLPSTHYTATMYATNGPLTSGTISTNFSTLLDPPANLTASEVTRQSALISWQPPRAEIENYVLTYKSTDGSRKELIVDAEDTWIRLEGLLENTDYTVLLQAAQDTTWSSITSTAFTTGGRVFPHPQDCAQHLMNGDTLSGVYPIFLNGELSQKLQVYCDMTTDGGGWIVFQRRQNGQTDFFRKWADYRVGFGNVEDEFWLGLDNIHRITSQGRYELRVDMRDGQEAAFASYDRFSVEDSRNLYKLRIGSYNGTAGDSLSYHQGRPFSTEDRDNDVAVTNCAMSYKGAWWYKNCHRTNLNGKYGESRHSQGINWYHWKGHEFSIPFVEMKMRPYNHRLMAGRKRQSLQF

SEQ ID NO: 298923 - DNA, 4077 bp, Artificial Sequence
  derived and/or modified sequence
atgggcgccgacggcgagaccgtggtgctgaagaacatgctgatcggcatcaacctgatcctgctgggcagcatgatcaagcccagcgagtgccagctggaggtgaccaccgagagagtgcagagacagagcgtggaggaggagggcggcatcgccaactacaacaccagcagcaaggagcagcccgtggtgttcaaccacgtgtacaacatcaacgtgcccctggacaacctgtgcagcagcggcctggaggccagcgccgagcaggaggtgagcgccgaggacgagaccctggccgagtacatgggccagaccagcgaccacgagagccaggtgaccttcacccacagaatcaacttccccaagaaggcctgcccctgcgccagcagcgcccaggtgctgcaggagctgctgagcagaatcgagatgctggagagagaggtgagcgtgctgagagaccagtgcaacgccaactgctgccaggagagcgccgccaccggccagctggactacatcccccactgcagcggccacggcaacttcagcttcgagagctgcggctgcatctgcaacgagggctggttcggcaagaactgcagcgagccctactgccccctgggctgcagcagcagaggcgtgtgcgtggacggccagtgcatctgcgacagcgagtacagcggcgacgactgcagcgagctgagatgccccaccgactgcagcagcagaggcctgtgcgtggacggcgagtgcgtgtgcgaggagccctacaccggcgaggactgcagagagctgagatgccccggcgactgcagcggcaagggcagatgcgccaacggcacctgcctgtgcgaggagggctacgtgggcgaggactgcggccagagacagtgcctgaacgcctgcagcggcagaggccagtgcgaggagggcctgtgcgtgtgcgaggagggctaccagggccccgactgcagcgccgtggccccccccgaggacctgagagtggccggcatcagcgacagaagcatcgagctggagtgggacggccccatggccgtgaccgagtacgtgatcagctaccagcccaccgccctgggcggcctgcagctgcagcagagagtgcccggcgactggagcggcgtgaccatcaccgagctggagcccggcctgacctacaacatcagcgtgtacgccgtgatcagcaacatcctgagcctgcccatcaccgccaaggtggccacccacctgagcaccccccagggcctgcagttcaagaccatcaccgagaccaccgtggaggtgcagtgggagcccttcagcttcagcttcgacggctgggagatcagcttcatccccaagaacaacgagggcggcgtgatcgcccaggtgcccagcgacgtgaccagcttcaaccagaccggcctgaagcccggcgaggagtacatcgtgaacgtggtggccctgaaggagcaggccagaagcccccccaccagcgccagcgtgagcaccgtgatcgacggccccacccagatcctggtgagagacgtgagcgacaccgtggccttcgtggagtggatcccccccagagccaaggtggacttcatcctgctgaagtacggcctggtgggcggcgagggcggcagaaccaccttcagactgcagccccccctgagccagtacagcgtgcaggccctgagacccggcagcagatacgaggtgagcgtgagcgccgtgagaggcaccaacgagagcgacagcgccaccacccagttcaccaccgagatcgacgcccccaagaacctgagagtgggcagcagaaccgccaccagcctggacctggagtgggacaacagcgaggccgaggtgcaggagtacaaggtggtgtacagcaccctggccggcgagcagtaccacgaggtgctggtgcccagaggcatcggccccaccaccagagccaccctgaccgacctggtgcccggcaccgagtacggcgtgggcatcagcgccgtgatgaacagccagcagagcgtgcccgccaccatgaacgccagaaccgagctggacagccccagagacctgatggtgaccgccagcagcgagaccagcatcagcctgatctggaccaaggccagcggccccatcgaccactacagaatcaccttcacccccagcagcggcatcgccagcgaggtgaccgtgcccaaggacagaaccagctacaccctgaccgacctggagcccggcgccgagtacatcatcagcgtgaccgccgagagaggcagacagcagagcctggagagcaccgtggacgccttcaccggcttcagacccatcagccacctgcacttcagccacgtgaccagcagcagcgtgaacatcacctggagcgaccccagcccccccgccgacagactgatcctgaactacagccccagagacgaggaggaggagatgatggaggtgagcctggacgccaccaagagacacgccgtgctgatgggcctgcagcccgccaccgagtacatcgtgaacctggtggccgtgcacggcaccgtgaccagcgagcccatcgtgggcagcatcaccaccggcatcgacccccccaaggacatcaccatcagcaacgtgaccaaggacagcgtgatggtgagctggagcccccccgtggccagcttcgactactacagagtgagctacagacccacccaggtgggcagactggacagcagcgtggtgcccaacaccgtgaccgagttcaccatcaccagactgaaccccgccaccgagtacgagatcagcctgaacagcgtgagaggcagagaggagagcgagagaatctgcaccctggtgcacaccgccatggacaaccccgtggacctgatcgccaccaacatcacccccaccgaggccctgctgcagtggaaggcccccgtgggcgaggtggagaactacgtgatcgtgctgacccacttcgccgtggccggcgagaccatcctggtggacggcgtgagcgaggagttcagactggtggacctgctgcccagcacccactacaccgccaccatgtacgccaccaacggccccctgaccagcggcaccatcagcaccaacttcagcaccctgctggacccccccgccaacctgaccgccagcgaggtgaccagacagagcgccctgatcagctggcagccccccagagccgagatcgagaactacgtgctgacctacaagagcaccgacggcagcagaaaggagctgatcgtggacgccgaggacacctggatcagactggagggcctgctggagaacaccgactacaccgtgctgctgcaggccgcccaggacaccacctggagcagcatcaccagcaccgccttcaccaccggcggcagagtgttcccccacccccaggactgcgcccagcacctgatgaacggcgacaccctgagcggcgtgtaccccatcttcctgaacggcgagctgagccagaagctgcaggtgtactgcgacatgaccaccgacggcggcggctggatcgtgttccagagaagacagaacggccagaccgacttcttcagaaagtgggccgactacagagtgggcttcggcaacgtggaggacgagttctggctgggcctggacaacatccacagaatcaccagccagggcagatacgagctgagagtggacatgagagacggccaggaggccgccttcgccagctacgacagattcagcgtggaggacagcagaaacctgtacaagctgagaatcggcagctacaacggcaccgccggcgacagcctgagctaccaccagggcagacccttcagcaccgaggacagagacaacgacgtggccgtgaccaactgcgccatgagctacaagggcgcctggtggtacaagaactgccacagaaccaacctgaacggcaagtacggcgagagcagacacagccagggcatcaactggtaccactggaagggccacgagttcagcatccccttcgtggagatgaagatgagaccctacaaccacagactgatggccggcagaaagagacagagcctgcagttctag

SEQ ID NO: 298924 - DNA, 4077 bp, Artificial Sequence
  derived and/or modified sequence
atgggcgcggacggagagaccgtcgtgctgaagaacatgctgatcggaataaatcttatcctcttgggcagcatgataaagccatccgagtgccagcttgaggtgaccaccgagcgtgtgcagagacagtctgtggaggaggaggggggcatcgcaaactataataccagcagcaaggaacaaccggtcgtcttcaaccatgtgtacaacatcaacgtgccactcgacaatctctgtagctcgggcctggaagctagcgcagagcaggaggtgagtgcggaggatgaaactctggctgaatacatggggcagacatcagatcatgagtcacaggtcacttttacacaccgtattaatttcccaaagaaggcttgcccttgcgccagcagcgcccaagttctgcaggagcttttgagccgtatcgagatgcttgagcgcgaggtatcagtactgagggaccaatgcaatgccaactgttgccaggagagcgccgctacaggacagttggattacattccccattgtagtggtcacggtaacttcagttttgaatcctgcggctgcatatgcaatgaaggatggttcggaaagaattgctcagagccctactgccctttggggtgcagttctaggggcgtttgcgtcgatggtcagtgtatctgcgattctgagtactcaggagatgactgttcagagttgagatgccctacggactgctcctcacgcggcctctgtgttgatggcgaatgcgtctgcgaagagccatacaccggcgaggattgtcgggaattgcgctgtccgggcgactgttcaggcaagggcaggtgcgccaacggaacttgcttgtgtgaggagggttacgtgggggaggattgcggtcagcgccaatgtctgaatgcgtgttcaggccgtgggcagtgcgaggaggggttatgcgtgtgtgaggaagggtaccaaggccccgattgtagtgcagttgccccccccgaagacctgagagtcgcaggcattagcgacaggagcatcgagctggagtgggatggccctatggcagtgacggaatacgtgatctcttatcagccaacggcgctgggggggcttcaacttcaacagagggtgcctggcgattggtctggtgtgaccatcaccgaactggagccggggctgacctataacatttccgtttatgcagtgataagtaacatattgtccctaccaattaccgccaaagtggccactcacctgtctactccacaggggcttcagtttaagaccattactgaaactacggtggaggtccaatgggagccttttagcttctccttcgacggctgggaaataagtttcatcccaaaaaacaatgaagggggtgtgatcgcgcaggtgccttcagatgtcaccagcttcaaccaaacaggactgaagccaggcgaggagtacatcgtaaatgttgtggcattgaaggagcaggccaggagccctccgactagcgccagcgtgagcactgtaatagatggtccgacgcagatactggtgagagatgtgtcagacaccgtggcattcgtagaatggattcctcctcgtgcaaaggtggatttcatactgctgaagtatgggctggtggggggggaagggggcagaaccaccttccgcctccagcctccactctcccagtattccgtacaggctctgcgtccaggtagcaggtatgaggtctcagtgagcgcagtgcggggcacaaacgagtccgactcggcaactacccagttcacgacggagatcgacgctccaaagaatctgcgagtggggtctcggacggcgacatcgctagacctcgaatgggataactcagaagctgaggtccaggaatacaaggttgtttatagcacattagccggagagcagtatcatgaggtgcttgtgcctcgcggaatcggaccgacaactagggccactttgaccgacttggtgccgggtacggaatacggtgtgggcatttccgctgtgatgaactctcagcagtctgtaccagctacgatgaacgctcgaactgagctcgactcccctcgcgatttaatggtcactgcaagctccgagacctccatctcgcttatttggaccaaggcttcaggccctatcgaccactacaggatcacctttaccccctcaagcggaatcgccagtgaggtaaccgtccccaaagaccgcacttcatataccttgactgatctggagccaggggccgaatatataatctctgtcactgccgaaagagggcggcaacagagtctggagtccaccgtcgacgccttcaccggcttccgccccataagccatctgcacttctctcacgtgactagctccagtgtgaacatcacctggtcagatccttcccctcctgccgatcgcctcattctcaactacagccctagagacgaagaggaggagatgatggaggtcagcctagacgcaacaaagcggcatgctgtcttaatgggtttgcagcccgcaaccgagtatattgtgaacctcgtcgcggtgcacggaaccgtgacatctgagccgatcgtgggctcaatcacaacaggaatagatccccctaaggacatcaccatctcaaacgttacaaaagactccgttatggtctcctggtccccccccgtagcaagctttgattactaccgagtttcttatcggcctacccaggttgggaggctcgactctagcgtcgttccaaataccgtgaccgagttcacaattactcggctaaatcctgccactgagtatgagatctcactgaacagcgtgaggggaagggaggagagcgagcggatatgtactctggtgcataccgcaatggacaaccccgtggacctcatcgccacaaacattacccctacagaagctctgctccagtggaaagctccagttggggaagtcgagaattatgttatcgtgttgacccatttcgctgtcgccggcgaaacaatcttggttgacggagtttcagaggagttccgcttagtggatctcctgccatcgacgcactataccgctacaatgtatgctacaaatggcccactgacaagcgggaccatctccacaaacttttcgacactcctcgacccacctgccaatctgaccgcttccgaggtgaccagacagtcagctctgatctcatggcaaccgccacgcgcagagatagagaactatgtgctgacttacaagtccacagatgggtcacgaaaagaactgatcgtcgacgcagaggacacctggattcgtctcgaagggctactggaaaacaccgattacactgtactgctccaggctgcacaggacaccacgtggtctagtattaccagcacagcctttacaaccgggggtcgcgtgtttcctcatcctcaggactgcgcgcaacatttgatgaatggagacacactctcgggggtatatcccatcttccttaatggggagctctcacagaaacttcaggtctattgcgatatgactacagacggtggtggatggattgtgtttcaaaggagacaaaatgggcagacagacttcttcaggaaatgggctgattatagggtcgggttcgggaacgtcgaggatgaattctggcttggcttggataacatccatcgtatcacgagtcaaggtcgctatgagttgcgagtggatatgcgagacgggcaagaggcagcttttgctagctatgaccgattcagcgtcgaggatagtagaaacctctacaagctgcgcatcgggagctacaatggaaccgccggcgattctcttagttaccaccaagggcgacctttttcaactgaagatcgagacaacgatgtggcagtgaccaactgcgccatgagttacaagggcgcctggtggtataaaaactgccataggaccaacctgaacggaaaatatggagaatccagacacagtcagggcatcaactggtaccactggaaaggtcatgaattctcgatcccctttgtcgaaatgaaaatgaggccttacaaccaccggctgatggccggccggaaacggcagagccttcaattctag

SEQ ID NO: 298925 - DNA, 4077 bp, Artificial Sequence
  derived and/or modified sequence
atgggcgccgacggagaaaccgtagtgcttaaaaatatgctgatcggcatcaatcttatcttgctgggatcaatgattaaaccatcagagtgtcaactggaggtgaccaccgagcgtgttcagcgccaatccgtcgaggaggaggggggcatcgccaactataacacctccagtaaagagcagcctgtcgtgtttaatcatgtatacaacattaatgtaccacttgataatctctgttcgtcgggcctggaggcatcagccgaacaggaagtgtcagcagaggacgagacacttgcagagtacatggggcagaccagtgatcacgagtctcaggtcaccttcacacaccggatcaactttcccaagaaagcatgtccctgtgcatccagtgcccaggtgctccaagaactgctttctcgcatagagatgttggagcgagaagtcagtgtccttcgcgaccaatgtaatgctaattgttgtcaggaaagtgccgccactgggcagctggattatatcccccattgttctggacatggtaacttttcattcgagagttgtggctgcatctgcaatgagggatggttcggcaaaaattgctcggagccatattgccctctcgggtgcagttcccggggtgtgtgtgtggacgggcagtgcatctgcgactctgagtacagcggcgatgattgttctgagctgaggtgcccaactgactgttcatcccgaggcctctgtgtagatggggagtgcgtttgcgaggaaccctacactggcgaagattgcagagaactgcggtgccctggggattgctccggtaaaggcaggtgtgctaatggtacatgtctatgtgaggaagggtacgtgggcgaagactgcggccagagacagtgcttaaacgcatgctctggacggggccaatgtgaagaaggactgtgtgtatgtgaagaaggctatcagggcccagactgttccgccgtagcgcccccagaagacctgcgggtggccggcattagtgatcgcagcatcgagttggagtgggacggccccatggccgtcactgaatatgtgatttcgtaccagcctacagccctggggggtctacagttgcagcagagggtacctggagactggtcaggagtgacaattacagaactggaaccagggttgacttacaacatttcagtctatgcggttatatcgaatatcctttctcttcccatcacggctaaggtggctacacacctatcgacacctcaagggctgcagttcaaaacaataacagaaactaccgtggaggtccaatgggagcctttctcatttagttttgacggatgggagatttcattcatacccaaaaacaatgagggaggcgttatcgcccaggtgccctcagacgtcacatcttttaatcagaccgggctcaagccaggggaggaatatatagtgaatgtggtggctttgaaggagcaggcacgatctcccccaacatcagcctccgtttccacagtcatagacgggccgactcagattctggtgcgtgacgtgagcgacactgtagcattcgtggaatggatcccaccacgagctaaagtagatttcatcctcctgaagtacgggttagtgggtggggagggcggaaggactaccttcagactgcaaccacctctctcacagtactctgtacaggctctaaggccaggctctcggtacgaggtgagcgtgtctgccgtaagaggcactaatgagtctgattctgcaactacgcaatttacaactgagatcgatgctcctaagaaccttagggtcgggtcccgcacggccaccagtctagatctcgaatgggataactccgaggcagaagtgcaggagtacaaggttgtctactccacgctggcgggggaacagtaccacgaggtcctcgtacctagaggcatcggccctacaactcgagctaccctgactgacctggtgccagggaccgagtatggagtcggcatatcagctgtgatgaactctcagcaatctgtgcccgcgactatgaatgctaggactgagctggacagcccgagggatctcatggtaactgcctcctccgaaacctccatttctcttatctggaccaaggctagtggccctatcgaccattaccgaataacatttaccccctcatcaggaattgctagcgaagttactgttccgaaagataggacatcctacactctcacagatcttgaaccaggagctgagtacatcatctcagtgacggctgaaagaggccgtcaacagtccttggagtccaccgtagacgccttcacaggattccgtccaatcagccacctgcattttagtcatgtcacctcctcttcagttaacatcacatggtctgatccttcaccccccgcagatagactaatcttgaactattcgcccagggacgaggaggaggagatgatggaagttagcctcgacgcaactaagcggcacgccgtgctgatgggactccaacctgctacagagtacattgtgaatctggtcgcagtccatggtacggtcacaagcgagcccatcgtggggagcatcactacaggcatcgaccctcccaaagatatcaccatcagcaacgttaccaaggactccgtgatggtctcatggagcccacccgtggcctcattcgattactatcgagtgtcttaccgaccaactcaagtggggaggctcgatagctctgtggtgcccaatactgtgacggaattcaccatcactcggcttaatcccgccaccgagtatgaaatttcccttaattcggttagaggacgcgaggagtccgaaagaatctgtaccttagttcacaccgccatggacaatcctgtagatctcatcgctactaacattaccccaaccgaggccctgctccagtggaaagcccccgttggagaagttgaaaactacgtcatcgtgctgacacatttcgcagtggccggtgaaacaatcttggtagacggcgtatccgaggaatttagactcgtggatctactgccatccacacactacacagccactatgtacgccacaaacggccctctgactagcggaaccatttctaccaatttcagcaccctcctcgatccacctgccaatctgacagctagcgaagtgacccgtcagtccgccttgattagctggcagcccccccgggctgaaatagagaattacgttctcacctacaagtcaactgatggttcccgcaaggaactgattgttgatgcagaagatacttggataagactggaggggctgttagagaacactgactacaccgtcctgctccaggcagcccaggacacgacttggagctctataacctctaccgcctttacaaccggcggcagagttttcccacatccacaggattgcgcccaacacttgatgaatggagacacactgagtggagtttatcccattttcctcaacggggaactctcgcaaaagctccaggtctactgcgacatgaccaccgacgggggcggctggatcgtgttccaacgcagacagaacggacagaccgatttttttaggaaatgggccgattaccgcgtcggattcggcaacgtagaagacgagttttggctgggccttgacaatattcatcgcattacctcgcagggccgttatgagctgcgcgtggatatgcgagatggtcaggaagctgcgtttgcctcatacgaccgcttctctgtggaagatagtagaaacctgtacaaactcaggattggatcctacaatgggaccgcaggagacagcctctcctatcatcaagggaggcccttcagtaccgaggatcgggataacgacgtcgccgtcacaaattgcgccatgagttataagggcgcctggtggtataagaattgtcaccgcaccaatctgaatggaaaatacggcgaaagcagacattcacagggaatcaattggtatcactggaagggacacgaattttctatccctttcgtggaaatgaaaatgcgaccgtataaccaccgtctaatggctggtagaaaaagacagtctttacagttctag

SEQ ID NO: 298926 - DNA, 4077 bp, Artificial Sequence
  derived and/or modified sequence
atgggcgcagatggagaaacagtggtgctgaagaacatgctgattggcatcaacctgatcctgctgggctccatgatcaagcccagcgagtgccagctggaggtgaccacagagcgggtgcagaggcagagcgtggaggaggagggcggcatcgccaactacaacaccagcagcaaggagcagcctgtggtgttcaaccacgtgtacaacatcaacgtgcccctggacaacctgtgcagcagcggcctggaggccagcgctgagcaggaggtgtctgcagaagatgagaccctggccgagtacatgggccagaccagtgaccacgagagccaggtgaccttcacccaccgcatcaacttccccaagaaggcctgcccctgtgccagcagcgcccaggtgctgcaggagctgctgagcagaattgagatgctggagcgggaggtgtctgtgctgcgggaccagtgcaatgccaactgctgccaggagagcgctgccaccggccagctggactacatcccccactgcagcggccacggcaacttctcctttgagagctgtggctgcatctgcaatgaaggctggtttgggaagaactgcagcgagccctactgccccctgggctgcagcagccggggcgtgtgtgtggatggccagtgcatctgtgacagcgagtacagcggagatgactgcagcgagctgcgctgccccacagactgcagcagccggggcctgtgtgtggatggagaatgtgtgtgtgaggagccctacacaggagaggactgccgggagctgcgctgccctggggactgcagcggcaagggccgctgtgccaacggcacctgcctgtgtgaggagggctacgtgggggaggactgtggccagaggcagtgcctgaatgcctgcagcggccggggccagtgtgaggagggcctgtgtgtgtgtgaggagggctaccagggccctgactgcagcgctgtggcccctcctgaggacctgcgggtggccggcatcagtgacaggagcattgagctggagtgggatggccccatggctgtgacagaatatgtgatctcctaccagcccacagccctgggcggcctgcagctgcagcagagggtgcctggggactggagcggcgtgaccatcacagagctggagcccggcctgacctacaacatctctgtgtatgctgtgatcagcaacatcctgagcctgcccatcacagccaaggtggccacccacctgagcaccccccagggcctgcagttcaagaccatcacagagaccaccgtggaggtgcagtgggagcccttctccttctcctttgatggctgggagatctccttcatccccaagaacaatgaaggaggagtgattgcccaggtgcccagtgatgtgaccagcttcaaccagacaggcctgaagccaggagaggagtacatcgtgaatgtggtggccctgaaggagcaggcccggagcccccccaccagcgcctctgtgtccacagtgattgatggccccacccagatcctggtgagagatgtgtctgacacagtggcctttgtggagtggatccccccccgggccaaggtggacttcatcctgctgaagtatggcctggtgggcggggagggcggccgcaccaccttccggctgcagccccccctgagccagtacagcgtgcaggccctgcggcccggcagccgctatgaggtgtctgtgtctgctgtgcggggcaccaatgaaagtgacagcgccaccacccagttcaccacagaaattgatgcccccaagaacctgcgggtgggcagcaggacagccaccagcctggacctggagtgggacaacagcgaggccgaggtgcaggagtacaaggtggtgtacagcaccctggccggggagcagtaccacgaggtgctggtgccccggggcatcggccccaccacccgggccaccctgacagacctggtgcccggcacagaatatggagtgggcatctctgctgtgatgaacagccagcagagcgtgcctgccaccatgaatgccaggacagagctggacagcccccgggacctgatggtgacagccagcagcgagaccagcatcagcctcatctggaccaaggccagcggccccatcgaccactaccgcatcaccttcacccccagcagcggcatcgccagcgaggtgacagtgcccaaggacaggaccagctacaccctgacagacctggagcccggggctgagtacatcatctctgtgacagctgagcggggccggcagcagagcctggagagcacagtggatgccttcaccggcttccggcccatcagccacctgcacttcagccacgtgaccagcagctctgtgaacatcacctggagcgaccccagccccccagctgacaggctcatcctgaactacagccccagagatgaggaggaggagatgatggaggtgtccctggatgccaccaagagacatgctgtgctgatgggcctgcagcctgccacagagtacatcgtgaacctggtggccgtgcacggcaccgtgaccagcgagcccatcgtgggcagcatcaccaccggcatcgacccccccaaggacatcaccatcagcaatgtgaccaaggacagcgtgatggtgtcctggagcccccctgtggccagctttgactactacagagtgtcctaccggcccacccaggtgggccgcctggacagctctgtggtgcccaacacagtgacagagttcaccatcacccggctgaacccagccacagaatatgagatcagcctgaacagcgtgcggggccgggaggagagcgagcgcatctgcaccctggtgcacacagccatggacaaccctgtggacctgattgccaccaacatcacccccacagaggccctgctgcagtggaaggcccctgtgggggaggtggagaactacgtgattgtgctgacccactttgctgtggccggggagaccatcctggtggatggagtgtctgaggagttccggctggtggacctgctgcccagcacccactacacagccaccatgtatgccaccaacggccccctgaccagcggcaccatcagcaccaacttcagcaccctgctggaccccccagccaacctgacagccagcgaggtgacccggcagagcgccctgatctcctggcagccccccagggctgagattgaaaattatgtgctgacctacaagagcacagatggcagcaggaaggagctgattgtggatgctgaggacacctggatccggctggagggcctgctggagaacacagactacacagtgctgctgcaggccgcccaggacaccacctggagcagcatcaccagcacagccttcaccactggaggccgggtcttcccccacccccaggactgtgcccagcacctgatgaatggagacaccctgtctggagtgtaccccatcttcctgaatggagagctgagccagaagctgcaggtgtactgtgacatgaccacagatggcggcggctggatcgtgttccagaggcggcagaatggccagacagacttcttcaggaagtgggccgactacagagtgggctttggaaatgtggaggatgagttctggctgggcctggacaacatccaccgcatcaccagccagggccgctatgagctgcgggtggacatgagagatggccaggaggccgcctttgccagctatgaccgcttctctgtggaggacagcaggaacctgtacaagctgagaattggcagctacaatggaacagctggggacagcctgagctaccaccagggccggcccttcagcacagaagatcgggacaatgatgtggccgtgaccaactgtgccatgagctacaagggggcctggtggtacaagaactgccacaggaccaacctgaatggcaagtacggggagagccgccacagccagggcatcaactggtaccactggaagggccacgagttcagcatcccctttgtggagatgaagatgaggccctacaaccaccggctgatggccggcaggaagaggcagagcctgcagttctag

SEQ ID NO: 298927 - DNA, 4077 bp, Artificial Sequence
  derived and/or modified sequence
atgggcgccgacggcgagaccgtggtgctgaagaacatgctgatcggaattaaccttattcttctggggtccatgatcaaaccttcagagtgccaactggaagtgacaacagaacgtgtgcaacgtcagagtgtggaagaagaaggcggaatcgctaattataatacatctagcaaagagcaacctgtggtcttcaatcacgtgtataacatcaacgtgccactggataatctctgctcctctgggttggaggccagtgcagagcaggaggtttcagctgaggacgagacactggccgagtacatgggacagacatcggaccatgagagccaggttactttcacacatcgcatcaacttccccaagaaggcgtgtccgtgtgcttcaagtgcgcaggtgctgcaggagctcctgtcaagaatcgagatgctggaacgggaggttagtgtgctgagagatcaatgcaacgctaattgttgccaagagagcgccgctaccgggcaactggattatattccccactgttccgggcacggtaacttttcctttgaatcatgtggatgtatttgcaacgaaggttggttcgggaagaattgttctgaaccttactgtcccctaggctgcagctcccgcggggtgtgtgtggacgggcagtgtatttgtgactctgaatattccggtgatgattgtagcgagctgagatgccctaccgactgtagctcaaggggtctttgtgtggacggcgagtgtgtgtgtgaggagccatatacaggggaggattgtcgggagctcagatgtcctggcgattgtagcggaaagggtcgatgtgccaatgggacctgcctttgtgaggaagggtatgtgggcgaggactgtgggcaaaggcaatgtttgaacgcttgcagcgggagaggacaatgcgaggaggggctgtgtgtgtgtgaggaagggtaccagggcccagattgctccgccgtcgcccccccggaggatcttcgcgttgcggggataagcgatcggtccatagaactggagtgggacggtcctatggctgtcaccgagtacgtgatttcttatcaacctaccgcactgggcggactgcagctccagcagagggttcctggtgattggtcaggagtgactataactgagctggaacctggcttaacttataatatctctgtgtacgctgtcataagcaacatcctctccctgccgatcacggctaaggtcgccactcacctgtccacaccacagggtcttcagtttaagacaattaccgaaactactgttgaggtacagtgggaaccgttcagttttagttttgacggctgggagatttccttcatccctaaaaacaatgaaggaggagtaattgctcaggtcccgagcgatgtgacgagcttcaaccagaccgggctgaagcccggggaagagtatatcgtcaacgttgttgcattaaaagagcaggctcgctcaccacccacctccgcctcagtatccaccgttattgacgggccaacacagatcctggtccgagatgtgtccgacactgtggccttcgtggaatggatccctccacgtgctaaggtggactttatcttgctaaaatacggtcttgtggggggcgagggcggtaggaccacctttagactccagccacctctatcgcagtattctgtgcaagctctgaggccgggatcccgctacgaggtgtctgttagtgccgtccgcggcacaaatgaatccgatagtgccacaacccagtttacaacagagatcgacgctcccaagaacctgagagtcgggtctcggaccgcaacctcactggatctggaatgggataactctgaggccgaagtacaggagtataaagttgtgtatagcactttagctggtgagcagtatcacgaagtgctggtgccccgaggtataggacccaccaccagggccacacttactgatctagttccaggaactgaatatggcgtaggcatcagtgctgtgatgaattctcagcagtccgtgcctgcgactatgaacgccaggaccgaactggactccccccgtgatttgatggtgacagctagctccgaaacttctatctcactcatatggacaaaggctagcggacctatcgaccattaccgaataacgttcacccctagttcgggcattgcctctgaggtaacagtgcctaaagatagaacaagctacaccttgaccgatctggaacccggggcagagtacattatctctgtgactgctgagagaggccggcagcagagtctcgagagtacggttgatgcgtttactggctttcgacctatatcccacctgcacttttcacacgtgacttcgagttctgtcaacattacttggagtgatccgtctcctccagccgaccggcttatcttaaactacagcccaagagacgaagaggaggagatgatggaagtctcccttgacgctacaaagcggcacgcggtgctgatggggctgcagcccgcgactgaatatatcgtcaacctggtggccgtgcacggcactgtgacatcagaacctatcgtcggaagcatcacaacgggcattgaccctcctaaggatatcacaattagtaacgtgacaaaggatagcgtaatggtgtcttggtccccccctgttgcaagctttgactattatagggtgtcttataggccaacccaggttggcaggcttgactcctctgtagttcccaataccgtgaccgagttcaccataacccgcctgaatcccgccaccgagtacgagatcagtctgaacagcgttaggggcagggaggaatccgagagaatatgcactcttgtgcatacagcaatggacaatcccgtagacctgattgcgacaaatatcacacccacggaagcacttctgcagtggaaggcaccggtgggagaggtcgagaactacgtaattgtgctcactcattttgcggtggctggtgagactatcctggtggacggagttagcgaggaatttcggctcgtggatttgctgccctcaacccactataccgccaccatgtacgcaaccaacggtcctctaacttctggcacaatttcaactaatttcagtaccctgctcgatccaccagcaaatctgacagcgtccgaagttacccggcagtctgcgctcattagttggcagcccccccgggccgaaatagagaactatgtgttgacatacaagtccaccgacgggtcacgcaaggagctgatcgtcgacgctgaggacacttggataaggctcgagggactgctggagaacacagactacactgtgctgctgcaggctgcccaagataccacatggtctagtataacatctaccgcttttacaaccggaggcagggtgtttccacacccccaggattgtgctcagcacctcatgaacggagacaccctctctggtgtttacccaatctttctgaatggagagctgtctcaaaaattgcaggtatattgtgatatgaccaccgatggaggtggttggatcgtatttcagagaaggcagaacggtcagacagattttttcaggaaatgggctgattacagagtgggctttgggaacgtcgaagatgagttctggcttggtctcgacaatatccataggatcacctcgcaggggaggtatgagctgcgcgtggatatgcgagatggccaggaggcagcgtttgctagttatgataggttctcagttgaagatagtagaaacctttataagctccgcatcggctcttataacgggaccgccggggacagcttgtcttaccaccagggccggcccttttccaccgaggaccgggacaatgatgtggctgtgacaaactgcgctatgagctataagggcgcatggtggtacaagaattgccaccgcacaaacctgaatggcaaatatggggaatctcgtcatagtcagggtattaactggtaccattggaaaggccacgagtttagcattccgtttgtcgagatgaagatgagaccctacaaccatcgacttatggctggtcgaaagaggcaaagcctgcagttttag

SEQ ID NO: 298928 - DNA, 4077 bp, Artificial Sequence
  derived and/or modified sequence
atgggcgccgacggcgagaccgtggtgctgaagaacatgctgatcggcattaacctcattctactagggagtatgatcaagcccagtgaatgtcaactagaagtaaccaccgagagggttcagcggcagtcagtcgaggaagagggcggaatcgcgaactataatacctctagcaaggagcaacctgtcgtgttcaaccacgtgtataacataaacgttcccttagacaacctttgcagctcggggctcgaagccagtgctgagcaggaggtctcggcagaagatgagaccctggccgagtatatgggccaaacttcagatcacgagagccaggtgactttcacacatcgaattaatttccctaaaaaggcctgcccctgtgcctcctccgcacaagtgctgcaggaacttctctcccgcatcgagatgcttgaaagagaggtttccgtcttacgtgatcagtgtaacgcaaattgttgccaggaaagtgctgctaccggccagctggattacatcccccactgtagtgggcacgggaatttttcattcgaatcctgcggatgtatttgcaacgagggatggttcggaaagaattgcagtgagccttactgccccctcggttgctcctcccgcggagtgtgtgttgatggtcagtgcatttgtgatagcgagtattctggagatgattgctcagagctgagatgccccactgattgcagtagtagaggcctgtgtgtggacggggaatgcgtttgcgaggagccctacaccggcgaagactgccgagaacttcggtgcccaggggattgcagcggaaagggtaggtgtgctaatggcacatgcctttgcgaggagggatacgtcggagaagattgcgggcaaagacaatgtctgaatgcctgctccggcagggggcaatgcgaggagggtttgtgcgtttgcgaggaaggataccagggccccgattgttctgcagtggcaccacccgaagatctgagagttgcgggcatatccgaccgttcaatcgagcttgagtgggatggacctatggcagtgaccgaatacgtgatctcttaccagcccactgccttgggaggactccagctgcagcagcgggtcccaggtgactggtccggggtcacaattacggagttggagcccgggctcacttacaacatcagcgtttacgcggttatatccaatattctatcactgcctatcaccgcaaaagtcgccacgcaccttagcacaccgcaggggttgcagttcaaaaccattacagaaaccactgtcgaagtgcagtgggagcccttttctttttctttcgatggttgggagatctcatttatcccaaaaaataatgagggaggggttattgctcaggtaccaagcgatgtcacgtcgttcaatcagaccggactgaaacccggagaagaatatattgtgaacgtggtcgcactgaaagaacaagcacgcagcccgcctaccagcgcctcagttagcaccgtgatcgacggtccaacccagatcttggttcgagatgtgagcgatacagttgctttcgttgagtggatcccacctagagcaaaggttgatttcatactgctgaagtacgggctagtaggaggtgaggggggtcggaccacctttcggcttcaaccaccattaagccagtatagcgtccaggcactcaggccaggctcacgttacgaggtttctgtcagtgcagtgcgcggcacaaatgagagcgatagtgccaccacccagtttaccactgaaatcgatgccccaaaaaacctaagagtgggctctaggaccgcaaccagcttagatctggaatgggataattcagaagccgaggtgcaagagtacaaagttgtatactccacattggcaggtgaacagtaccacgaggtgctggtccctagaggtatcggacccactacacgcgccacacttacagacctagttcccgggacagagtacggcgtggggatttcagccgttatgaatagtcaacaaagcgtgccagcgactatgaacgcaaggactgagttggattcccccagagatctcatggtcaccgcaagcagcgagacttctattagcctaatctggacaaaagcaagcgggccgattgaccactacagaatcactttcacgccctcaagcggaatcgctagcgaggttacagttcccaaggatcgcacctcctatacattgaccgatctggagccaggagcagaatacatcatttctgtgacagccgagaggggcagacagcagtcccttgagtctactgtcgatgcatttacaggcttccggccaataagtcatcttcacttctcacacgtgacctcaagctcagtgaacatcacgtggtcagacccctccccccccgctgatcgacttatcctaaattatagccctcgggacgaggaggaagagatgatggaggtctctctggatgccacgaagagacacgcggtgttgatgggcttgcagccagccactgagtacattgtgaacttggtcgcggtccatggcactgttacttccgaacccatcgtagggagtattacaaccggtatcgatccacccaaggacattactatctcgaatgtcactaaagattcggtgatggttagctggtcaccccctgtggctagctttgactactacagggtgtcgtatcgccctactcaagtggggaggttggactcctcggtggtgccaaacacagtgactgagttcacgattaccaggctcaaccctgcaaccgagtacgagatctccctgaactctgtcagaggtagggaggagtcagagagaatctgcaccctggttcacaccgccatggacaaccctgtagacctaattgccaccaacatcacccctaccgaagcactgctgcagtggaaggcacccgtgggagaagtcgaaaactatgtgatcgtcttgacacactttgcagtggccggtgagacaatcctggtagatggggtgtcggaggagtttcggctggtcgacctgctgccttccacccactatacagcgactatgtatgctaccaatgggcccctgacctccggaacaatttccacaaacttctccaccctcttagatcccccggctaacttgacagcgtccgaggtgacccgacagagtgccctgatatcctggcagccaccccgcgccgagatagagaactacgtgctcacctacaagtctactgatggcagtcggaaggaactcatcgtggacgccgaggatacctggatacgcttagaaggacttcttgagaacactgattacactgtcctgcttcaggccgcacaggatacaacgtggagcagcattacctccacagcctttacgaccggcggaagggtgttcccacatccacaggactgtgcccagcatcttatgaacggtgacaccctttctggcgtctaccctatcttcctgaacggagagctgagccagaaactccaagtctactgcgatatgactaccgatgggggaggttggatcgtattccaaagacggcagaacggccaaacagacttttttcgcaagtgggctgactacagggtcgggttcggtaacgtggaggatgagttttggctcggcctggacaatatccatcgcatcacaagtcagggcagatatgaactgcgagtggatatgagggatggtcaagaggccgcattcgcttcttacgatcggttttctgtggaagactcacggaacttgtacaagttgagaattggttcctacaacggcaccgcaggtgactccctgtcttatcatcaaggacgacctttcagcaccgaagatagggataacgatgtggcagtaaccaactgtgctatgtcatataaaggcgcctggtggtacaaaaattgccatcggactaatctgaatggaaagtatggcgaaagccgccacagtcaaggcattaactggtaccactggaagggacatgaattctctattccttttgtagagatgaagatgagaccctacaatcacagactgatggccggaagaaagaggcaatctctacagttttag

SEQ ID NO: 298929 - DNA, 4077 bp, Artificial Sequence
  derived and/or modified sequence
atgggagcggatggggagaccgtagtgctgaaaaatatgcttatcggcattaatctgatcctattagggagcatgatcaagccatccgagtgtcaactcgaggtaaccacagagagagtgcagagacagagcgtggaagaagaaggtggaattgcgaactacaataccagctccaaggaacagccggtagtctttaaccacgtgtataacattaacgttcctctggataatctttgtagctccggcttagaagcatctgctgaacaggaagtcagtgcagaagatgagacactggcagaatatatgggacagactagcgatcatgaatcccaagtcacctttacacatcgcataaatttccccaagaaggcctgcccatgtgcgtccagcgcacaggtcctacaggaactgctgtcacgaattgagatgttggagagggaagtgagcgtactccgggatcaatgtaacgcaaactgctgccaggaatccgctgcaacaggtcaactcgactatatcccacattgtagtggacacgggaatttcagcttcgagtcctgtgggtgtatttgcaatgaggggtggtttggtaagaactgttctgagccatattgtcctttggggtgttcctctcgaggagtgtgtgttgatgggcagtgcatatgtgatagcgagtacagcggcgatgattgcagcgaactgagatgccccaccgactgctcttcccggggactgtgtgttgacggcgaatgcgtttgtgaagagccatacaccggggaagattgcagggagctacggtgccctggcgactgtagcgggaagggccgatgtgccaatgggacctgcctttgcgaagagggctatgtgggggaagactgtggacaacggcagtgcctgaacgcctgtagcgggcgtggccagtgtgaggaggggttgtgtgtgtgcgaagaagggtaccaaggtcctgactgcagtgcagtagcaccgcctgaggacctacgtgtcgccggtatctctgaccggtccattgaactggaatgggacggccctatggccgtgactgaatacgtcatctcctatcagccaaccgcccttggtggtttgcagcttcaacagcgagttcccggtgactggtccggggtgacgattactgagttagagccagggctgacttataacatcagcgtgtacgctgttatctccaacatactgtctcttcctataaccgcaaaggtagctacccacctttcaacccctcagggcttgcaattcaagacaatcacggagacaacggtcgaagtacagtgggaacccttctccttttcatttgacgggtgggaaatcagtttcattccaaagaacaacgaagggggagttatcgcccaggttcccagcgatgtgacgtccttcaatcagaccggcctaaagcccggagaggaatatatcgtgaacgttgtggccctcaaagagcaggcaaggtccccacccacttctgcttccgtatctactgtgattgacggtcccacccagattctggtccgggacgtgagtgacaccgtcgccttcgtggaatggatcccaccgcgtgcaaaagtcgactttatactgcttaagtatggcctggtgggaggggaaggagggagaacaacattccggctccagcctccactctcccagtactcagtgcaagccctgcgccctggtagcagatatgaagtttctgtaagtgcggtacggggtaccaacgagtccgactctgctactactcagtttaccacggagattgatgccccaaaaaacctgcgcgtcggatctagaaccgcgacctccctggatcttgagtgggacaactcggaagctgaagtgcaggagtacaaagtcgtgtatagcacactggccggagagcaatatcacgaagtcctcgtcccacgcggtatcggtccaactacccgtgccacacttacagatctcgtacctggaactgagtatggcgtaggaattagcgcagttatgaactcacagcagagcgtccctgcaaccatgaatgcaaggaccgagctggatagccccagggatctcatggtaaccgcttccagtgaaacatcaatatcactcatttggacaaaagctagcggcccaattgatcactatcggataacctttactccttccagcggcattgcttccgaagtgactgtgccaaaagaccgtacaagctatacactcacggatttggaacccggagccgagtatataatctccgtgaccgccgagcgcggtaggcagcagtcactggaatccacggtagatgcattcaccggcttcaggcccatcagccacctgcacttcagtcacgtgacgtcctcttcagtaaacatcacctggtccgatcctagtcctccagctgaccggctcatcctcaattattccccacgagatgaggaagaagagatgatggaagtgtccctcgacgctacaaagcggcatgccgtgctgatggggcttcaacctgccacagaatatatcgtgaacctggttgcagtgcatggaacggtgacatctgaacccatcgtgggctctatcaccaccgggattgacccacctaaagatatcactatatcaaatgtgaccaaggactctgtgatggtctcttggtccccgcctgtggctagttttgactactaccgagtgagctacaggcccacccaggtgggtaggttggatagttccgtggtgccaaatacagtgaccgaatttacaataacgaggctcaaccccgcaaccgagtatgaaatctccctgaacagcgtccggggaagggaagagtccgaaagaatctgtacactggttcacacagcaatggataaccccgtcgaccttattgccacaaacatcacccctaccgaggctctgctacagtggaaagctccagtcggagaagtcgaaaattacgtcatcgtgctcacccacttcgcagttgccggtgagacaatattggtggacggggtgtcagaagaattccgtttagttgacttgttgccatctacccactatacagcgaccatgtacgctacaaacggaccattaactagtggaacgatttcaaccaacttctcaactctgctcgacccaccggctaaccttactgcatcagaggtgactagacagagcgccctgatcagctggcagccacccagggcagagatagagaactatgtgcttacctacaaatccactgatggttcccggaaagaactgatcgtggacgctgaagacacttggattagactggagggccttctcgagaacactgattacaccgtgctgcttcaggctgctcaggacacgacatggagctcaatcacatccacggcgttcactacaggaggtcgggtgtttcctcatccacaggactgcgcccagcatctgatgaatggcgacacattatcaggcgtctatcccatttttctgaacggtgagcttagtcagaaattgcaagtctactgcgacatgaccactgatgggggaggttggattgttttccagcgcaggcagaacggccagacagacttctttcggaaatgggctgactatcgagtggggtttgggaacgtcgaggatgagttttggcttgggctcgataacattcatcggatcacttcccagggcagatacgagctgagagtggatatgagggatgggcaagaagccgcttttgctagttatgacagattctccgtcgaagatagccggaatctttataaattgagaatcggcagctataacggaaccgccggtgatagcctgagctaccatcagggtaggccatttagcaccgaagatagagacaacgatgttgcagtgaccaactgcgccatgtcctacaagggtgcatggtggtacaaaaactgtcaccggacaaacttgaacggaaaatacggggagagtcggcatagtcaggggattaattggtatcattggaagggtcacgagttctcaataccattcgtcgagatgaagatgaggccatataaccatcggcttatggcagggaggaagcggcagagtctgcagttttag

SEQ ID NO: 298930 - DNA, 4077 bp, Artificial Sequence
  derived and/or modified sequence
atgggggcagacggagaaaccgtagtgcttaagaatatgctaatcggcataaatctgatcctcttggggagtatgataaaacccagtgaatgtcagctggaagtgaccacggagagggtccagagacagagtgtggaggaggagggaggaattgctaactataacaccagcagtaaggaacagcccgtagtcttcaaccacgtctacaatatcaacgttcctttagataatctatgctcctccggattggaggcaagcgccgaacaggaggtgagcgccgaagacgagacactcgcagagtacatgggccagacaagtgaccatgaatcccaagtcacctttacgcaccgtatcaacttccccaaaaaggcatgcccctgtgcctcgtccgcacaggttctgcaggaactcttgagcaggatcgagatgttggagagggaggtgtcggtgctgcgggatcagtgcaacgctaattgctgccaagagagtgctgcaacggggcagctggactatatacctcactgctcagggcacggcaatttcagttttgagagttgtggctgcatttgcaacgagggatggttcggcaaaaattgttctgaaccttactgcccgttaggatgctcaagcaggggtgtctgcgtggacggtcagtgtatttgtgacagcgagtactccggggacgactgcagcgagcttaggtgtccaaccgactgcagtagtagaggcctctgtgtggacggagaatgtgtgtgtgaagaaccttataccggcgaggattgcagggagcttcgctgtccgggtgactgctccggtaaggggcgttgtgcaaacggcacctgtctgtgtgaggagggctacgtgggagaggattgcggccagcggcagtgcctcaacgcctgcagtggcagagggcagtgtgaggaaggactttgcgtgtgcgaggaggggtaccagggtccagactgttctgcagttgccccaccagaagatctgagagtcgccggtatatcagaccgctcaatagagcttgaatgggacgggccaatggcggtgaccgaatatgtgatttcttatcagcccacagccctgggcggactgcagctgcaacagagggtccctggtgattggagcggagtcacaatcactgagctggaacccggactcacctacaacatcagtgtatacgctgtcatatcgaatattcttagcctacccattacagcgaaagtggcaacacacctgagtacaccccaggggttgcagtttaagaccatcaccgagaccaccgtggaggtgcagtgggaaccattctcgtttagctttgacggttgggagattagtttcatccccaaaaacaatgagggcggagtgatcgcgcaggttcccagtgacgtgacatcctttaatcagaccggtctcaaaccaggagaggagtacatcgtgaatgtggtggctctgaaagaacaagcaagaagccctccaacttctgcgtcagtgtcgacggtcatcgatggtcctactcagatcctggtgagagacgtgagtgatacagtcgcattcgttgagtggattcctccaagggcgaaagtggattttatcttgctgaagtatgggctggtcggaggagaagggggacgcaccacattccgcctgcaaccccctctgagccaatatagcgtccaggcactaagaccaggatctagatatgaagtcagcgtttctgctgtccgtggtacaaacgagtccgatagcgcaaccacccagtttacaacagaaatcgatgcacccaagaacctgcgggtgggctccagaacggctacaagcctggaccttgaatgggataacagtgaggctgaggtccaggaatataaggtggtttacagcacattggccggtgagcagtatcatgaggtgctggtgcccagaggaattggtcccactacacgcgctacactcaccgacctggtgcccggaacggagtatggagtaggcatctccgcagtgatgaacagtcagcagagcgtgcccgctacaatgaatgctcggactgagctggactctcctagagatctgatggtgaccgccagtagtgagacctctatctccctcatttggaccaaagccagcgggcctattgaccactaccgcattacttttactcctagcagtggcatagcaagcgaagtaactgttcctaaagacagaacaagctatacactaaccgacctggagcccggtgccgaatacattatctctgtgacggccgagcgtggccgacagcagtctctggagtctaccgttgacgcctttaccggtttccgtccaatttcccatctacacttctcacacgtgacctcgtcaagcgtcaatatcacatggtcagatcctagcccgcctgcggatcggctgatccttaactattcccctagagatgaagaggaagaaatgatggaagtctccctggatgctacgaaacgccacgcggtactcatgggattgcagcccgctaccgagtacattgttaatctcgtcgctgtgcacggtactgtcacaagtgagccaatagttggctcgatcactactggtattgatccccctaaagacataacaatttcaaatgtaacaaaggactctgtcatggtgtcctggtcccctccagtggcaagtttcgattactacagagtgagctaccgacccacacaagttggcagactcgactccagcgtggtgccaaatacggtgacagagtttacaattacaagactgaaccccgctacggagtacgagatcagcctcaattccgtgcgtggaagagaagaatccgaaagaatctgtacactcgtccataccgccatggataatccagtggacctgatcgctaccaacattacacccacagaggccttgcttcaatggaaagcacccgttggcgaagtggagaactatgtgattgtgctaactcatttcgcggtggcaggtgagacaattctcgtcgacggcgtgtccgaggagttccgactggtggacctgctcccgtcaactcattatacggccacaatgtatgcaaccaacggccctctaacaagtgggaccatcagcactaatttctcgactctgctagatcctccagccaatttaaccgcttcggaagtcacacgtcagtcggccctcattagctggcagcccccaagagccgagatcgaaaattatgttctcacctataagtcaaccgacggcagccggaaagagctgatcgtcgatgccgaggatacctggattagactagaaggcctgttagagaacactgactacactgtactgctgcaggctgcacaggacaccacatggtccagcattacatctaccgcttttacaacgggcggacgcgtgttcccccacccgcaagattgcgctcaacatctgatgaacggcgacaccctttcaggcgtgtaccccattttcctgaatggcgagctttctcagaaacttcaagtgtactgtgacatgaccacagatggcggaggttggattgtatttcaacggcgtcagaacggccagacagacttctttagaaagtgggctgactaccgagtggggtttggcaacgtcgaagacgagttttggctagggttggacaatatccataggataacgtcccaaggtagatacgagctgagagtcgacatgcgcgatggtcaggaggcagcatttgcctcatatgatcgatttagtgtcgaagactcacggaatctgtataaattgcgaatcggcagctacaacggaacggcaggggactctttgtcatatcaccagggaaggccattttccaccgaagaccgggacaacgacgtcgcagtcacaaactgcgctatgtcatacaagggagcctggtggtataaaaactgtcaccgaacaaatctgaatggcaaatacggagaaagccgccacagccaaggcatcaattggtaccactggaagggtcatgaattttctattccgtttgtggagatgaagatgcggccttacaaccacagattgatggcgggaagaaagcgccaatctttgcaattctag

SEQ ID NO: 298931 - DNA, 5190 bp, Artificial Sequence
  derived and/or modified sequence
ccaggcttcctcctctctttcacgtcagaggcaggaaccgactgtgctaaggctgttggctcaacacccagaggagacgggcagacccagggagagtgagagaagggggtcctctctgacccaaggaattaccactagtggagtgaagccacctgactttttgatcttattttggttgcctcctcattctccttccacccgtagccctgacagcttgggtttcatttctttcgtggagccttgtctcttcctcccagaataggaggaagggaagagaagggaaagaggagggctctctaggtgagcgcatcagctggctccagcctgagcaagcaagaattttcttcccaggaagctcctctcgctccccggccgcccacccccagcctgggtggctgtatcgttttaactgcatagagggcaggtctcttttggaattaggattaaagaaagtgcagtaaagagaaagcatcgaagacaccatcacaaaagattcccacaactccatgctgtgtgctgcaggctggtcctgaacccagatctctggctgagaggatgggggcagatggggaaacagtggttctgaagaacatgctcattggcatcaacctgatccttctgggctccatgatcaagccttcagagtgtcagctggaggtcaccacagaaagggtccagagacagtcagtggaggaggagggaggcattgccaactacaacacatccagcaaagagcagcctgtggtcttcaaccacgtgtacaacattaacgtgcccttggacaacctctgctcctcagggctagaggcctctgctgagcaggaggtgagtgcagaagacgagactctggcagagtacatgggccagacctcagaccacgagagccaggtcacctttacacacaggatcaacttccccaaaaaggcctgtccatgtgccagttcagcccaggtgctgcaggagctgctgagccggatcgagatgctggagagggaggtgtcggtgctgcgagaccagtgcaacgccaactgctgccaagaaagtgctgccacaggacaactggactatatccctcactgcagtggccacggcaactttagctttgagtcctgtggctgcatctgcaacgaaggctggtttggcaagaattgctcggagccctactgcccgctgggttgctccagccggggggtgtgtgtggatggccagtgcatctgtgacagcgagtacagcggggatgactgttccgaactccggtgcccaacagactgcagctcccgggggctctgcgtggacggggagtgtgtctgtgaagagccctacactggcgaggactgcagggaactgaggtgccctggggactgttcggggaaggggagatgtgccaacggtacctgtttatgcgaggagggctacgttggtgaggactgcggccagcggcagtgtctgaatgcctgcagtgggcgaggacaatgtgaggaggggctctgcgtctgtgaagagggctaccagggccctgactgctcagcagttgcccctccagaggacttgcgagtggctggtatcagcgacaggtccattgagctggaatgggacgggccgatggcagtgacggaatatgtgatctcttaccagccgacggccctggggggcctccagctccagcagcgggtgcctggagattggagtggtgtcaccatcacggagctggagccaggtctcacctacaacatcagcgtctacgctgtcattagcaacatcctcagccttcccatcactgccaaggtggccacccatctctccactcctcaagggctacaatttaagacgatcacagagaccaccgtggaggtgcagtgggagcccttctcattttccttcgatgggtgggaaatcagcttcattccaaagaacaatgaagggggagtgattgctcaggtccccagcgatgttacgtcctttaaccagacaggactaaagcctggggaggaatacattgtcaatgtggtggctctgaaagaacaggcccgcagcccccctacctcggccagcgtctccacagtcattgacggccccacgcagatcctggttcgcgatgtctcggacactgtggcttttgtggagtggattccccctcgagccaaagtcgatttcattcttttgaaatatggcctggtgggcggggaaggtgggaggaccaccttccggctgcagcctcccctgagccaatactcagtgcaggccctgcggcctggctcccgatacgaggtgtcagtcagtgccgtccgagggaccaacgagagcgattctgccaccactcagttcacaacagagatcgatgcccccaagaacttgcgagttggttctcgcacagcaaccagccttgacctcgagtgggataacagtgaagccgaagttcaggagtacaaggttgtgtacagcaccctggcgggtgagcaatatcatgaggtactggtccccaggggcattggtccaaccaccagggccaccctgacagatctggtacctggcactgagtatggagttggaatatctgccgtcatgaactcacagcaaagcgtgccagccaccatgaatgccaggactgaacttgacagtccccgagacctcatggtgacagcctcctcggagacctccatctccctcatctggaccaaggccagtggccccattgaccactaccgaattacctttaccccatcctctgggattgcctcagaagtcaccgtacccaaggacaggacctcatacacactaacagatctagagcctggggcagagtacatcatttccgtcactgctgagaggggtcggcagcagagcttggagtccactgtggatgctttcacaggcttccgtcccatctctcatctgcacttttctcatgtgacctcctccagtgtgaacatcacttggagtgatccatctcccccagcagacagactcattcttaactacagccccagggatgaggaggaagagatgatggaggtctccctggatgccaccaagaggcatgctgtcctgatgggcctgcaaccagccacagagtatattgtgaaccttgtggctgtccatggcacagtgacctctgagcccattgtgggctccatcaccacaggaattgatcccccaaaagacatcacaattagcaatgtgaccaaggactcagtgatggtctcctggagccctcctgttgcatctttcgattactaccgagtatcatatcgacccacccaagtgggacgactagacagctcagtggtgcccaacactgtgacagaattcaccatcaccagactgaacccagctaccgaatacgaaatcagcctcaacagcgtgcggggcagggaggaaagcgagcgcatctgtactcttgtgcacacagccatggacaaccctgtggatctgattgctaccaatatcactccaacagaagccctgctgcagtggaaggcaccagtgggtgaggtggagaactacgtcattgttcttacacactttgcagtcgctggagagaccatccttgttgacggagtcagtgaggaatttcggcttgttgacctgcttcctagcacccactatactgccaccatgtatgccaccaatggacctctcaccagtggcaccatcagcaccaacttttctactctcctggaccctccggcaaacctgacagccagtgaagtcaccagacaaagtgccctgatctcctggcagcctcccagggcagagattgaaaattatgtcttgacctacaaatccaccgatggaagccgcaaggagctgattgtggatgcagaagacacctggattcgactggagggcctgttggagaacacagactacacggtgctcctgcaggcagcacaggacaccacgtggagcagcatcacctccaccgctttcaccacaggaggccgggtgttccctcatccccaagactgtgcccagcatttgatgaatggagacactttgagtggggtttaccccatcttcctcaatggggagctgagccagaaattacaagtgtactgtgatatgaccaccgacgggggcggctggattgtattccagaggcggcagaatggccaaactgattttttccggaaatgggctgattaccgtgttggcttcgggaacgtggaggatgagttctggctggggctggacaatatacacaggatcacatcccagggccgctatgagctgcgcgtggacatgcgggatggccaagaggccgccttcgcctcctacgacaggttctctgtcgaggacagcagaaacctgtacaaactccgcataggaagctacaacggcactgcgggggactccctcagctatcatcaaggacgccctttctccacagaggatagagacaatgatgttgcagtgactaactgtgccatgtcgtacaagggagcatggtggtataagaactgccaccggaccaacctcaatgggaagtacggggagtccaggcacagtcagggcatcaactggtaccattggaaaggccatgagttctccatcccctttgtggaaatgaagatgcgcccctacaaccaccgtctcatggcagggagaaaacggcagtccttacagttctgagcagtgggcggctgcaagccaaccaatattttctgtcatttgtttgtattttataatatgaaacaaggggggagggtaatagcaatgtgttttgcaacatattaagagtatgtgaaggaagcagggatgtcgcaggaatccgctggctaacatctgctcttggtttctgctgccctggagcctgaccctcagtctccattctccctcctacccaggcctcctcaaccttcacctcctttcccaccaaggaggagaagtaggaagttttcttaaagggccaattcaaagccaagtcgtggggtgcagattgttatggtgacaggcacacacatttttctacccttcttctgagatgtcctctgccttccaggtatttgtgattttgtcacagcctgacatggccaggttctcacactggcccagagaaaagagcctcagcaagagagttttgccaacaattccccttaaaaggaaacagatcaactacaccgcatcccaacaacccaggttcttttccttccttccttccttcctcccttccttctttcctgccttccc

SEQ ID NO: 298932 - DNA, 5344 bp, Artificial Sequence
  derived and/or modified sequence
cactagggggctgcttgtagggggatggaaaaaacggaggcttaaaaaaatcatgctgctgaaatttcagcaagaggggaaaagagagagcgcgtgagagagagagagagagagagagagagagagagagagagagagagacagcaaagcagtcccaggcttcctcctctctttcacgtcagaggcaggaaccgactgtgctaaggctgttggctcaacacccagaggagacgggcagacccagggagagtgagagaagggggtcctctctgacccaaggaattaccactagtggagtgaagccacctgactttttgatcttattttggttgcctcctcattctccttccacccgtagccctgacagcttgggtttcatttctttcgtggagccttgtctcttcctcccagaataggaggaagggaagagaagggaaagaggagggctctctaggtgagcgcatcagctggctccagcctgagcaagcaagaattttcttcccaggaagctcctctcgctccccggccgcccacccccagcctgggtggctgtatcgttttaactgcatagagggcaggtctcttttggaattaggattaaagaaagtgcagtaaagagaaagcatcgaagacaccatcacaaaagattcccacaactccatgctgtgtgctgcaggctggtcctgaacccagatctctggctgagaggatgggggcagatggggaaacagtggttctgaagaacatgctcattggcatcaacctgatccttctgggctccatgatcaagccttcagagtgtcagctggaggtcaccacagaaagggtccagagacagtcagtggaggaggagggaggcattgccaactacaacacatccagcaaagagcagcctgtggtcttcaaccacgtgtacaacattaacgtgcccttggacaacctctgctcctcagggctagaggcctctgctgagcaggaggtgagtgcagaagacgagactctggcagagtacatgggccagacctcagaccacgagagccaggtcacctttacacacaggatcaacttccccaaaaaggcctgtccatgtgccagttcagcccaggtgctgcaggagctgctgagccggatcgagatgctggagagggaggtgtcggtgctgcgagaccagtgcaacgccaactgctgccaagaaagtgctgccacaggacaactggactatatccctcactgcagtggccacggcaactttagctttgagtcctgtggctgcatctgcaacgaaggctggtttggcaagaattgctcggagccctactgcccgctgggttgctccagccggggggtgtgtgtggatggccagtgcatctgtgacagcgagtacagcggggatgactgttccgaactccggtgcccaacagactgcagctcccgggggctctgcgtggacggggagtgtgtctgtgaagagccctacactggcgaggactgcagggaactgaggtgccctggggactgttcggggaaggggagatgtgccaacggtacctgtttatgcgaggagggctacgttggtgaggactgcggccagcggcagtgtctgaatgcctgcagtgggcgaggacaatgtgaggaggggctctgcgtctgtgaagagggctaccagggccctgactgctcagcagttgcccctccagaggacttgcgagtggctggtatcagcgacaggtccattgagctggaatgggacgggccgatggcagtgacggaatatgtgatctcttaccagccgacggccctggggggcctccagctccagcagcgggtgcctggagattggagtggtgtcaccatcacggagctggagccaggtctcacctacaacatcagcgtctacgctgtcattagcaacatcctcagccttcccatcactgccaaggtggccacccatctctccactcctcaagggctacaatttaagacgatcacagagaccaccgtggaggtgcagtgggagcccttctcattttccttcgatgggtgggaaatcagcttcattccaaagaacaatgaagggggagtgattgctcaggtccccagcgatgttacgtcctttaaccagacaggactaaagcctggggaggaatacattgtcaatgtggtggctctgaaagaacaggcccgcagcccccctacctcggccagcgtctccacagtcattgacggccccacgcagatcctggttcgcgatgtctcggacactgtggcttttgtggagtggattccccctcgagccaaagtcgatttcattcttttgaaatatggcctggtgggcggggaaggtgggaggaccaccttccggctgcagcctcccctgagccaatactcagtgcaggccctgcggcctggctcccgatacgaggtgtcagtcagtgccgtccgagggaccaacgagagcgattctgccaccactcagttcacaacagagatcgatgcccccaagaacttgcgagttggttctcgcacagcaaccagccttgacctcgagtgggataacagtgaagccgaagttcaggagtacaaggttgtgtacagcaccctggcgggtgagcaatatcatgaggtactggtccccaggggcattggtccaaccaccagggccaccctgacagatctggtacctggcactgagtatggagttggaatatctgccgtcatgaactcacagcaaagcgtgccagccaccatgaatgccaggactgaacttgacagtccccgagacctcatggtgacagcctcctcggagacctccatctccctcatctggaccaaggccagtggccccattgaccactaccgaattacctttaccccatcctctgggattgcctcagaagtcaccgtacccaaggacaggacctcatacacactaacagatctagagcctggggcagagtacatcatttccgtcactgctgagaggggtcggcagcagagcttggagtccactgtggatgctttcacaggcttccgtcccatctctcatctgcacttttctcatgtgacctcctccagtgtgaacatcacttggagtgatccatctcccccagcagacagactcattcttaactacagccccagggatgaggaggaagagatgatggaggtctccctggatgccaccaagaggcatgctgtcctgatgggcctgcaaccagccacagagtatattgtgaaccttgtggctgtccatggcacagtgacctctgagcccattgtgggctccatcaccacaggaattgatcccccaaaagacatcacaattagcaatgtgaccaaggactcagtgatggtctcctggagccctcctgttgcatctttcgattactaccgagtatcatatcgacccacccaagtgggacgactagacagctcagtggtgcccaacactgtgacagaattcaccatcaccagactgaacccagctaccgaatacgaaatcagcctcaacagcgtgcggggcagggaggaaagcgagcgcatctgtactcttgtgcacacagccatggacaaccctgtggatctgattgctaccaatatcactccaacagaagccctgctgcagtggaaggcaccagtgggtgaggtggagaactacgtcattgttcttacacactttgcagtcgctggagagaccatccttgttgacggagtcagtgaggaatttcggcttgttgacctgcttcctagcacccactatactgccaccatgtatgccaccaatggacctctcaccagtggcaccatcagcaccaacttttctactctcctggaccctccggcaaacctgacagccagtgaagtcaccagacaaagtgccctgatctcctggcagcctcccagggcagagattgaaaattatgtcttgacctacaaatccaccgatggaagccgcaaggagctgattgtggatgcagaagacacctggattcgactggagggcctgttggagaacacagactacacggtgctcctgcaggcagcacaggacaccacgtggagcagcatcacctccaccgctttcaccacaggaggccgggtgttccctcatccccaagactgtgcccagcatttgatgaatggagacactttgagtggggtttaccccatcttcctcaatggggagctgagccagaaattacaagtgtactgtgatatgaccaccgacgggggcggctggattgtattccagaggcggcagaatggccaaactgattttttccggaaatgggctgattaccgtgttggcttcgggaacgtggaggatgagttctggctggggctggacaatatacacaggatcacatcccagggccgctatgagctgcgcgtggacatgcgggatggccaagaggccgccttcgcctcctacgacaggttctctgtcgaggacagcagaaacctgtacaaactccgcataggaagctacaacggcactgcgggggactccctcagctatcatcaaggacgccctttctccacagaggatagagacaatgatgttgcagtgactaactgtgccatgtcgtacaagggagcatggtggtataagaactgccaccggaccaacctcaatgggaagtacggggagtccaggcacagtcagggcatcaactggtaccattggaaaggccatgagttctccatcccctttgtggaaatgaagatgcgcccctacaaccaccgtctcatggcagggagaaaacggcagtccttacagttctgagcagtgggcggctgcaagccaaccaatattttctgtcatttgtttgtattttataatatgaaacaaggggggagggtaatagcaatgtgttttgcaacatattaagagtatgtgaaggaagcagggatgtcgcaggaatccgctggctaacatctgctcttggtttctgctgccctggagcctgaccctcagtctccattctccctcctacccaggcctcctcaaccttcacctcctttcccaccaaggaggagaagtaggaagttttcttaaagggccaattcaaagccaagtcgtggggtgcagattgttatggtgacaggcacacacatttttctacccttcttctgagatgtcctctgccttccaggtatttgtgattttgtcacagcctgacatggccaggttctcacactggcccagagaaaagagcctcagcaagagagttttgccaacaattccccttaaaaggaaacagatcaactacaccgcatcccaacaacccaggttcttttccttccttccttccttcctcccttccttctttcctgccttccc

SEQ ID NO: 298933 - protein, 1268 aa, Artificial Sequence
  derived and/or modified sequence
MGADGETVVLKNMLIGINLILLGSMIKPSECQLEVTTERVQRQSVEEEGGIANYNTSSKEQPVVFNHVYNINVPLDNLCSSGLEASAEQEVSAEDETLAEYMGQTSDHESQVTFTHRINFPKKACPCASSAQVLQELLSRIEMLEREVSVLRDQCNANCCQESAATGQLDYIPHCSGHGNFSFESCGCICNEGWFGKNCSEPYCPLGCSSRGVCVDGQCICDSEYSGDDCSELRCPTDCSSRGLCVDGECVCEEPYTGEDCRELRCPGDCSGKGRCANGTCLCEEGYVGEDCGQRQCLNACSGRGQCEEGLCVCEEGYQGPDCSAVAPPEDLRVAGISDRSIELEWDGPMAVTEYVISYQPTALGGLQLQQRVPGDWSGVTITELEPGLTYNISVYAVISNILSLPITAKVATHLSTPQGLQFKTITETTVEVQWEPFSFSFDGWEISFIPKNNEGGVIAQVPSDVTSFNQTGLKPGEEYIVNVVALKEQARSPPTSASVSTVIDGPTQILVRDVSDTVAFVEWIPPRAKVDFILLKYGLVGGEGGRTTFRLQPPLSQYSVQALRPGSRYEVSVSAVRGTNESDSATTQFTTEIDAPKNLRVGSRTATSLDLEWDNSEAEVQEYKVVYSTLAGEQYHEVLVPRGIGPTTRATLTDLVPGTEYGVGISAVMNSQQSVPATMNARTELDSPRDLMVTASSETSISLIWTKASGPIDHYRITFTPSSGIASEVTVPKDRTSYTLTDLEPGAEYIISVTAERGRQQSLESTVDAFTGIDPPKDITISNVTKDSVMVSWSPPVASFDYYRVSYRPTQVGRLDSSVVPNTVTEFTITRLNPATEYEISLNSVRGREESERICTLVHTAMDNPVDLIATNITPTEALLQWKAPVGEVENYVIVLTHFAVAGETILVDGVSEEFRLVDLLPSTHYTATMYATNGPLTSGTISTNFSTLLDPPANLTASEVTRQSALISWQPPRAEIENYVLTYKSTDGSRKELIVDAEDTWIRLEGLLENTDYTVLLQAAQDTTWSSITSTAFTTGGRVFPHPQDCAQHLMNGDTLSGVYPIFLNGELSQKLQVYCDMTTDGGGWIVFQRRQNGQTDFFRKWADYRVGFGNVEDEFWLGLDNIHRITSQGRYELRVDMRDGQEAAFASYDRFSVEDSRNLYKLRIGSYNGTAGDSLSYHQGRPFSTEDRDNDVAVTNCAMSYKGAWWYKNCHRTNLNGKYGESRHSQGINWYHWKGHEFSIPFVEMKMRPYNHRLMAGRKRQSLQF

SEQ ID NO: 298934 - DNA, 3807 bp, Artificial Sequence
  derived and/or modified sequence
atgggcgccgacggcgagaccgtggtgctgaagaacatgctgatcggcatcaacctgatcctgctgggcagcatgatcaagcccagcgagtgccagctggaggtgaccaccgagagagtgcagagacagagcgtggaggaggagggcggcatcgccaactacaacaccagcagcaaggagcagcccgtggtgttcaaccacgtgtacaacatcaacgtgcccctggacaacctgtgcagcagcggcctggaggccagcgccgagcaggaggtgagcgccgaggacgagaccctggccgagtacatgggccagaccagcgaccacgagagccaggtgaccttcacccacagaatcaacttccccaagaaggcctgcccctgcgccagcagcgcccaggtgctgcaggagctgctgagcagaatcgagatgctggagagagaggtgagcgtgctgagagaccagtgcaacgccaactgctgccaggagagcgccgccaccggccagctggactacatcccccactgcagcggccacggcaacttcagcttcgagagctgcggctgcatctgcaacgagggctggttcggcaagaactgcagcgagccctactgccccctgggctgcagcagcagaggcgtgtgcgtggacggccagtgcatctgcgacagcgagtacagcggcgacgactgcagcgagctgagatgccccaccgactgcagcagcagaggcctgtgcgtggacggcgagtgcgtgtgcgaggagccctacaccggcgaggactgcagagagctgagatgccccggcgactgcagcggcaagggcagatgcgccaacggcacctgcctgtgcgaggagggctacgtgggcgaggactgcggccagagacagtgcctgaacgcctgcagcggcagaggccagtgcgaggagggcctgtgcgtgtgcgaggagggctaccagggccccgactgcagcgccgtggccccccccgaggacctgagagtggccggcatcagcgacagaagcatcgagctggagtgggacggccccatggccgtgaccgagtacgtgatcagctaccagcccaccgccctgggcggcctgcagctgcagcagagagtgcccggcgactggagcggcgtgaccatcaccgagctggagcccggcctgacctacaacatcagcgtgtacgccgtgatcagcaacatcctgagcctgcccatcaccgccaaggtggccacccacctgagcaccccccagggcctgcagttcaagaccatcaccgagaccaccgtggaggtgcagtgggagcccttcagcttcagcttcgacggctgggagatcagcttcatccccaagaacaacgagggcggcgtgatcgcccaggtgcccagcgacgtgaccagcttcaaccagaccggcctgaagcccggcgaggagtacatcgtgaacgtggtggccctgaaggagcaggccagaagcccccccaccagcgccagcgtgagcaccgtgatcgacggccccacccagatcctggtgagagacgtgagcgacaccgtggccttcgtggagtggatcccccccagagccaaggtggacttcatcctgctgaagtacggcctggtgggcggcgagggcggcagaaccaccttcagactgcagccccccctgagccagtacagcgtgcaggccctgagacccggcagcagatacgaggtgagcgtgagcgccgtgagaggcaccaacgagagcgacagcgccaccacccagttcaccaccgagatcgacgcccccaagaacctgagagtgggcagcagaaccgccaccagcctggacctggagtgggacaacagcgaggccgaggtgcaggagtacaaggtggtgtacagcaccctggccggcgagcagtaccacgaggtgctggtgcccagaggcatcggccccaccaccagagccaccctgaccgacctggtgcccggcaccgagtacggcgtgggcatcagcgccgtgatgaacagccagcagagcgtgcccgccaccatgaacgccagaaccgagctggacagccccagagacctgatggtgaccgccagcagcgagaccagcatcagcctgatctggaccaaggccagcggccccatcgaccactacagaatcaccttcacccccagcagcggcatcgccagcgaggtgaccgtgcccaaggacagaaccagctacaccctgaccgacctggagcccggcgccgagtacatcatcagcgtgaccgccgagagaggcagacagcagagcctggagagcaccgtggacgccttcaccggcatcgacccccccaaggacatcaccatcagcaacgtgaccaaggacagcgtgatggtgagctggagcccccccgtggccagcttcgactactacagagtgagctacagacccacccaggtgggcagactggacagcagcgtggtgcccaacaccgtgaccgagttcaccatcaccagactgaaccccgccaccgagtacgagatcagcctgaacagcgtgagaggcagagaggagagcgagagaatctgcaccctggtgcacaccgccatggacaaccccgtggacctgatcgccaccaacatcacccccaccgaggccctgctgcagtggaaggcccccgtgggcgaggtggagaactacgtgatcgtgctgacccacttcgccgtggccggcgagaccatcctggtggacggcgtgagcgaggagttcagactggtggacctgctgcccagcacccactacaccgccaccatgtacgccaccaacggccccctgaccagcggcaccatcagcaccaacttcagcaccctgctggacccccccgccaacctgaccgccagcgaggtgaccagacagagcgccctgatcagctggcagccccccagagccgagatcgagaactacgtgctgacctacaagagcaccgacggcagcagaaaggagctgatcgtggacgccgaggacacctggatcagactggagggcctgctggagaacaccgactacaccgtgctgctgcaggccgcccaggacaccacctggagcagcatcaccagcaccgccttcaccaccggcggcagagtgttcccccacccccaggactgcgcccagcacctgatgaacggcgacaccctgagcggcgtgtaccccatcttcctgaacggcgagctgagccagaagctgcaggtgtactgcgacatgaccaccgacggcggcggctggatcgtgttccagagaagacagaacggccagaccgacttcttcagaaagtgggccgactacagagtgggcttcggcaacgtggaggacgagttctggctgggcctggacaacatccacagaatcaccagccagggcagatacgagctgagagtggacatgagagacggccaggaggccgccttcgccagctacgacagattcagcgtggaggacagcagaaacctgtacaagctgagaatcggcagctacaacggcaccgccggcgacagcctgagctaccaccagggcagacccttcagcaccgaggacagagacaacgacgtggccgtgaccaactgcgccatgagctacaagggcgcctggtggtacaagaactgccacagaaccaacctgaacggcaagtacggcgagagcagacacagccagggcatcaactggtaccactggaagggccacgagttcagcatccccttcgtggagatgaagatgagaccctacaaccacagactgatggccggcagaaagagacagagcctgcagttctag

SEQ ID NO: 298935 - DNA, 3807 bp, Artificial Sequence
  derived and/or modified sequence
atgggagccgacggcgagacagttgtcctgaaaaacatgctgatcggtatcaacctgattctcctgggttccatgatcaagccttctgaatgccagctagaagtgaccaccgaaagagttcagaggcagagcgttgaggaagagggtggtattgcaaattacaacactagttctaaagagcagcccgtggtgttcaatcacgtctataatatcaacgtccccctggacaacctatgcagcagcggcctcgaagcaagcgctgagcaggaagtctctgctgaggacgagactctggctgaatatatgggccagacctctgaccatgagtctcaggtgacattcacccacaggattaactttcccaaaaaagcgtgtccctgtgcgtcgtctgcccaggtactccaggaattactctctcgaattgaaatgctggagagggaagtcagcgtactgcgcgatcagtgtaatgctaattgctgtcaggaatccgccgccacaggccaactggattatattccccactgcagcggacacgggaactttagcttcgagtcgtgcgggtgtatctgtaacgaaggatggttcggcaagaactgttctgaaccttattgtcctcttggatgcagctccagaggggtgtgtgtggatggacagtgtatttgtgactccgaatactccggtgatgattgcagtgaactgcggtgtcctacggactgctccagtcgcggcctctgtgtggacggagagtgtgtgtgcgaggagccgtatacgggcgaggattgccgggaactgaggtgtcccggggactgcagtgggaagggtcgctgcgccaatggaacatgcctatgcgaggaaggatatgtgggtgaggattgcggccaacgccaatgtcttaacgcctgctctggccgaggacagtgcgaagagggattatgtgtatgcgaggagggataccagggtcctgattgttccgctgtggccccgccggaagatctaagagtcgcaggcattagcgatcgcagcatcgagctggagtgggatgggccaatggctgtgactgaatacgtgatctcataccagcctactgcgctgggagggcttcaactgcaacagagggtaccgggtgactggagtggggtgactattactgaattggaacccggtctcacgtacaatatttccgtctacgccgtaatctctaatatcttgtcattaccgatcacagctaaagtggccactcacctgagtacgccccagggtctgcagtttaagacaattaccgagaccacagtggaggtccaatgggaacccttctccttcagtttcgacgggtgggagattagttttataccaaagaataacgaggggggggtgatcgcccaggtccctagtgacgtcacttccttcaaccagaccgggctcaaacccggagaggagtatatcgtgaacgtggtggctttgaaagagcaagcacgctcccctcccacatccgccagcgtgtctactgttatagatggacctacgcaaatcttagtgcgggatgtgtcagacactgtggcattcgtggagtggatcccaccacgagccaaagtcgatttcatccttctcaagtatggactcgtcggcggggagggcggtcgcaccacctttcgcttgcagcctccccttagccagtattctgtgcaggctctacggcctggcagtcgctacgaggtaagtgtgagtgctgtgcgcgggacgaacgagtccgacagcgccacaacccaatttacaactgaaatcgacgcaccgaaaaatctgcgcgtggggagtagaaccgccacgtccctcgaccttgagtgggacaactcagaagcagaggtccaggagtataaggtggtctattcgaccttagcgggcgagcagtaccacgaggtactcgtcccccgggggattggccccactactcgagctacactgactgaccttgtccccggcacagaatatggggtcggaatttcggccgtgatgaatagtcagcagtcggtaccagccacaatgaatgctcgaacagagctggatagtccaagggatttgatggtgaccgcttcatcggagacttctatttcactgatctggactaaagcgagcggcccgatcgaccattaccgtatcacatttactcctagcagcggcatcgcgtccgaggtgactgttcccaaggaccgcaccagctacactttgacagacctcgaacccggcgccgagtatataatcagcgtcaccgcagagcgtggccgacagcagtctcttgagtccaccgttgacgccttcacaggcattgaccctcccaaggacattaccattagcaacgttaccaaagattctgtaatggtgagttggtcgccccctgtggcctcttttgactactatcgagtctcttaccggcccacccaggtcggacggctcgacagctccgtggtgccaaatacagtgaccgagttcacaattactcgcctgaacccagctactgaatacgaaataagcctcaattcagttagaggtagggaggaatccgagagaatctgtaccctcgtacataccgctatggataacccagtggatctcattgccaccaatattacaccaactgaagccctcctgcagtggaaggccccagtgggtgaggtggagaattatgtaatcgtgttaactcactttgctgtcgccggagaaacaatcctggtggacggggtttctgaggagtttcgactggtcgatcttctaccctcaactcattataccgctaccatgtatgcaactaatgggccccttaccagcgggacaatctctacgaacttctcaacacttctggacccccctgcaaacttaactgccagtgaagtgacgcggcagtctgcactgattagttggcagccaccccgagccgaaattgagaactacgtgctcacctataagtctaccgacgggtcgcgtaaggagctgatcgtagacgcggaggacacatggatcaggctggaaggtctgctggagaacaccgattataccgttctcctccaggccgcacaggatactacctggtcctccatcaccagcactgccttcacaactggcggccgcgttttcccccatccccaggactgtgcccagcatcttatgaacggcgacacactttctggcgtgtacccgatattcctcaatggcgaattatcccaaaagctgcaggtgtattgtgacatgactaccgatggcgggggttggattgttttccagcgaaggcagaacgggcagactgatttcttccgaaaatgggccgattatcgtgtgggcttcggtaacgtggaggacgagttttggttgggccttgacaatatacaccgcattacctcccaaggtcggtatgaactgcgcgtggatatgcgcgacggacaggaggctgcttttgctagttacgaccggtttagcgtggaggacagcaggaacctgtacaagctacggattggatcttacaacggtactgcaggggactccctgtcctatcatcagggaaggccattttccaccgaagatagagataatgatgttgcagtcacaaattgtgccatgtcctataaaggggcttggtggtataaaaactgccacagaacaaatcttaacgggaagtacggcgagtctcggcacagccagggcatcaattggtaccattggaaaggtcacgagtttagcattccattcgtggaaatgaaaatgcgcccatataatcaccgtctgatggccggcagaaaacggcagagtctacaattttag

SEQ ID NO: 298936 - DNA, 3807 bp, Artificial Sequence
  derived and/or modified sequence
atgggcgcagatggagaaacagtggtgctgaagaacatgctgattggcatcaacctgatcctgctgggctccatgatcaagcccagcgagtgccagctggaggtgaccacagagcgggtgcagaggcagagcgtggaggaggagggcggcatcgccaactacaacaccagcagcaaggagcagcctgtggtgttcaaccacgtgtacaacatcaacgtgcccctggacaacctgtgcagcagcggcctggaggccagcgctgagcaggaggtgtctgcagaagatgagaccctggccgagtacatgggccagaccagtgaccacgagagccaggtgaccttcacccaccgcatcaacttccccaagaaggcctgcccctgtgccagcagcgcccaggtgctgcaggagctgctgagcagaattgagatgctggagcgggaggtgtctgtgctgcgggaccagtgcaatgccaactgctgccaggagagcgctgccaccggccagctggactacatcccccactgcagcggccacggcaacttctcctttgagagctgtggctgcatctgcaatgaaggctggtttgggaagaactgcagcgagccctactgccccctgggctgcagcagccggggcgtgtgtgtggatggccagtgcatctgtgacagcgagtacagcggagatgactgcagcgagctgcgctgccccacagactgcagcagccggggcctgtgtgtggatggagaatgtgtgtgtgaggagccctacacaggagaggactgccgggagctgcgctgccctggggactgcagcggcaagggccgctgtgccaacggcacctgcctgtgtgaggagggctacgtgggggaggactgtggccagaggcagtgcctgaatgcctgcagcggccggggccagtgtgaggagggcctgtgtgtgtgtgaggagggctaccagggccctgactgcagcgctgtggcccctcctgaggacctgcgggtggccggcatcagtgacaggagcattgagctggagtgggatggccccatggctgtgacagaatatgtgatctcctaccagcccacagccctgggcggcctgcagctgcagcagagggtgcctggggactggagcggcgtgaccatcacagagctggagcccggcctgacctacaacatctctgtgtatgctgtgatcagcaacatcctgagcctgcccatcacagccaaggtggccacccacctgagcaccccccagggcctgcagttcaagaccatcacagagaccaccgtggaggtgcagtgggagcccttctccttctcctttgatggctgggagatctccttcatccccaagaacaatgaaggaggagtgattgcccaggtgcccagtgatgtgaccagcttcaaccagacaggcctgaagccaggagaggagtacatcgtgaatgtggtggccctgaaggagcaggcccggagcccccccaccagcgcctctgtgtccacagtgattgatggccccacccagatcctggtgagagatgtgtctgacacagtggcctttgtggagtggatccccccccgggccaaggtggacttcatcctgctgaagtatggcctggtgggcggggagggcggccgcaccaccttccggctgcagccccccctgagccagtacagcgtgcaggccctgcggcccggcagccgctatgaggtgtctgtgtctgctgtgcggggcaccaatgaaagtgacagcgccaccacccagttcaccacagaaattgatgcccccaagaacctgcgggtgggcagcaggacagccaccagcctggacctggagtgggacaacagcgaggccgaggtgcaggagtacaaggtggtgtacagcaccctggccggggagcagtaccacgaggtgctggtgccccggggcatcggccccaccacccgggccaccctgacagacctggtgcccggcacagaatatggagtgggcatctctgctgtgatgaacagccagcagagcgtgcctgccaccatgaatgccaggacagagctggacagcccccgggacctgatggtgacagccagcagcgagaccagcatcagcctcatctggaccaaggccagcggccccatcgaccactaccgcatcaccttcacccccagcagcggcatcgccagcgaggtgacagtgcccaaggacaggaccagctacaccctgacagacctggagcccggggctgagtacatcatctctgtgacagctgagcggggccggcagcagagcctggagagcacagtggatgccttcaccggcatcgacccccccaaggacatcaccatcagcaatgtgaccaaggacagcgtgatggtgtcctggagcccccctgtggccagctttgactactacagagtgtcctaccggcccacccaggtgggccgcctggacagctctgtggtgcccaacacagtgacagagttcaccatcacccggctgaacccagccacagaatatgagatcagcctgaacagcgtgcggggccgggaggagagcgagcgcatctgcaccctggtgcacacagccatggacaaccctgtggacctgattgccaccaacatcacccccacagaggccctgctgcagtggaaggcccctgtgggggaggtggagaactacgtgattgtgctgacccactttgctgtggccggggagaccatcctggtggatggagtgtctgaggagttccggctggtggacctgctgcccagcacccactacacagccaccatgtatgccaccaacggccccctgaccagcggcaccatcagcaccaacttcagcaccctgctggaccccccagccaacctgacagccagcgaggtgacccggcagagcgccctgatctcctggcagccccccagggctgagattgaaaattatgtgctgacctacaagagcacagatggcagcaggaaggagctgattgtggatgctgaggacacctggatccggctggagggcctgctggagaacacagactacacagtgctgctgcaggccgcccaggacaccacctggagcagcatcaccagcacagccttcaccactggaggccgggtcttcccccacccccaggactgtgcccagcacctgatgaatggagacaccctgtctggagtgtaccccatcttcctgaatggagagctgagccagaagctgcaggtgtactgtgacatgaccacagatggcggcggctggatcgtgttccagaggcggcagaatggccagacagacttcttcaggaagtgggccgactacagagtgggctttggaaatgtggaggatgagttctggctgggcctggacaacatccaccgcatcaccagccagggccgctatgagctgcgggtggacatgagagatggccaggaggccgcctttgccagctatgaccgcttctctgtggaggacagcaggaacctgtacaagctgagaattggcagctacaatggaacagctggggacagcctgagctaccaccagggccggcccttcagcacagaagatcgggacaatgatgtggccgtgaccaactgtgccatgagctacaagggggcctggtggtacaagaactgccacaggaccaacctgaatggcaagtacggggagagccgccacagccagggcatcaactggtaccactggaagggccacgagttcagcatcccctttgtggagatgaagatgaggccctacaaccaccggctgatggccggcaggaagaggcagagcctgcagttctag

SEQ ID NO: 298937 - DNA, 3807 bp, Artificial Sequence
  derived and/or modified sequence
atgggcgccgacggcgagaccgtggtgctgaagaacatgctgatcgggattaaccttatccttctggggtcgatgatcaagccctcggagtgccagctggaggtgactactgaacgtgttcagagacagagtgtcgaagaagaagggggtattgcaaactacaacactagtagcaaggagcaaccggtcgtgttcaaccacgtatacaacattaatgtgcccctggacaatttatgttcgtctggcctggaagcctctgctgagcaggaagtctctgcggaagacgagaccctcgccgaatatatgggacagaccagcgaccacgaaagccaggtcacctttacgcatcggatcaatttccccaaaaaggcatgcccatgcgctagcagcgcgcaagttcttcaggagctgctgtctagaatcgaaatgctggaaagggaagtgtctgtactgcgggaccaatgtaacgctaattgctgtcaggagtctgccgcaacagggcagctggactacatcccccattgttcagggcatggaaacttctcattcgagtcttgtggctgtatatgtaacgaaggatggttcggtaagaattgctccgaaccctactgccctctgggatgctcatcacgcggtgtctgcgtggatggccaatgtatttgcgattcggagtatagtggggacgactgctccgagctgaggtgccctacagactgtagcagcaggggactgtgcgtggacggcgagtgcgtgtgcgaggagccatatacaggagaggattgcagggaactacggtgcccaggcgattgtagcggtaaaggtcgctgcgctaacggtacatgtctgtgtgaagaaggttatgtgggcgaggactgcggacaaagacagtgtttgaacgcctgctccggtagagggcagtgcgaagaaggactgtgtgtctgcgaggagggatatcaggggccggattgttctgcagtggccccccccgaggatctgagggttgccggaatcagtgatcgaagcattgagctggaatgggacggccctatggcagttacggagtacgtgatctcctaccagcccaccgcactaggcggcctgcagctgcagcagcgagtccctggcgattggagtggcgttacaatcaccgagttggagccgggcctgacatacaatatcagcgtctacgccgttatcagtaacattctatcccttccaatcacggccaaggtggctacccacctttcgacgcctcagggattgcagttcaagacaataacagagaccaccgtcgaggtccagtgggagcccttttccttttcatttgatggctgggaaataagcttcataccaaagaacaatgaggggggcgtgatcgcgcaggttcctagcgatgtaactagcttcaatcagacgggcctgaaaccaggggaggagtatatcgtcaatgtcgtggccctgaaagagcaggcccgcagtcccccaaccagtgctagcgtaagtacggttatagatgggcccactcagattctggtgcgagacgtcagtgacacggtcgcctttgtggagtggatcccaccccgcgctaaggtggacttcatcctgctgaaatatggcctcgtcggcggagaaggcggtcggaccacgtttcggctccagcctcctctctcccaatactccgtgcaggctttgcgacccggtagtaggtacgaggtcagtgtcagtgcagtccggggtacaaacgaatcagactcagccacaacacagttcaccaccgagatcgatgcacccaagaatcttagggtgggctcacggacggctactagtctggatctcgaatgggataactctgaggcagaagttcaggagtacaaagttgtctactccacgcttgctggtgagcaataccacgaggttcttgtacctagaggaattggtccgaccactcgcgctaccctcaccgacctagttcccggaaccgaatatggcgtgggaattagtgccgttatgaatagccaacagtccgtcccagctactatgaatgcaagaacggagctcgattccccacgcgacctgatggtgacagcgagttccgagacttcaatcagcctgatttggacaaaagcatctggcccgatagaccactatagaatcaccttcacgccatcctctgggattgcctcagaggtcacagtaccgaaagaccgaacgagctacacacttactgaccttgaaccaggtgctgagtatattatatccgtgactgctgaaagaggtcggcagcaatccctggagtccactgttgatgcctttactggcattgacccacccaaagacatcacaatatcaaatgtcacaaaggactccgtgatggtctcttggagcccacccgtggccagcttcgattactaccgggtgtcataccgccctacccaggtgggaaggctggattcttctgtggtccctaacacagtaacggagtttacgattacacgcctcaacccagcaacagaatatgagatctctctgaactcagtcaggggccgcgaggagagcgaacggatttgcacactggtgcacaccgccatggacaatcccgtggatttaatcgccactaatatcacccctaccgaagccctgttgcagtggaaggcccccgttggagaagttgagaattatgtcatcgtcctcactcacttcgcggtggctggcgaaacgattttggtggatggtgttagcgaggaattccgtctggttgatctgctgccctccacccactataccgccactatgtacgctacaaacggcccactgacgtcgggaacaatctctactaacttttccaccctcctagatcctcccgccaatctcacagcttcggaggtgacccgacaaagcgcgttaatatcatggcaacccccacgggcggaaattgaaaattatgtgctgacatacaagtcaaccgatggttcccggaaagaactcatcgtggacgccgaagatacctggattcgtttggagggactactggagaatactgattatacggttctgctgcaggccgcacaagacactacttggtcgtcgataacctcgaccgccttcactactggaggaagggtgttcccacacccacaagactgtgcccagcacttgatgaacggagacacccttagcggagtctatccaatctttttgaacggagaactgagccagaagctccaggtttactgcgacatgactacagacggcggcggctggatagtctttcagcgccgtcaaaatgggcagacagacttctttcgcaagtgggccgattatcgcgttggctttggcaacgtggaagatgaattctggctcgggctggataacattcatcgtatcacatctcagggtagatacgaactaagagtcgacatgcgcgacgggcaagaagccgcatttgcttcatatgaccggttttctgtcgaagattccaggaatctgtacaaactgcgcatcggcagctataatggcacagcaggtgactctctgtcataccaccaggggcggccctttagtacagaagatcgagacaatgacgtggcagtgaccaattgcgcaatgtcttataagggcgcttggtggtacaaaaattgtcaccgaaccaatctgaacggaaagtacggcgagtcccgacattcccagggtatcaactggtatcactggaaggggcatgagttctcaatcccatttgtagaaatgaagatgaggccttacaaccacaggctcatggccggcagaaagagacagagcttgcagttctag

SEQ ID NO: 298938 - DNA, 3807 bp, Artificial Sequence
  derived and/or modified sequence
atgggagccgatggagaaacagtcgttctcaagaatatgttaatcggtatcaacctgatactgctgggctcaatgatcaaaccaagcgaatgccagctcgaagtcaccaccgaacgtgtgcagcgccagtcagtcgaagaggaggggggaatcgcaaactataataccagcagcaaagagcagcccgtggtgttcaaccacgtttataacatcaatgtgcctttagacaacttatgcagttctggattagaggcgtccgcagagcaggaggtgagcgctgaagatgaaactttagccgaatatatgggacaaacgagtgatcacgaaagtcaggttaccttcactcatcgaataaatttccccaagaaggcttgcccatgcgcttccagtgcgcaagtgctgcaggaactactgtccagaatcgagatgctcgagcgcgaagtatcggttctccgggaccagtgtaacgctaattgctgtcaggaatcagccgctactggtcagctggattatatcccacattgttctggacacggcaatttcagctttgaaagctgtggttgtatatgtaatgaaggctggttcgggaagaactgttccgaaccttactgccctctgggctgcagctccagaggggtctgcgttgatggccagtgcatctgcgactccgagtactcgggcgacgattgtagtgagctcagatgccctacagattgctcctccaggggtctctgtgtggatggtgagtgcgtgtgcgaggaaccttatactggggaagattgtcgcgaactcaggtgccccggagattgcagtggcaaaggccgatgtgcaaacggcacatgtctttgtgaggaagggtatgttggtgaggattgcggccaacgacagtgtctcaacgcctgctccggacgagggcagtgtgaggagggcttgtgcgtctgcgaggaagggtatcagggacccgactgctctgccgtggctcctccggaggatctgcgcgtcgccggaatttcggaccgatccattgaactcgagtgggacgggcctatggcggtcaccgaatacgtaatctcataccagccaactgcgctcggcggtcttcagctgcagcagagagttcccggagattggtcaggcgttacaattacagagcttgagccgggactgacctataatatctctgtgtatgctgtgatctctaacattctatctttaccgattacagcaaaagtcgccactcacttgagtactccacaggggttgcagtttaagacaatcaccgaaactaccgtcgaggtgcagtgggagccctttagcttttcatttgacggctgggagatttcctttatccccaagaacaacgaaggcggtgtgattgcgcaggtccccagcgatgtgaccagctttaaccagaccggcctgaagccaggcgaagaatacattgtcaacgttgtagccttgaaggagcaggctagatctccccctacgagtgccagtgtgtcaactgtgatcgacggaccaacgcagatcttggtgagggacgtgtccgacaccgttgctttcgtggagtggatccccccacgggcaaaagtggattttattcttctgaaatatgggcttgtggggggagaaggaggcagaactacattccgtctgcagccaccactttcccagtactcggtgcaggccctgaggccgggtagcagatatgaagtgtccgtaagcgcagtgaggggaacgaacgagtccgattccgccaccactcagttcaccacggagatcgacgcacccaagaatctgcgagtaggctccaggaccgcaacgtctctggacctggagtgggataattcagaagcagaggtccaggagtacaaagtcgtttactctactctggccggagaacagtatcatgaggtgttagtgccacggggtatcgggccaacaacgcgcgcaaccctcactgatttagttccaggaactgagtatggagtgggaatctcagccgttatgaactcccaacagtccgtgcccgctacaatgaacgccaggacggaactggactcccctagagatctgatggttactgcctctagcgagacctccatcagcctcatatggacaaaggccagcggccctattgatcattatagaattactttcactccgtcatctggcattgcaagcgaagtgacagtgcctaaagaccgcacatcctacactttaacagacctggaaccaggtgcggaatacatcatatctgtgacagccgaacggggaaggcaacaatctctcgagagtacagtcgacgcatttacaggaattgatccaccaaaggacattacaatcagcaacgttacaaaagattcagtgatggtctcatggagtcctcctgtggcttcgttcgattattaccgagtctcttatagaccaacacaggtggggaggctagattcctccgtggtgccaaacaccgtaacagaattcactattacgaggctaaacccagctacagagtacgagatctctctgaactccgttcggggtagggaagaatctgaacgcatttgcactctggtgcataccgccatggacaatccggtcgatcttatcgcgacgaacattacacctaccgaagctttgctgcagtggaaggccccagtgggtgaggtagagaattacgtgattgtcttgacccacttcgccgtagctggcgagaccattcttgttgacggggtcagcgaagaattccgcctcgttgatctgctgccaagcacccactacactgctaccatgtatgccacaaacgggcctctgacatcaggcacaatcagtacgaacttctccaccctcttagacccaccggcaaacctgacggctagcgaggtaactaggcagtctgcattgatcagctggcaaccccctagggccgaaatcgaaaactacgtcctgacgtataaatccaccgacggttcccggaaggaattgatagtggatgccgaggacacatggataagactggagggacttctggaaaataccgattacacggtgctgttgcaggctgctcaggatacgacctggagcagcatcacaagcactgcgtttacaacaggtgggagagtattcccacacccgcaggactgtgctcaacatctgatgaacggggacaccctctctggcgtgtacccgatttttctgaacggcgaactcagtcaaaaattgcaggtgtactgtgacatgacaactgatggcggagggtggatcgtgttccagcgcaggcaaaatggacaaactgatttctttcggaagtgggcagactatcgggtcggcttcgggaacgtcgaagatgagttctggttgggcctggacaacatccataggatcacttctcaaggccgatacgaactgcgggtggatatgagagacggccaagaggcggcattcgcatcatacgatcggttttccgtcgaagactcgcgaaatctgtacaagcttagaatcggtagttacaacggaacagcgggtgattcattgagctaccaccagggccgtccattctcaactgaggatcgggacaatgacgtagctgtaaccaattgcgccatgtcctacaaaggcgcttggtggtacaaaaactgccatcggaccaatctgaatgggaagtacggcgagtcacggcattctcagggtattaattggtatcattggaaaggccatgaattctcaataccctttgtcgagatgaaaatgcgcccatataaccaccgacttatggctggcagaaaacggcagagcctgcagttttag

SEQ ID NO: 298939 - DNA, 4920 bp, Artificial Sequence
  derived and/or modified sequence
ccaggcttcctcctctctttcacgtcagaggcaggaaccgactgtgctaaggctgttggctcaacacccagaggagacgggcagacccagggagagtgagagaagggggtcctctctgacccaaggaattaccactagtggagtgaagccacctgactttttgatcttattttggttgcctcctcattctccttccacccgtagccctgacagcttgggtttcatttctttcgtggagccttgtctcttcctcccagaataggaggaagggaagagaagggaaagaggagggctctctaggtgagcgcatcagctggctccagcctgagcaagcaagaattttcttcccaggaagctcctctcgctccccggccgcccacccccagcctgggtggctgtatcgttttaactgcatagagggcaggtctcttttggaattaggattaaagaaagtgcagtaaagagaaagcatcgaagacaccatcacaaaagattcccacaactccatgctgtgtgctgcaggctggtcctgaacccagatctctggctgagaggatgggggcagatggggaaacagtggttctgaagaacatgctcattggcatcaacctgatccttctgggctccatgatcaagccttcagagtgtcagctggaggtcaccacagaaagggtccagagacagtcagtggaggaggagggaggcattgccaactacaacacatccagcaaagagcagcctgtggtcttcaaccacgtgtacaacattaacgtgcccttggacaacctctgctcctcagggctagaggcctctgctgagcaggaggtgagtgcagaagacgagactctggcagagtacatgggccagacctcagaccacgagagccaggtcacctttacacacaggatcaacttccccaaaaaggcctgtccatgtgccagttcagcccaggtgctgcaggagctgctgagccggatcgagatgctggagagggaggtgtcggtgctgcgagaccagtgcaacgccaactgctgccaagaaagtgctgccacaggacaactggactatatccctcactgcagtggccacggcaactttagctttgagtcctgtggctgcatctgcaacgaaggctggtttggcaagaattgctcggagccctactgcccgctgggttgctccagccggggggtgtgtgtggatggccagtgcatctgtgacagcgagtacagcggggatgactgttccgaactccggtgcccaacagactgcagctcccgggggctctgcgtggacggggagtgtgtctgtgaagagccctacactggcgaggactgcagggaactgaggtgccctggggactgttcggggaaggggagatgtgccaacggtacctgtttatgcgaggagggctacgttggtgaggactgcggccagcggcagtgtctgaatgcctgcagtgggcgaggacaatgtgaggaggggctctgcgtctgtgaagagggctaccagggccctgactgctcagcagttgcccctccagaggacttgcgagtggctggtatcagcgacaggtccattgagctggaatgggacgggccgatggcagtgacggaatatgtgatctcttaccagccgacggccctggggggcctccagctccagcagcgggtgcctggagattggagtggtgtcaccatcacggagctggagccaggtctcacctacaacatcagcgtctacgctgtcattagcaacatcctcagccttcccatcactgccaaggtggccacccatctctccactcctcaagggctacaatttaagacgatcacagagaccaccgtggaggtgcagtgggagcccttctcattttccttcgatgggtgggaaatcagcttcattccaaagaacaatgaagggggagtgattgctcaggtccccagcgatgttacgtcctttaaccagacaggactaaagcctggggaggaatacattgtcaatgtggtggctctgaaagaacaggcccgcagcccccctacctcggccagcgtctccacagtcattgacggccccacgcagatcctggttcgcgatgtctcggacactgtggcttttgtggagtggattccccctcgagccaaagtcgatttcattcttttgaaatatggcctggtgggcggggaaggtgggaggaccaccttccggctgcagcctcccctgagccaatactcagtgcaggccctgcggcctggctcccgatacgaggtgtcagtcagtgccgtccgagggaccaacgagagcgattctgccaccactcagttcacaacagagatcgatgcccccaagaacttgcgagttggttctcgcacagcaaccagccttgacctcgagtgggataacagtgaagccgaagttcaggagtacaaggttgtgtacagcaccctggcgggtgagcaatatcatgaggtactggtccccaggggcattggtccaaccaccagggccaccctgacagatctggtacctggcactgagtatggagttggaatatctgccgtcatgaactcacagcaaagcgtgccagccaccatgaatgccaggactgaacttgacagtccccgagacctcatggtgacagcctcctcggagacctccatctccctcatctggaccaaggccagtggccccattgaccactaccgaattacctttaccccatcctctgggattgcctcagaagtcaccgtacccaaggacaggacctcatacacactaacagatctagagcctggggcagagtacatcatttccgtcactgctgagaggggtcggcagcagagcttggagtccactgtggatgctttcacaggaattgatcccccaaaagacatcacaattagcaatgtgaccaaggactcagtgatggtctcctggagccctcctgttgcatctttcgattactaccgagtatcatatcgacccacccaagtgggacgactagacagctcagtggtgcccaacactgtgacagaattcaccatcaccagactgaacccagctaccgaatacgaaatcagcctcaacagcgtgcggggcagggaggaaagcgagcgcatctgtactcttgtgcacacagccatggacaaccctgtggatctgattgctaccaatatcactccaacagaagccctgctgcagtggaaggcaccagtgggtgaggtggagaactacgtcattgttcttacacactttgcagtcgctggagagaccatccttgttgacggagtcagtgaggaatttcggcttgttgacctgcttcctagcacccactatactgccaccatgtatgccaccaatggacctctcaccagtggcaccatcagcaccaacttttctactctcctggaccctccggcaaacctgacagccagtgaagtcaccagacaaagtgccctgatctcctggcagcctcccagggcagagattgaaaattatgtcttgacctacaaatccaccgatggaagccgcaaggagctgattgtggatgcagaagacacctggattcgactggagggcctgttggagaacacagactacacggtgctcctgcaggcagcacaggacaccacgtggagcagcatcacctccaccgctttcaccacaggaggccgggtgttccctcatccccaagactgtgcccagcatttgatgaatggagacactttgagtggggtttaccccatcttcctcaatggggagctgagccagaaattacaagtgtactgtgatatgaccaccgacgggggcggctggattgtattccagaggcggcagaatggccaaactgattttttccggaaatgggctgattaccgtgttggcttcgggaacgtggaggatgagttctggctggggctggacaatatacacaggatcacatcccagggccgctatgagctgcgcgtggacatgcgggatggccaagaggccgccttcgcctcctacgacaggttctctgtcgaggacagcagaaacctgtacaaactccgcataggaagctacaacggcactgcgggggactccctcagctatcatcaaggacgccctttctccacagaggatagagacaatgatgttgcagtgactaactgtgccatgtcgtacaagggagcatggtggtataagaactgccaccggaccaacctcaatgggaagtacggggagtccaggcacagtcagggcatcaactggtaccattggaaaggccatgagttctccatcccctttgtggaaatgaagatgcgcccctacaaccaccgtctcatggcagggagaaaacggcagtccttacagttctgagcagtgggcggctgcaagccaaccaatattttctgtcatttgtttgtattttataatatgaaacaaggggggagggtaatagcaatgtgttttgcaacatattaagagtatgtgaaggaagcagggatgtcgcaggaatccgctggctaacatctgctcttggtttctgctgccctggagcctgaccctcagtctccattctccctcctacccaggcctcctcaaccttcacctcctttcccaccaaggaggagaagtaggaagttttcttaaagggccaattcaaagccaagtcgtggggtgcagattgttatggtgacaggcacacacatttttctacccttcttctgagatgtcctctgccttccaggtatttgtgattttgtcacagcctgacatggccaggttctcacactggcccagagaaaagagcctcagcaagagagttttgccaacaattccccttaaaaggaaacagatcaactacaccgcatcccaacaacccaggttcttttccttccttccttccttcctcccttccttctttcctgccttccc

SEQ ID NO: 298940 - protein, 269 aa, Artificial Sequence
  derived and/or modified sequence
QNKELCDVTSSTGLLDSIKVMASHVKEQLKDKGTSEVAQPIVSPDPTDCADILLNGYRSSGGYRIWPKSWMTVGTLNVYCDMETDGGGWTVIQRRGNYGNPSDYFYKPWKNYKLGFGNIEKDFWLGNDRIFALTNQRNYMIRFDLKDKENDTRYAIYQDFWIENEDYLYCLHIGNYSGDAGNSFGRHNGHNFSTIDKDHDTHETHCAQTYKGGWWYDRCHESNLNGLYLNGEHNSYADGIEWRAWKGYHYSLPQVEMKIRPVEFNIIGN

SEQ ID NO: 298941 - protein, 177 aa, Artificial Sequence
  derived and/or modified sequence
  misc_feature (1)..(1): Xaa can be any naturally occurring amino acid
XINFPKKACPCASSAQVLQELLSRIEMLEREVSVLRDQCNANCCQESAATVAPPEDLRVAGISDRSIELEWDGPMAVTEYVISYQPTALGGLQLQQRVPGDWSGVTITELEPGLTYNISVYAVISNILSLPITAKVATHLSTPQGLQFKTITETTVEVQWEPFSFSFDGWEISFIPK

SEQ ID NO: 298942 - DNA, 534 bp, Artificial Sequence
  derived and/or modified sequence
tgaatcaacttccccaagaaggcctgcccctgcgccagcagcgcccaggtgctgcaggagctgctgagcagaatcgagatgctggagagagaggtgagcgtgctgagagaccagtgcaacgccaactgctgccaggagagcgccgccaccgtggccccccccgaggacctgagagtggccggcatcagcgacagaagcatcgagctggagtgggacggccccatggccgtgaccgagtacgtgatcagctaccagcccaccgccctgggcggcctgcagctgcagcagagagtgcccggcgactggagcggcgtgaccatcaccgagctggagcccggcctgacctacaacatcagcgtgtacgccgtgatcagcaacatcctgagcctgcccatcaccgccaaggtggccacccacctgagcaccccccagggcctgcagttcaagaccatcaccgagaccaccgtggaggtgcagtgggagcccttcagcttcagcttcgacggctgggagatcagcttcatccccaagtag

SEQ ID NO: 298943 - DNA, 534 bp, Artificial Sequence
  derived and/or modified sequence
tagatcaacttccctaagaaagcttgcccttgcgccagttctgcacaggtgctccaagagttgttatcaagaatcgagatgttggagcgagaagtctctgttctgcgggatcagtgcaacgctaactgctgccaggagtctgccgccacggtggctccccctgaggatcttcgggttgcgggcatctcagatcgctcgattgaactggagtgggatggtccaatggccgtcaccgagtacgtgatctcctaccagcccacggctctgggggggctgcaactgcagcaacgggtaccgggcgactggagcggagtcactatcactgagctcgagcccggactgacctataacatctccgtttacgcagtgatctcgaacattctctcccttcccatcaccgccaaggtggcaactcacctgagcactcctcaggggctccagttcaagaccattactgaaaccacagtagaagtgcagtgggaacccttctccttctcctttgacggctgggaaattagctttataccgaaatag

SEQ ID NO: 298944 - DNA, 534 bp, Artificial Sequence
  derived and/or modified sequence
tgaatcaacttccccaagaaggcctgcccctgtgccagcagcgcccaggtgctgcaggagctgctgagcagaattgagatgctggagcgggaggtgtctgtgctgcgggaccagtgcaatgccaactgctgccaggagagcgctgccaccgtggcccccccagaggacctgcgggtggccggcatcagtgacaggagcattgagctggagtgggatggccccatggctgtgacagaatatgtgatctcctaccagcccacagccctgggcggcctgcagctgcagcagagggtgcctggggactggagcggcgtgaccatcacagagctggagcccggcctgacctacaacatctctgtgtatgctgtgatcagcaacatcctgagcctgcccatcacagccaaggtggccacccacctgagcaccccccagggcctgcagttcaagaccatcacagagaccaccgtggaggtgcagtgggagcccttctccttctcctttgatggctgggagatctccttcatccccaagtag

SEQ ID NO: 298945 - DNA, 534 bp, Artificial Sequence
  derived and/or modified sequence
tgaatcaacttccccaagaaggcctgcccctgcgccagcagcgcccaagtgctgcaggagttactgagtcgcattgagatgctggaaagggaagtttcagtcctgcgggatcagtgcaacgctaattgctgccaagaatcagctgccactgtagccccaccagaagacctgagggtcgctggcatctcggatcgcagtattgagctagagtgggacgggcctatggccgtaacagaatacgttatttcgtatcagcccaccgcgctggggggtctgcagctccaacagagagtgcctggcgactggtctggggtgacgattacagaactggagcctggcctgacctacaatattagtgtgtacgctgtgattagtaatatcctgtctttacctatcacagccaaggtcgcaacccacttgagcacaccccagggactgcagttcaagacgataactgaaactacagtggaggtccagtgggagccgttcagcttttcttttgatggatgggaaatctcttttatacctaagtag

SEQ ID NO: 298946 - DNA, 534 bp, Artificial Sequence
  derived and/or modified sequence
taaattaactttcccaaaaaagcttgtccctgtgcaagcagcgctcaggtgctgcaggaactgctctcacgcatcgagatgctcgagcgtgaggtcagcgtgcttagggaccagtgcaatgctaactgttgccaggagtcagctgcaacagtcgccccacctgaggacttacgagttgcaggcatcagcgataggagcattgaactagaatgggatggtcccatggctgtgactgagtacgtaatttcctaccagcccacagccctggggggtctgcagttgcagcagcgcgtccctggagattggagcggagtcaccattaccgagcttgagccgggactgacctataacatttcagtttacgctgtgatttccaatatcctatctctgcctataacagcaaaagtcgctactcacctttcaacacctcaaggattacagttcaagaccatcacagagacaacagttgaagtacaatgggagccgtttagcttctcctttgatggctgggaaatatccttcatccccaagtag

SEQ ID NO: 298947 - DNA, 529 bp, Artificial Sequence
  derived and/or modified sequence
gatcaacttccccaaaaaggcctgtccatgtgccagttcagcccaggtgctgcaggagctgctgagccggatcgagatgctggagagggaggtgtcggtgctgcgagaccagtgcaacgccaactgctgccaagaaagtgctgccacagttgcccctccagaggacttgcgagtggctggtatcagcgacaggtccattgagctggaatgggacgggccgatggcagtgacggaatatgtgatctcttaccagccgacggccctggggggcctccagctccagcagcgggtgcctggagattggagtggtgtcaccatcacggagctggagccaggtctcacctacaacatcagcgtctacgctgtcattagcaacatcctcagccttcccatcactgccaaggtggccacccatctctccactcctcaagggctacaatttaagacgatcacagagaccaccgtggaggtgcagtgggagcccttctcattttccttcgatgggtgggaaatcagcttcattccaaag

SEQ ID NO: 298948 - protein, 285 aa, Artificial Sequence
  derived and/or modified sequence
MMEAIKKKMQMLKLDKENALDRAEQAEAEQKQAEERSKQLEDELAAMQKKLKGTEDELDKYSEALKDAQEKLELAEKKAADAEAEVASLNRRIQLVEEELDRAQERLATALQKLEEAEKAADESERGMKVIENRALKDEEKMELQEIQLKEAKHIAEEADRKYEEVARKLVIIEGDLERTEERAELAESKCSELEEELKNVTNNLKSLEAQAEKYSQKEDKYEEEIKILTDKLKEAETRAEFAERSVAKLEKTIDDLEDELYAQKLKYKAISEELDHALNDMTSI

SEQ ID NO: 298949 - protein, 75 aa, Artificial Sequence
  derived and/or modified sequence
MMEAIKKKMQMLKLDKENALDRAEQAEAEQKQAEERSKQLEDELAAMQKKLKGTEDELDKYSEALKDAQEKLELA

SEQ ID NO: 298950 - protein, 248 aa, Artificial Sequence
  derived and/or modified sequence
MAGITTIEAVKRKIQVLQQQADDAEERAERLQREVEGERRAREQAEAEVASLNRRIQLVEEELDRAQERLATALQKLEEAEKAADESERGMKVIENRALKDEEKMELQEIQLKEAKHIAEEADRKYEEVARKLVIIEGDLERTEERAELAESRCREMDEQIRLMDQNLKCLSAAEEKYSQKEDKYEEEIKILTDKLKEAETRAEFAERSVAKLEKTIDDLEDELYAQKLKYKAISEELDHALNDMTSI

SEQ ID NO: 298951 - protein, 451 aa, Artificial Sequence
  derived and/or modified sequence
MAYSEEHKGMPCGFIRQNSGNSISLDFEPSIEYQFVERLEERYKCAFCHSVLHNPHQTGCGHRFCQHCILSLRELNTVPICPVDKEVIKSQEVFKDNCCKREVLNLYVYCSNAPGCNAKVILGRYQDKRRNLQQHEHSALREHMRLVLEKNVQLEEQISDLHKSLEQKESKIQQLAETIKKLEKEFKQFAQLFGKNGSFLPNIQVFASHIDKSAWLEAQVHQLLQMVNQQQNKFDLRPLMEAVDTVKQKITLLENNDQRLAVLEEETNKHDTHINIHKAQLSKNEERFKLLEGTCYNGKLIWKVTDYKMKKREAVDGHTVSIFSQSFYTSRCGYRLCARAYLNGDGSGRGSHLSLYFVVMRGEFDSLLQWPFRQRVTLMLLDQSGKKNIMETFKPDPNSSSFKRPDGEMNIASGCPRFVAHSVLENAKNAYIKDDTLFLKVAVDLTDLEDL

SEQ ID NO: 298952 - protein, 331 aa, Artificial Sequence
  derived and/or modified sequence
MNGTRNWCTLVDVHPEDQAAVYLKGRSGDKMIHEKNINQLKSEVQYIQEARNCLQKLREDISSKLDRNLGDSLHRQEIQVVLEKPNGFSQSPTALYSSPPEVDTCINEDVESLRKTVQDLLAKLQEAKRQHQSDCVAFEVTLSRYQREAEQSNVALQREEDRVEQKEAEVGELQRRLLGMETEHQALLAKVREGEVALEELRSNNADCQAEREKAATLEKEVAGLREKIHHLDDMLKSQQRKVRQMIEQLQNSKAVIQSKDATIQELKEKIAYLEAENLEMHDRMEHLIEKQISHGNFSTQARAKTENPGSIRISKPPSPKPMPVIRVVET

SEQ ID NO: 298953 - DNA, 996 bp, Artificial Sequence
  derived and/or modified sequence
atgaacggcaccagaaactggtgcaccctggtggacgtgcaccccgaggaccaggccgccgtgtacctgaagggcagaagcggcgacaagatgatccacgagaagaacatcaaccagctgaagagcgaggtgcagtacatccaggaggccagaaactgcctgcagaagctgagagaggacatcagcagcaagctggacagaaacctgggcgacagcctgcacagacaggagatccaggtggtgctggagaagcccaacggcttcagccagagccccaccgccctgtacagcagcccccccgaggtggacacctgcatcaacgaggacgtggagagcctgagaaagaccgtgcaggacctgctggccaagctgcaggaggccaagagacagcaccagagcgactgcgtggccttcgaggtgaccctgagcagataccagagagaggccgagcagagcaacgtggccctgcagagagaggaggacagagtggagcagaaggaggccgaggtgggcgagctgcagagaagactgctgggcatggagaccgagcaccaggccctgctggccaaggtgagagagggcgaggtggccctggaggagctgagaagcaacaacgccgactgccaggccgagagagagaaggccgccaccctggagaaggaggtggccggcctgagagagaagatccaccacctggacgacatgctgaagagccagcagagaaaggtgagacagatgatcgagcagctgcagaacagcaaggccgtgatccagagcaaggacgccaccatccaggagctgaaggagaagatcgcctacctggaggccgagaacctggagatgcacgacagaatggagcacctgatcgagaagcagatcagccacggcaacttcagcacccaggccagagccaagaccgagaaccccggcagcatcagaatcagcaagccccccagccccaagcccatgcccgtgatcagagtggtggagacctag

SEQ ID NO: 298954 - DNA, 996 bp, Artificial Sequence
  derived and/or modified sequence
atgaacggcacacgcaactggtgcaccctcgtagacgtgcaccccgaagatcaagccgcggtctatctcaaggggagatctggagataaaatgattcacgaaaagaacattaaccagttgaaatctgaggttcagtatatccaggaggcccggaactgcctgcagaaacttagagaagatatctcatccaaactcgaccgaaacctgggagacagtctgcatcggcaagagattcaggttgtcctggagaagccaaatggtttctcacagagcccaacagcactctacagctcccccccagaggtagatacatgcatcaacgaagacgttgagtcactgcggaaaaccgtgcaggacctgttagcgaagctgcaagaagctaagaggcagcaccaatctgactgtgttgcattcgaggtgaccctgtcgcggtatcagcgagaagccgagcagtctaacgtggcacttcagagggaagaggatagggtggagcagaaggaagcagaggtcggagagttacagagaagactgctgggcatggagaccgaacatcaggctttactcgcaaaggtgagggagggggaggtagcacttgaagaacttcgctccaacaatgctgattgccaggccgagcgcgagaaggccgcaacccttgaaaaagaggtcgctggtctgagggaaaagattcatcacctggacgatatgctgaaaagccaacagcgaaaggtgcgacagatgattgaacaactccagaactcaaaagccgttattcagtccaaggacgcgacgattcaggaattgaaagaaaagattgcatatttggaagcagagaatttggagatgcatgatcggatggagcacctaatcgaaaaacagatcagtcatgggaatttttccacacaggccagggccaaaacagagaacccaggttcaatcaggatttctaagccaccttcacccaaacccatgcccgtcatccgtgtagtcgagacgtag

SEQ ID NO: 298955 - DNA, 996 bp, Artificial Sequence
  derived and/or modified sequence
atgaatggcaccaggaactggtgcaccctggtggatgtgcaccctgaggaccaggccgctgtgtacctgaagggccgcagcggggacaagatgattcatgagaagaacatcaaccagctgaagtctgaggtgcagtacatccaggaggccaggaactgcctgcagaagctgcgggaggacatcagcagcaagctggacaggaacctgggggacagcctgcaccggcaggagatccaggtggtgctggagaagcccaacggcttcagccagagccccacagccctgtacagcagccccccagaggtggacacctgcatcaatgaagatgtggagagcctgaggaagacagtgcaggacctgctggccaagctgcaggaggccaagaggcagcaccagagcgactgtgtggcctttgaggtgaccctgagccgctaccagcgggaggccgagcagagcaatgtggccctgcagcgggaggaggacagagtggagcagaaggaggccgaggtgggggagctgcagaggcggctgctgggcatggagacagagcaccaggccctgctggccaaggtgcgggagggggaggtggccctggaggagctgcggagcaacaatgctgactgccaggccgagcgggagaaggccgccaccctggagaaggaggtggccggcctgcgggagaagatccaccacctggatgacatgctgaagagccagcagaggaaggtgcggcagatgattgagcagctgcagaacagcaaggctgtgatccagagcaaggatgccaccatccaggagctgaaggagaagatcgcctacctggaggccgagaacctggagatgcatgacaggatggagcacctgattgagaagcagatcagccacggcaacttcagcacccaggcccgggccaagacagaaaatcctggcagcatccgcatcagcaagccacccagccccaagcccatgcctgtgatccgggtggtggagacctag

SEQ ID NO: 298956 - DNA, 996 bp, Artificial Sequence
  derived and/or modified sequence
atgaacggcacccggaactggtgcaccctggtggacgtgcaccccgaagatcaggctgcagtatacctgaaggggagaagcggcgataaaatgatacacgagaagaacatcaaccagctgaagagcgaggtacagtatattcaggaggcccgcaattgtcttcagaagctgcgcgaggacatctcgtccaaattagatagaaatctgggagactctctccaccgacaggaaattcaggtggtcctggaaaagcctaatggcttctcccagagcccaaccgcactgtattcatctcctcccgaggtcgacacttgcatcaatgaggatgtggagagcctgcgaaagaccgtccaagacctcttagcaaaacttcaggaggcaaaacgacagcaccagagtgactgcgtcgctttcgaggtaacactctcccgctatcagagggaagctgaacagtccaatgttgcccttcagagagaagaagacagggtggaacagaaggaagccgaggtgggcgaactacaacgaagacttctcggtatggagactgagcaccaggctctactcgccaaagtgagggaaggagaagtggcgctggaggaactccgcagtaacaatgccgactgtcaagctgaaagagaaaaggctgctaccttagaaaaagaggtggcagggttgcgggagaagatacatcacttagatgatatgttgaaaagccaacaaagaaaggtgcgccagatgatcgagcagctccagaattccaaagcggtgattcagtcaaaagatgctactatccaggagctgaaagagaaaatcgcttatcttgaggccgagaacctggaaatgcacgaccgcatggagcacctgatcgaaaagcagatctcccacgggaacttcagcacacaggcccgggccaagacagagaaccccggtagcatccggatcagtaaaccaccatcaccaaagcctatgcctgtaattcgggtagtggaaacttag

SEQ ID NO: 298957 - DNA, 996 bp, Artificial Sequence
  derived and/or modified sequence
atgaatggcacccgcaactggtgtactctggtagacgtgcaccccgaggaccaagccgctgtgtacttgaagggacgctcaggagataaaatgatacatgagaaaaatatcaaccagcttaaaagtgaggtgcaatacattcaggaagctaggaattgcctccagaaactgagagaagatatttccagcaagctagatcgtaacttaggcgactctctgcatcgccaagaaatccaagtggttctggagaaacctaatgggttcagtcagagccccaccgcactctattccagtccccctgaagtggacacttgtataaacgaagatgttgagtctcttcggaagacagtgcaagacttgctggcaaaactgcaggaagccaaaaggcaacaccaaagcgactgcgtagcttttgaggtcactctctcccgatatcaacgagaagctgagcagagtaacgttgctctgcagcgcgaggaggaccgagtggagcagaaggaagccgaagtcggtgaactccaacgccgactgttgggcatggagacggaacaccaggcactgctcgcaaaggtaagggaaggggaggttgctctagaggagctgcgatccaataacgctgattgccaagctgagagggaaaaagcggcaaccctggaaaaggaggttgctggcttacgagagaagatccaccatctggatgatatgctgaagtcacagcagcgcaaggtcaggcaaatgatcgagcagctacagaattcgaaggctgtcatccaatctaaagacgccaccatccaagagttgaaagagaaaatcgcatatctggaggccgaaaatctagagatgcacgacaggatggaacacctgatcgagaagcagatttctcatggaaatttttctacccaggccagggcgaagaccgagaaccctggatcaatacggatctctaagccccctagtcctaagcccatgcctgtcatcagagtcgtggagacatag

SEQ ID NO: 298958 - DNA, 996 bp, Artificial Sequence
  derived and/or modified sequence
atgaacggcacccgaaactggtgtaccctggtggatgtccatcctgaggatcaagccgcggtctacctcaagggtaggagtggggataaaatgatccacgaaaagaacataaaccagctgaagtctgaggttcagtacattcaagaggcccgtaactgtctccaaaagctccgtgaagacataagctccaagctagaccgaaatctgggagactccttgcaccggcaggaaattcaggtcgtgctggaaaagccaaacgggttcagtcaatctccaactgccttgtacagcagccctcctgaagtggacacctgtattaacgaggacgtggagtcgctgagaaaaacagtgcaggaccttctggccaagctgcaagaagccaaaaggcagcaccaaagcgactgtgttgcctttgaagtgaccctcagccgctaccagagggaagccgaacagagtaatgttgcccttcaacgggaagaggaccgcgttgaacaaaaagaggccgaagtaggcgagctgcaacggaggctgttggggatggagacggagcatcaggcattattagccaaagtgcgggaaggggaagtggcattagaagaattaagatcaaataacgctgactgccaggctgaacgtgagaaggccgcaacactagagaaggaagtagccggtttgagggaaaagatacaccatttagacgacatgctgaagtcgcaacagagaaaagtgagacagatgatcgagcaactgcagaattccaaagccgtgatccagtcaaaggacgcaactattcaagaactgaaggagaaaattgcctacttagaagccgaaaatcttgagatgcacgaccggatggagcatctgattgaaaaacagatcagccatggcaatttttcgacccaagcacgcgccaagacggagaatcccggcagcattcggatctctaagcctccaagccctaaacctatgccagtgatcagagttgtcgagacttag

SEQ ID NO: 298959 - DNA, 996 bp, Artificial Sequence
  derived and/or modified sequence
atgaacggaactcggaattggtgtaccctcgtcgacgtgcacccagaagatcaagcagcagtttatctgaaagggcggagcggtgacaagatgatacacgagaaaaatattaaccaactaaagagtgaggtccaatatattcaggaagcaaggaattgcctgcagaagttgagagaagatatatctagcaagctggatcgtaatctcggcgactccctacatcggcaagaaattcaagttgtgttagagaagcccaatgggttttcacagtctccaactgctctgtacagctcaccaccggaagttgatacgtgtataaatgaagatgtggaatcactgcgcaaaacagtccaagacctgcttgctaagttacaggaggctaaaagacagcaccagtccgattgcgtggcatttgaagttactttatcacgctaccagagagaagctgagcagtctaatgtcgctctccagcgggaagaggatcgagtagaacagaaagaggcagaagtgggcgaactccagcggcgtctgctgggcatggaaactgagcaccaggcactgctggctaaggttcgggaaggagaggtggctcttgaggagttaagatcaaataacgctgactgccaggctgaacgtgagaaggccgcaacactagagaaggaagtagccggtttgagggaaaagatacaccatttagacgacatgctgaagtcgcaacagagaaaagtgagacagatgatcgagcaactgcagaattccaaagccgtgatccagtcaaaggacgcaactattcaagaactgaaggagaaaattgcctacttagaagccgaaaatcttgagatgcacgaccggatggagcatctgattgaaaaacagatcagccatggcaatttttcgacccaggccagagctaaaaccgagaatcccgggtctatcagaatatcaaagcctccatcccccaagcccatgccagtcatccgagtcgtcgaaacctag

SEQ ID NO: 298960 - DNA, 2933 bp, Artificial Sequence
  derived and/or modified sequence
gcccagttggagccagacagcggggtggacaagtggcgtgtgtgctgcgaccccgagggaagatgaacgggacgcggaactggtgtaccctggtggacgtgcacccagaggaccaggcggcggtgtacttgaaggggaggtctggagacaagatgattcacgagaagaatattaaccagctgaagagtgaggtccagtacatccaggaggccaggaactgcctacagaagctccgggaggatataagtagcaagcttgacaggaacctaggagattctctccatcgacaggagatacaggtggtgctagaaaagccaaatggctttagtcagagtcccacagccctgtacagcagcccacctgaggtggacacctgtataaatgaggatgttgagagcttgaggaagacggtgcaggacttgctggccaagcttcaggaggccaagcggcaacaccagtcagactgtgtggcttttgaggtcacactcagccggtaccagagggaagcagaacaaagtaatgtggcccttcagagagaggaggacagagtggagcagaaagaggcagaagtcggagagctgcagaggcgcttgctagggatggagacggagcatcaggccttactggcgaaagtgagggaaggggaggtggccctagaggaacttcggagcaacaatgctgactgccaagcagaacgagaaaaggctgctaccctggaaaaggaagtggccgggttgcgggagaagatccaccacttggatgacatgctcaagagccagcagcggaaagtccggcaaatgatagagcagctccagaattcaaaagctgtgatccagtcaaaggacgccaccatccaggagctcaaggagaaaatcgcctatctggaggcagagaatttagagatgcatgaccggatggaacacctgatagaaaaacaaatcagtcatggcaacttcagcacccaggcccgggccaagacagagaacccgggcagtattaggatatccaagccgcctagcccgaagcccatgcctgtcatccgagtggtggaaacctgagctgcctggagatggttgctgccattgctgctgcctctgcctcggagaagcccactgcccctgttggctgttaacactgcctttgacttcctgactgtcccctggctgcacccaggacttcgggctcctgtgtctcaccattcccaagcccctggccactctaagctgggcagacggagcacgagcacctattcaaggcactgcagccctttggaagacattgtcctgcaagcaggagccagggcaatatctatattcctacagtgactatttttctctgtagagagcctcccttctgttgtagactggactctggctgtgccataagccaggccttcatcagattgggagaggtgacaagatttgcctcagccctaaaagctggagacacagatgtccagagtgattggagaatgtcctgggggaatgaagttccttccacaaacacagctcagttcttagcaacaaactgtttgtttttctacttgctccatctgcagcctacgctgccctggcctcctgcagacagatagtggggttacctggcaaggcctggtgagagccagtgaacctaagctttgactgggtggccttgtctttctggggaggagggaatgtacattcagggagtagccttttgcggaaaaattctctagggctacagacagtcatgtgtgacttctctctgctgtgaaaactcccagagtctctttagggattttccctaaggtgtaccaccaggcacacctcagtcttcttgacccagagcctgaaaactgttttcactgggttccaccagtcccagcaaaatcctctttgtatttattttgctaagttattggtggttttgcttacatctcatgattgatataataccaaagttctatagccttctcttgcagtatttggatttgcttgaaaccgggaaaactgttcccattaggcttgttaatgtcagagtgacactattatgaatctttctctccctttcctctgcctgtttcttctctctttctccttcaaacttgctctgcagctaaggaaggtgagtctactttccctgaggctttggggtcagagtatatgttgtttggagaaagagggcaatcaggactcttctgggacccagatgagttcttcactagcccttctgaaccccttgctccataattggtcttttatcctggctctgaatgaccctgcaggtcatcatggttttctttttttattgtttttttttttttctgagacagagtctcactctgtcacccaggctggagtgcagtggcgcgatctcagctcactgcaacctctgcctcccggatttaagcgattcttctgcctcagcctcccgagtagctgggactacaggtgtgccaccacgcctggctgatttttgtatttttagtagagatggggtttcaccatactggctaggctggtctcgaattcctgacctcaggtgatccacccacctcggcttcccaaagtgctaggattataggcttgagctactgcgcccggcccatggtgtttttctttagggctcttcctacaaccttgagaagtagataggcatcagagtatggtactataggaatcagaaaaattcaaaacaaatgtggattaagtgtttaggctctatgtggctcacgcagccagaatccttaagtctgtgtgtttctgtgtctcaagactgggctcacattctggctttgtccataacaatgctctgggatttcagggagttccctcatttgtaaaatgagggggtcagagcaggtgatatccatgtttcttccctttctgatattgttgtctgtggcatattctttgtatggcgaatttaataaattatattaatgtgtctctttg

SEQ ID NO: 298961 - RNA, 996 nt, Artificial Sequence
  derived and/or modified sequence
augaacggcacccgaaacugguguacccugguggauguccauccugaggaucaagccgcggucuaccucaaggguaggaguggggauaaaaugauccacgaaaagaacauaaaccagcugaagucugagguucaguacauucaagaggcccguaacugucuccaaaagcuccgugaagacauaagcuccaagcuagaccgaaaucugggagacuccuugcaccggcaggaaauucaggucgugcuggaaaagccaaacggguucagucaaucuccaacugccuuguacagcagcccuccugaaguggacaccuguauuaacgaggacguggagucgcugagaaaaacagugcaggaccuucuggccaagcugcaagaagccaaaaggcagcaccaaagcgacuguguugccuuugaagugacccucagccgcuaccagagggaagccgaacagaguaauguugcccuucaacgggaagaggaccgcguugaacaaaaagaggccgaaguaggcgagcugcaacggaggcuguuggggauggagacggagcaucaggcauuauuagccaaagugcgggaaggggaaguggcauuagaagaauuaagaucaaauaacgcugacugccaggcugaacgugagaaggccgcaacacuagagaaggaaguagccgguuugagggaaaagauacaccauuuagacgacaugcugaagucgcaacagagaaaagugagacagaugaucgagcaacugcagaauuccaaagccgugauccagucaaaggacgcaacuauucaagaacugaaggagaaaauugccuacuuagaagccgaaaaucuugagaugcacgaccggauggagcaucugauugaaaaacagaucagccauggcaauuuuucgacccaagcacgcgccaagacggagaaucccggcagcauucggaucucuaagccuccaagcccuaaaccuaugccagugaucagaguugucgagacuuag

SEQ ID NO: 298962 - RNA, 996 nt, Artificial Sequence
  derived and/or modified sequence
augaacggaacucggaauugguguacccucgucgacgugcacccagaagaucaagcagcaguuuaucugaaagggcggagcggugacaagaugauacacgagaaaaauauuaaccaacuaaagagugagguccaauauauucaggaagcaaggaauugccugcagaaguugagagaagauauaucuagcaagcuggaucguaaucucggcgacucccuacaucggcaagaaauucaaguuguguuagagaagcccaauggguuuucacagucuccaacugcucuguacagcucaccaccggaaguugauacguguauaaaugaagauguggaaucacugcgcaaaacaguccaagaccugcuugcuaaguuacaggaggcuaaaagacagcaccaguccgauugcguggcauuugaaguuacuuuaucacgcuaccagagagaagcugagcagucuaaugucgcucuccagcgggaagaggaucgaguagaacagaaagaggcagaagugggcgaacuccagcggcgucugcugggcauggaaacugagcaccaggcacugcuggcuaagguucgggaaggagagguggcucuugaggaguuaagaucaaauaacgcugacugccaggcugaacgugagaaggccgcaacacuagagaaggaaguagccgguuugagggaaaagauacaccauuuagacgacaugcugaagucgcaacagagaaaagugagacagaugaucgagcaacugcagaauuccaaagccgugauccagucaaaggacgcaacuauucaagaacugaaggagaaaauugccuacuuagaagccgaaaaucuugagaugcacgaccggauggagcaucugauugaaaaacagaucagccauggcaauuuuucgacccaggccagagcuaaaaccgagaaucccgggucuaucagaauaucaaagccuccaucccccaagcccaugccagucauccgagucgucgaaaccuag

SEQ ID NO: 298963 - protein, 183 aa, Artificial Sequence
  derived and/or modified sequence
MERVQPLEENVGNAARPRFERNKLLLVASVIQGLGLLLCFTYICLHFSALQVSHRYPRIQSIKVQFTEYKKEKGFILTSQKEDEIMKVQNNSVIINCDGFYLISLKGYFSQEVNISLHYQKDEEPLFQLKKVRSVNSLMVASLTYKDKVYLNVTTDNTSLDDFHVNGGELILIHQNPGEFCVL

SEQ ID NO: 298964 - DNA, 3470 bp, Artificial Sequence
  derived and/or modified sequence
ggccctgggacctttgcctattttctgattgataggctttgttttgtctttacctccttctttctggggaaaacttcagttttatcgcacgttccccttttccatatcttcatcttccctctacccagattgtgaagatggaaagggtccaacccctggaagagaatgtgggaaatgcagccaggccaagattcgagaggaacaagctattgctggtggcctctgtaattcagggactggggctgctcctgtgcttcacctacatctgcctgcacttctctgctcttcaggtatcacatcggtatcctcgaattcaaagtatcaaagtacaatttaccgaatataagaaggagaaaggtttcatcctcacttcccaaaaggaggatgaaatcatgaaggtgcagaacaactcagtcatcatcaactgtgatgggttttatctcatctccctgaagggctacttctcccaggaagtcaacattagccttcattaccagaaggatgaggagcccctcttccaactgaagaaggtcaggtctgtcaactccttgatggtggcctctctgacttacaaagacaaagtctacttgaatgtgaccactgacaatacctccctggatgacttccatgtgaatggcggagaactgattcttatccatcaaaatcctggtgaattctgtgtcctttgaggggctgatggcaatatctaaaaccaggcaccagcatgaacaccaagctgggggtggacagggcatggattcttcattgcaagtgaaggagcctcccagctcagccacgtgggatgtgacaagaagcagatcctggccctcccgcccccacccctcagggatatttaaaacttattttatataccagttaatcttatttatccttatattttctaaattgcctagccgtcacaccccaagattgccttgagcctactaggcacctttgtgagaaagaaaaaatagatgcctcttcttcaagatgcattgtttctattggtcaggcaattgtcataataaacttatgtcattgaaaacggtacctgactaccatttgctggaaatttgacatgtgtgtggcattatcaaaatgaagaggagcaaggagtgaaggagtggggttatgaatctgccaaaggtggtatgaaccaacccctggaagccaaagcggcctctccaaggttaaattgattgcagtttgcatattgcctaaatttaaactttctcatttggtgggggttcaaaagaagaatcagcttgtgaaaaatcaggacttgaagagagccgtctaagaaataccacgtgctttttttctttaccattttgctttcccagcctccaaacatagttaatagaaatttcccttcaaagaactgtctggggatgtgatgctttgaaaaatctaatcagtgacttaagagagattttcttgtatacagggagagtgagataacttattgtgaagggttagctttactgtacaggatagcagggaactggacatctcagggtaaaagtcagtacggattttaatagcctggggaggaaaacacattctttgccacagacaggcaaagcaacacatgctcatcctcctgcctatgctgagatacgcactcagctccatgtcttgtacacacagaaacattgctggtttcaagaaatgaggtgatcctattatcaaattcaatctgatgtcaaatagcactaagaagttattgtgccttatgaaaaataatgatctctgtctagaaataccatagaccatatatagtctcacattgataattgaaactagaagggtctataatcagcctatgccagggcttcaatggaatagtatccccttatgtttagttgaaatgtccccttaacttgatataatgtgttatgcttatggcgctgtggacaatctgatttttcatgtcaactttccagatgatttgtaacttctctgtgccaaaccttttataaacataaatttttgagatatgtattttaaaattgtagcacatgtttccctgacattttcaatagaggatacaacatcacagaatctttctggatgattctgtgttatcaaggaattgtactgtgctacaattatctctagaatctccagaaaggtggagggctgttcgcccttacactaaatggtctcagttggatttttttttcctgttttctatttcctcttaagtacaccttcaactatattcccatccctctattttaatctgttatgaaggaaggtaaataaaaatgctaaatagaagaaattgtaggtaaggtaagaggaatcaagttctgagtggctgccaaggcactcacagaatcataatcatggctaaatatttatggagggcctactgtggaccaggcactgggctaaatacttacatttacaagaatcattctgagacagatattcaatgatatctggcttcactactcagaagattgtgtgtgtgtttgtgtgtgtgtgtgtgtgtgtatttcactttttgttattgaccatgttctgcaaaattgcagttactcagtgagtgatatccgaaaaagtaaacgtttatgactataggtaatatttaagaaaatgcatggttcatttttaagtttggaatttttatctatatttctcacagatgtgcagtgcacatgcaggcctaagtatatgttgtgtgtgttgtttgtctttgatgtcatggtcccctctcttaggtgctcactcgctttgggtgcacctggcctgctcttcccatgttggcctctgcaaccacacagggatatttctgctatgcaccagcctcactccaccttccttccatcaaaaatatgtgtgtgtgtctcagtccctgtaagtcatgtccttcacagggagaattaacccttcgatatacatggcagagttttgtgggaaaagaattgaatgaaaagtcaggagatcagaattttaaatttgacttagccactaactagccatgtaaccttgggaaagtcatttcccatttctgggtcttgcttttctttctgttaaatgagaggaatgttaaatatctaacagtttagaatcttatgcttacagtgttatctgtgaatgcacatattaaatgtctatgttcttgttgctatgagtcaaggagtgtaaccttctcctttactatgttgaatgtatttttttctggacaagcttacatcttcctcagccatctttgtgagtccttcaagagcagttatcaattgttagttagatattttctatttagagaatgcttaagggattccaatcccgatccaaatcataatttgttcttaagtatactgggcaggtcccctattttaagtcataattttgtatttagtgctttcctggctctcagagagtattaatattgatattaataatatagttaatagtaatattgctatttacatggaaacaaataaaagatctcagaattc

SEQ ID NO: 298965 - protein, 2294 aa, Artificial Sequence
  derived and/or modified sequence
MARFGEAVVARPGSGDGDSDQSRNRQGTPVPASGQAAAYKQTKAQRARTMALYNPIPVRQNCFTVNRSLFIFGEDNIVRKYAKKLIDWPPFEYMILATIIANCIVLALEQHLPEDDKTPMSRRLEKTEPYFIGIFCFEAGIKIVALGFIFHKGSYLRNGWNVMDFIVVLSGILATAGTHFNTHVDLRTLRAVRVLRPLKLVSGIPSLQIVLKSIMKAMVPLLQIGLLLFFAILMFAIIGLEFYSGKLHRACFMNNSGILEGFDPPHPCGVQGCPAGYECKDWIGPNDGITQFDNILFAVLTVFQCITMEGWTTVLYNTNDALGATWNWLYFIPLIIIGSFFVLNLVLGVLSGEFAKERERVENRRAFMKLRRQQQIERELNGYRAWIDKAEEVMLAEENKNAGTSALEVLRRATIKRSRTEAMTRDSSDEHCVDISSVGTPLARASIKSAKVDGVSYFRHKERLLRISIRHMVKSQVFYWIVLSLVALNTACVAIVHHNQPQWLTHLLYYAEFLFLGLFLLEMSLKMYGMGPRLYFHSSFNCFDFGVTVGSIFEVVWAIFRPGTSFGISVLRALRLLRIFKITKYWASLRNLVVSLMSSMKSIISLLFLLFLFIVVFALLGMQLFGGRFNFNDGTPSANFDTFPAAIMTVFQILTGEDWNEVMYNGIRSQGGVSSGMWSAIYFIVLTLFGNYTLLNVFLAIAVDNLANAQELTKDEQEEEEAFNQKHALQKAKEVSPMSAPNMPSIERERRRRHHMSVWEQRTSQLRKHMQMSSQEALNREEAPTMNPLNPLNPLSSLNPLNAHPSLYRRPRAIEGLALGLALEKFEEERISRGGSLKGDGGDRSSALDNQRTPLSLGQREPPWLARPCHGNCDPTQQEAGGGEAVVTFEDRARHRQSQRRSRHRRVRTEGKESSSASRSRSASQERSLDEAMPTEGEKDHELRGNHGAKEPTIQEERAQDLRRTNSLMVSRGSGLAGGLDEADTPLVLPHPELEVGKHVVLTEQEPEGSSEQALLGNVQLDMGRVISQSEPDLSCITANTDKATTESTSVTVAIPDVDPLVDSTVVHISNKTDGEASPLKEAEIREDEEEVEKKKQKKEKRETGKAMVPHSSMFIFSTTNPIRRACHYIVNLRYFEMCILLVIAASSIALAAEDPVLTNSERNKVLRYFDYVFTGVFTFEMVIKMIDQGLILQDGSYFRDLWNILDFVVVVGALVAFALANALGTNKGRDIKTIKSLRVLRVLRPLKTIKRLPKLKAVFDCVVTSLKNVFNILIVYKLFMFIFAVIAVQLFKGKFFYCTDSSKDTEKECIGNYVDHEKNKMEVKGREWKRHEFHYDNIIWALLTLFTVSTGEGWPQVLQHSVDVTEEDRGPSRSNRMEMSIFYVVYFVVFPFFFVNIFVALIIITFQEQGDKMMEECSLEKNERACIDFAISAKPLTRYMPQNRHTFQYRVWHFVVSPSFEYTIMAMIALNTVVLMMKYYSAPCTYELALKYLNIAFTMVFSLECVLKVIAFGFLNYFRDTWNIFDFITVIGSITEIILTDSKLVNTSGFNMSFLKLFRAARLIKLLRQGYTIRILLWTFVQSFKALPYVCLLIAMLFFIYAIIGMQVFGNIKLDEESHINRHNNFRSFFGSLMLLFRSATGEAWQEIMLSCLGEKGCEPDTTAPSGQNENERCGTDLAYVYFVSFIFFCSFLMLNLFVAVIMDNFEYLTRDSSILGPHHLDEFVRVWAEYDRAACGRIHYTEMYEMLTLMSPPLGLGKRCPSKVAYKRLVLMNMPVAEDMTVHFTSTLMALIRTALDIKIAKGGADRQQLDSELQKETLAIWPHLSQKMLDLLVPMPKASDLTVGKIYAAMMIMDYYKQSKVKKQRQQLEEQKNAPMFQRMEPSSLPQEIIANAKALPYLQQDPVSGLSGRSGYPSMSPLSPQDIFQLACMDPADDGQFQERQSLEPEVSELKSVQPSNHGIYLPSDTQEHAGSGRASSMPRLTVDPQVVTDPSSMRRSFSTIRDKRSNSSWLEEFSMERSSENTYKSRRRSYHSSLRLSAHRLNSDSGHKSDTHRSGGRERGRSKERKHLLSPDVSRCNSEERGTQADWESPERRQSRSPSEGRSQTPNRQGTGSLSESSIPSVSDTSTPRRSRRQLPPVPPKPRPLLSYSSLIRHAGSISPPADGSEEGSPLTSQALESNNACLTESSNSPHPQQSQHASPQRYISEPYLALHEDSHASDCGEEETLTFEAAVATSLGRSNTIGSAPPLRHSWQMPNGHYRRRRRGGPGPGMMCGAVNNLLSDTEEDDKC

SEQ ID NO: 298966 - DNA, 6885 bp, Artificial Sequence
  derived and/or modified sequence
atggctcgctttggagaagcagtggtggcccggccaggttctggagacggggactccgaccaatctcgaaacaggcaggggacccccgtccccgccagcggccaggcagcggcatacaagcagactaaagcccagagagctcggacgatggccctgtataaccccatccccgtgcgacagaactgcttcacagtcaaccgtagtctctttatctttggggaggacaatattgtgagaaaatatgccaaaaagctgattgattggccacccttcgaatatatgatacttgcgactataattgccaactgcatagtgctggctctcgaacagcacctaccagaggacgacaagacccccatgtcacgccggctggagaagacagagccgtacttcattggcattttctgtttcgaggctggaataaaaattgtcgctctcgggttcatattccataaaggcagctatctccgaaacggctggaacgttatggactttatcgtggttcttagcggaatactggcgacagcagggactcattttaatacccatgtagacctgaggactctgcgagccgtgcgagttctgcggccacttaagctggtctctggcataccatctcttcaaattgtgctgaaatctatcatgaaagcaatggtgcctttgctccagattggccttctgttgttcttcgccatactcatgtttgccatcattggactcgaattttactctggtaaactacacagggcctgttttatgaacaattccggtatcctggaaggctttgatcctccccatccttgcggtgtccagggctgcccagccggctatgagtgcaaagactggattggccccaacgacggcattacacagttcgataacatcttattcgccgttttgacggttttccagtgcattacgatggagggctggaccaccgtcctttacaacacaaatgacgcactgggcgccacatggaattggctttactttattccactaattattatcggttcgttttttgtgctgaacctggtgctcggtgtactgtccggagagtttgcgaaggaaagagagagggttgaaaataggcgcgcttttatgaagcttcgcagacagcagcagatagaaagggaactaaacggctatcgggcttggatcgacaaggctgaggaggtcatgctcgccgaagaaaataagaacgccgggacatccgctctggaggtcctgagaagggcgacaatcaaacgaagtcgaaccgaggccatgactagagactcaagcgacgaacactgcgtggacatcagctccgtcgggactccgctcgcgcgcgcgtctattaagtccgccaaggttgatggtgtaagctacttcagacacaaggagcgtttgcttaggatttctatcaggcacatggttaaatcccaggtcttctactggattgtgctgagtctggttgccctgaacacagcttgcgtggccatcgttcatcacaaccaaccccagtggctgactcatctcctgtactatgccgagttcctcttcctagggctgttcctcctggagatgagcctgaaaatgtacggcatggggccaagattgtacttccatagctctttcaattgctttgacttcggagttaccgtgggtagtatcttcgaggtcgtgtgggcaatctttcgacccggaacttccttcggaatcagtgttctgagggccttgcggcttttacggatctttaagattacgaaatactgggcttcactgcgcaatttggtagtgtctctcatgagctcgatgaagagcattatctccctgctgtttctcctgtttctgtttattgtggtttttgctctgctggggatgcagttgtttggagggcgattcaacttcaatgatggcacaccatcggcaaacttcgacacctttccagccgcaatcatgactgtcttccagatcttgacaggggaggattggaacgaagtgatgtataacggtatccggtctcaggggggagtctcctccgggatgtggtccgccatctactttatagtgttaacactctttggaaactacaccctcttgaacgtgttcttggccatcgcagtggataacctggctaacgcgcaggaactaaccaaggacgaacaagaagaagaggaggcgttcaatcagaagcatgccttgcagaaagcaaaggaggtttctccaatgtccgctcccaacatgcccagtatcgagcgggagcggcggcgccgccaccatatgagcgtgtgggaacagaggaccagccagctgagaaagcacatgcagatgtcttctcaggaggcactgaacagggaggaggcccctaccatgaacccactgaacccccttaatccgctgtctagcctgaatccactcaatgctcatccaagcctttaccgccggccacgcgcgatcgaaggtctggcactcggcttggccctggagaaattcgaggaggaacgaatttcccggggagggagcttgaaaggtgatggaggcgatcggtcctctgcactggacaatcagcggacacccctgagcctcggccagcgcgagccgccttggctagcgagaccatgtcacgggaattgtgaccctacccagcaggaagccgggggaggcgaggccgtcgtaacattcgaagaccgggcacgccataggcagtcacagagacgatcacgacataggcgggtgaggacggagggaaaggaatcatcttccgcgtcacgctcaagaagtgcaagtcaggagcgctcactggacgaggccatgccaacggagggggagaaggatcacgagctacgtgggaaccacggagcaaaggagccgacaatacaagaggagagagcacaagatctgcgccgcactaattcacttatggtttcacgcgggagcggcctggccggtgggctcgacgaggccgataccccactggtcctgccacaccctgaactggaagttggcaagcacgtggtgctgaccgaacaggagccagaaggttccagcgaacaggccctgctcgggaatgtccagctggatatgggtagagtaatctctcagagtgagcccgatctgagttgcataacagctaataccgataaggctaccacagaaagcacttctgtgaccgtcgctatacctgatgtcgatccccttgtagacagcactgtggtgcatatcagtaacaagacggacggagaagccagtccactgaaagaggccgaaatcagagaggacgaagaggaagtggagaaaaagaagcagaagaaggaaaagagagaaaccgggaaggccatggtgccacactcttccatgttcatcttcagcaccaccaaccccattcggcgtgcctgccactacatcgtgaacctgagatattttgaaatgtgcatccttctggtcatcgctgcatccagcattgcattggcggccgaggatcccgtgctgaccaatagtgagagaaacaaggtgctgcgctatttcgattatgtgttcacaggggtgtttacattcgaaatggtcatcaagatgattgaccagggcctgatcctgcaggacgggtcatatttcagggacctctggaacatcctggacttcgtggtagtggtgggagcactcgtcgcctttgcactggccaacgccctgggaactaacaaaggacgcgacataaagactatcaaatctctacgggtcctgcgcgtgctgcggccgctaaagaccattaagcggttaccaaaattgaaggccgtttttgattgcgtggtgacttctctgaaaaatgtgtttaatatccttatcgtttacaaactctttatgtttatctttgctgtcattgcggttcagctgttcaagggcaagttcttttactgcactgactcctctaaagacacagagaaggaatgcatcggcaactatgtcgatcatgagaaaaataaaatggaggtgaagggacgagagtggaagcgccatgaatttcactacgacaacattatctgggctctacttaccctattcacggtgtccaccggcgagggttggccccaagttctccagcattctgttgacgttacggaagaggatcggggccctagccggtccaaccgcatggagatgagcattttctacgttgtctattttgtggttttcccttttttcttcgtgaacatatttgtcgcactgattatcataacattccaggagcagggggacaaaatgatggaagagtgcagtctcgaaaaaaacgagagggcttgcattgactttgctatctccgccaaacctctcacgagatacatgccacagaatcgccatacatttcagtacagggtctggcattttgtggttagcccatcattcgaatataccatcatggcaatgattgcccttaacaccgtggtattgatgatgaagtactattccgccccgtgcacatacgagctggcactgaaatacctgaatatagctttcacgatggtgttctccctggagtgtgtactcaaggtcatcgccttcggcttcctgaactatttccgagatacgtggaatatttttgatttcattaccgtaatcggaagtatcactgaaatcatacttacggacagtaagctggtaaacacctcaggattcaatatgtctttcctcaaactgttccgagccgctagactgattaagttacttcggcagggttacaccattagaatcttgctgtggacctttgtgcagagctttaaggccctcccatacgtttgtttacttatagctatgctgttttttatttacgcaatcatcggtatgcaggtgtttggaaatataaagctggacgaggagtcacatatcaatcggcacaataattttcgctcattttttgggagtctgatgctgttgtttcgcagcgccaccggcgaggcctggcaggaaattatgttaagctgccttggggaaaaaggctgcgaacctgatacgaccgccccctctggtcagaatgagaatgagcgctgcgggacagacctggcctatgtctacttcgtgtcctttatatttttctgcagcttccttatgttgaacctgtttgtagccgtgattatggacaatttcgaatacctgactcgggactctagcatcctggggccccatcacctggatgaattcgtccgcgtttgggccgagtatgatcgtgcggcctgcggccgcattcactacaccgagatgtatgaaatgctcaccttgatgtccccccctctgggactcggtaagcgctgtcccagcaaggtggcgtacaaacgccttgttctgatgaacatgccagtggctgaggacatgacggtgcattttaccagcactttgatggccctcatcagaacagctctggacatcaaaattgccaaagggggcgcagaccgtcagcaactggattctgagctgcagaaggaaactctggcaatctggccccacctctctcagaaaatgctagatctgttagtccctatgccaaaggcctctgacctgacagtggggaagatttacgcggccatgatgattatggattattacaaacagtccaaggttaagaagcagagacagcaactcgaggaacagaaaaatgcccctatgttccagaggatggaaccctcttccctacctcaggagatcatcgccaatgccaaggccctcccctatttacagcaagaccccgtgtctggactgtcaggccgtagcgggtacccttccatgtctccactctcgccacaggatatctttcagttggcctgtatggaccccgcagacgacggccagtttcaggaacggcaaagccttgagcctgaggtgtctgagttgaagtcagtgcaaccttccaatcacggcatctatcttccgtccgacacacaagagcatgccggctcgggtcgagcctcctccatgccgaggctaaccgtggatccgcaggtcgtgaccgatccgagctcaatgaggagaagctttagcaccatccgggacaagcggagcaattcctcatggctagaagaattctctatggaacggtcaagcgagaatacctacaaaagcagaaggcgcagttatcactcttctttgcgtctctccgctcatcgtttgaatagtgacagcggccacaaatccgacactcaccgatctggtgggagggagcgtggacgcagcaaagagaggaagcacttgctgtcacctgatgtgagtcgatgcaattccgaagaacgcggtactcaggctgactgggagagcccagagcggcggcagagccggtctcccagcgagggtcgcagtcagacacccaaccgtcagggaacaggaagcctctccgaatcctcaattcctagtgtttccgataccagtaccccacgccggtcccgtcggcagttgccgccagttccaccgaaaccaaggcctcttctgtcttatagcagcctgattcgacacgcaggctctataagtccgcccgccgacggctccgaagaaggctctccgctgacatctcaggctctggagtcgaacaacgcctgtcttacagaatcctctaactccccacacccacagcaatcccagcacgcaagcccccagcgctatattagcgaaccatacctcgcactgcacgaagatagccatgcatcggactgtggtgaggaagagacactgacctttgaggctgccgtggccacatcactgggtcgcagcaacacaattggctccgcaccacctctgcgacatagctggcagatgccaaacgggcattacaggaggaggcgacgcggcgggccaggcccaggcatgatgtgtggcgccgtgaataaccttctgtccgacactgaagaggatgataagtgttag

SEQ ID NO: 298967 - DNA, 6885 bp, Artificial Sequence
  derived and/or modified sequence
atggccaggtttggagaggccgtggtggcccggcccggcagcggagatggagacagcgaccagagcaggaaccggcagggcacccctgtgcctgccagcggccaggccgccgcctacaagcagaccaaggcccagagggcccggaccatggccctgtacaaccccatccctgtgcggcagaactgcttcaccgtgaacagaagcctcttcatctttggagaggacaacatcgtgaggaaatatgccaagaagctgattgactggcccccatttgagtacatgatcctggccaccatcatcgccaactgcatcgtgctggccctggagcagcacctgcctgaagatgacaagacccccatgagccggcggctggagaagacagagccctacttcatcggcatcttctgctttgaagctggcatcaagatcgtggccctgggcttcatcttccacaagggcagctacctgagaaatggctggaatgtgatggacttcatcgtggtgctgagcggcatcctggccacagctggcacccacttcaacacccacgtggacctgcggaccctgcgggctgtgcgggtgctgcggcccctgaagctggtgtctggcatccccagcctgcagatcgtgctgaagagcatcatgaaggccatggtgcccctgctgcagatcggcctgctgctcttctttgccatcctgatgtttgccatcatcggcctggagttctacagcggcaagctgcaccgggcctgcttcatgaacaacagcggcatcctggagggctttgaccccccccacccctgtggggtgcagggctgcccagctggctatgagtgcaaggactggattggccccaatgatggcatcacccagtttgacaacatcctgtttgctgtgctgactgtgttccagtgcatcaccatggagggctggaccaccgtgctgtacaacaccaatgatgccctgggcgccacctggaactggctgtacttcatccccctcatcatcatcggcagcttctttgtgctgaacctggtgctgggcgtgctgtctggagaatttgccaaggagcgggagcgggtggagaacagaagagccttcatgaagctgcggcggcagcagcagatcgagcgggagctgaatggctaccgggcctggattgacaaggccgaggaggtgatgctggccgaggagaacaagaatgccggcaccagcgccctggaggtgctgcggcgggccaccatcaagaggagcaggacagaggccatgacccgggacagcagtgatgagcactgtgtggacatcagctctgtgggcacccccctggcccgggccagcatcaagagcgccaaggtggatggagtgtcctacttccgccacaaggagcggctgctgcgcatcagcatccgccacatggtgaagagccaggtgttctactggatcgtgctgagcctggtggccctgaacacagcctgtgtggccatcgtgcaccacaaccagccccagtggctgacccacctgctgtactatgcagagttcctgttcctgggcctcttcctgctggagatgagcctgaagatgtatggcatgggcccccggctgtacttccacagcagcttcaactgctttgattttggagtgacagtgggcagcatctttgaggtggtgtgggccatcttccggcccggcaccagctttggcatctctgtgctgcgggccctgcggctgctgcgcatcttcaagatcaccaagtactgggccagcctgaggaacctggtggtgtccctgatgagctccatgaagagcatcatcagcctgctcttcctgctcttcctgttcatcgtggtgtttgccctgctgggcatgcagctgtttggaggccgcttcaacttcaatgatggcaccccatctgccaactttgacaccttccctgctgccatcatgacagtgttccagatcctgactggagaggactggaatgaggtgatgtacaacggcatccgcagccagggcggcgtgagcagcggcatgtggagcgccatctacttcatcgtgctgaccctgtttggaaactacaccctgctgaatgtgttcctggccatcgctgtggacaacctggccaatgcccaggagctgaccaaggatgagcaggaggaggaggaggccttcaaccagaagcacgccctgcagaaggccaaggaggtgagccccatgtctgcccccaacatgcccagcattgaaagagagaggagaagaagacaccacatgtctgtgtgggagcagaggaccagccagctgaggaagcacatgcagatgagcagccaggaggccctgaaccgggaggaggcccccaccatgaaccccctgaaccccctgaaccccctgagcagcctgaaccccctgaatgcccaccccagcctgtacagaagaccccgggccatcgagggcctggccctgggcctggccctggagaagtttgaggaggagcgcatcagccggggcggcagcctgaagggagatggaggagacaggagcagcgccctggacaaccagaggacccccctgagcctgggccagcgggagcccccctggctggcccggccctgccacggcaactgtgaccccacccagcaggaggccggcggcggggaggccgtggtgacctttgaggaccgggcccggcaccggcagagccagaggaggagccgccacagaagagtgaggacagagggcaaggagagcagcagcgccagccgcagccgcagcgccagccaggagaggagcctggatgaggccatgcccacagaaggagagaaggaccacgagctgcggggcaaccacggggccaaggagcccaccatccaggaggagcgggcccaggacctgcggaggaccaacagcctgatggtgtcccggggcagcggcctggccggcggcctggatgaagctgacacccccctggtgctgccccaccctgagctggaggtgggcaagcacgtggtgctgacagagcaggagcctgagggcagcagcgagcaggccctgctgggcaatgtgcagctggacatgggccgggtcatcagccagagcgagccagacctgagctgcatcacagccaacacagacaaggccaccacagagagcacctctgtgacagtggccatcccagatgtggaccccctggtggacagcacagtggtgcacatcagcaacaagacagatggagaggccagccccctgaaggaggccgagatcagagaagatgaggaggaggtggagaagaagaagcagaagaaggagaagcgggagaccgggaaggccatggtgccccacagctccatgttcatcttcagcaccaccaaccccatccggcgggcctgccactacatcgtgaacctgcgctactttgagatgtgcatcctgctggtgattgctgccagcagcatcgccctggccgctgaggaccctgtgctgaccaacagcgagaggaacaaggtgctgcgctactttgattatgtgttcaccggggtcttcacctttgagatggtgatcaagatgattgaccagggcctcatcctgcaggacggcagctacttccgggacctgtggaacatcctggactttgtggtggtggtgggcgccctggtggcctttgccctggccaatgccctgggcaccaacaagggccgggacatcaagaccatcaagagcctgcgggtgctgcgggtgctgcggcccctgaagaccatcaagaggctgcccaagctgaaggctgtgtttgactgtgtggtgaccagcctgaagaatgtgttcaacatcctgattgtgtacaagctgttcatgttcatctttgctgtgattgctgtgcagctgttcaagggcaagttcttctactgcacagacagcagcaaggacacagagaaggaatgtattggcaactacgtggaccacgagaagaacaagatggaggtgaagggccgggagtggaagagacatgagttccactatgacaacatcatctgggccctgctgaccctcttcaccgtgtccactggagagggctggccccaggtgctgcagcacagcgtggatgtgacagaggaggaccggggccccagccgcagcaacaggatggagatgagcatcttctacgtggtgtactttgtggtgttccccttcttctttgtgaacatctttgtggccctgatcatcatcaccttccaggagcagggcgacaagatgatggaggagtgcagcctggagaagaatgaaagagcctgcatcgactttgccatcagcgccaagcccctgacccgctacatgccccagaacagacacaccttccagtacagagtgtggcactttgtggtgagccccagctttgagtacaccatcatggccatgattgccctgaacacagtggtgctgatgatgaagtactacagcgccccctgcacctatgagctggccctgaagtacctgaacatcgccttcaccatggtgttcagcctggagtgtgtgctgaaggtgattgccttcggcttcctgaactacttccgggacacctggaacatctttgacttcatcaccgtcatcggcagcatcacagagatcatcctgacagacagcaagctggtgaacaccagcggcttcaacatgtccttcctgaagctgttccgggccgcccggctcatcaagctgctgcggcagggctacaccatccgcatcctgctgtggacctttgtgcagagcttcaaggccctgccctacgtgtgcctgctgattgccatgctgttcttcatctatgccatcatcggcatgcaggtgtttggaaacatcaagctggatgaggagagccacatcaacagacacaacaacttccgctccttcttcggcagcctgatgctgctcttccgcagcgccaccggggaggcctggcaggagatcatgctgagctgcctgggggagaagggctgtgagccagacaccacagcccccagcggccagaatgaaaatgaaagatgtggcacagacctggcctacgtgtactttgtgtccttcatcttcttctgcagcttcctgatgctgaacctgtttgtggccgtcatcatggacaactttgagtacctgacccgggacagcagcatcctgggcccccaccacctggatgaatttgtgcgggtgtgggccgagtatgacagagctgcctgtggccgcatccactacacagagatgtatgagatgctgaccctgatgagcccccccctgggcctgggcaagcgctgccccagcaaggtggcctacaagaggctggtgctgatgaacatgcctgtggccgaggacatgacagtgcacttcaccagcaccctgatggccctgatcagaacagccctggacatcaagatcgccaagggcggcgctgaccggcagcagctggacagcgagctgcagaaggagaccctggccatctggccccacctgagccagaagatgctggacctgctggtgcccatgcccaaggccagtgacctgactgtgggcaagatctatgctgccatgatgatcatggactactacaagcagagcaaggtgaagaagcagaggcagcagctggaggagcagaagaatgcccccatgttccagaggatggagcccagcagcctgccccaggagatcatcgccaatgccaaggccctgccctacctgcagcaggaccctgtgtctggcctgagcggccgcagcggctaccccagcatgagccccctgagcccccaggacatcttccagctggcctgcatggaccctgcagatgatggccagttccaggagcggcagagcctggagcctgaggtgtctgagctgaagtctgtgcagcccagcaaccacggcatctacctgcccagcgacacccaggagcacgccggcagcggccgggccagctccatgccccggctgactgtggacccccaggtggtgacagaccccagctccatgagaagaagcttcagcaccatccgggacaagaggagcaacagctcctggctggaggagttctccatggagaggagcagcgagaacacctacaagagcagaagaagaagctaccacagcagcctgcggctgagcgcccaccggctgaacagcgacagcggccacaagagtgacacccacaggtctgggggccgggagcggggccgcagcaaggagaggaagcacctgctgagcccagatgtgagccgctgcaacagcgaggagcggggcacccaggccgactgggagagccctgagcggcggcagagccgcagccccagcgagggccgcagccagacccccaaccggcagggcaccggcagcctgtctgagagcagcatccccagcgtgtctgacaccagcaccccccggcgcagccggcggcagctgccccctgtgccccccaagccccggcccctgctgagctacagcagcctcatcagacatgctggcagcatcagccccccagcagatggcagcgaggagggcagccccctgaccagccaggccctggagagcaacaatgcctgcctgacagagagcagcaacagcccccacccccagcagagccagcacgccagcccccagcgctacatcagcgagccctacctggccctgcacgaggacagccacgccagtgactgtggggaggaggagaccctgacctttgaagctgctgtggccaccagcctgggccgcagcaacaccatcggcagcgccccacccctgcggcacagctggcagatgcccaacggccactacagaagaagaagaagaggaggccctggccctggcatgatgtgtggggctgtgaacaacctgctgagtgacacagaggaggatgacaagtgctag

SEQ ID NO: 298968 - DNA, 6885 bp, Artificial Sequence
  derived and/or modified sequence
atggcccggttcggcgaggccgtggtggcccggcccggcagcggcgatggcgactccgaccagagccgcaatcgacaggggactccagtgcccgcctcaggccaggctgctgcctataagcagacgaaggctcagcgggcccgcacaatggctctctataatccaattcctgtgagacagaattgtttcactgtcaacaggagcctgttcatcttcggagaagacaacatagtcaggaaatatgccaaaaagctgatcgactggcccccatttgaatatatgatcctggccacgatcatcgccaattgtatcgttttggctttggagcagcatcttccagaggatgataaaactccaatgtcacgccgactcgaaaaaaccgagccgtactttatcggaatcttctgcttcgaggcaggaattaagattgtggctctgggttttatatttcataagggctcctacctgcgcaatggttggaatgtaatggactttatcgtcgtcctgtccggcatcttggccacagccggaactcatttcaatacccacgtggacttacgtactcttcgagccgtgcgggttctcagaccactaaaactggtttcgggaatcccttccctgcagattgtccttaaaagtatcatgaaggcgatggtgccgctgctgcagatcggactcctcctctttttcgccattctgatgttcgccattattggcctggaattctactccggtaaactacatagggcttgttttatgaacaactctggcatcctggagggattcgacccgccccacccatgcggtgtccaggggtgtccagcagggtatgagtgtaaagattggattggcccgaatgacggaattacacagtttgataatatcctctttgctgtgctgaccgtcttccagtgtataaccatggaaggatggaccaccgtgctgtataataccaatgatgctctgggtgcaacgtggaattggctttacttcatacctttaattatcattggtagttttttcgtgcttaacctagtgctgggggttctctccggcgaattcgctaaggagagggaacgcgtagagaaccgtcgggcatttatgaaactgcggcggcagcagcagatagaaagggagttgaatggttacagagcctggatagacaaagccgaggaagtgatgctggctgaggaaaataaaaatgcaggcacctcagctctggaagttctgcgtagagccactatcaagcgcagccgcactgaagcaatgactcgggacagttccgacgaacactgtgtcgatatatcctctgtcggaacacctctcgctcgggccagtattaaatccgcaaaggtcgacggcgtttcttacttccgccacaaagagcggctgctgcggatctctatcaggcatatggtcaaaagtcaagtcttttactggatagtcctttctttggtggccttgaataccgcgtgtgtcgccatcgtccaccataaccaacctcagtggttgactcacctgctgtactacgcagaatttctttttctaggactgttcctgcttgaaatgagcttgaaaatgtacggtatgggtcccagactgtatttccactcgagttttaattgcttcgactttggagtcaccgtaggttccatctttgaagtcgtatgggccatctttagacctgggacgtcattcggcatctcggttctaagagctctgcgcttgctgagaattttcaagattaccaaatattgggcctcccttaggaacctggtagtgagcctgatgagcagcatgaagagtattatttccctgctcttcctgctgttcctcttcatcgtcgtgttcgcgctcctcggaatgcaactgttcggggggaggttcaacttcaatgatggtaccccaagtgctaactttgacacattccccgcagctataatgaccgtattccagatcttaaccggcgaggactggaatgaagtcatgtataacgggattaggagccagggtggagtatcatcgggcatgtggtcagcaatctactttatcgtattaactctgttcggcaattacacactgctgaatgtgtttctggccattgccgtggacaaccttgctaacgcccaggagctcacgaaggatgagcaggaagaggaggaggcattcaaccagaaacacgctctccagaaggctaaggaggtttccccaatgtccgcgcccaacatgcctagcatagaacgagagcgccgccgtcgccaccatatgtccgtgtgggaacagcgcacatctcaactgcggaaacacatgcaaatgtcgtcacaggaagccttaaatagagaggaagcccccacaatgaatccccttaatcctctgaaccccctttcgagcctaaacccattgaatgcacacccttcattataccgccgcccaagagccattgagggcttggctctcgggcttgcgctggaaaaatttgaagaagagcgaatcagccgcggcggctccctgaagggcgatggtggagacaggagcagcgcactggataaccagcgcacacccctgtcacttggccagagggagccaccatggctggcgagaccttgtcacgggaattgcgacccaacacaacaagaagcagggggcggcgaagctgtggtcacattcgaggatcgtgcccggcaccgccaaagccaacggcgctccaggcacagacgagtccggactgaagggaaggagagtagctctgccagcaggtctaggtcagcaagtcaggagcgatccctggatgaggcaatgccaaccgaaggtgaaaaggaccatgagctgagaggaaatcatggtgccaaggaaccaaccatccaagaagagagggctcaggatttgcgacgaactaatagtctgatggtgtctcgaggctcaggactcgcggggggactggacgaggccgatactccactcgtgttgccgcaccctgagttggaggtcggaaaacacgtggttctgacagagcaggagccagaaggcagcagtgagcaggcccttctgggcaatgtccagttagatatgggtcgcgtcattagtcagtccgagccagatttatcctgtattacagctaataccgacaaggccacgaccgagtctacttctgttactgtggccatccctgacgtagatccattggtggattcgacagtggtccacattagcaacaagacggacggcgaagcctcacccctgaaggaggcggagatacgggaggacgaggaggaggtggagaagaagaagcagaaaaaagaaaagagagaaaccggtaaggccatggtgccacactcttctatgttcatttttagcacaacaaatcccatccgcagggcatgccactacatcgtgaacctccggtacttcgagatgtgcatcttacttgtgatcgccgccagttccattgcattggcggcagaggaccctgtgttgactaactccgagcgcaacaaagtgttacgatatttcgattacgtattcacaggggtgttcaccttcgaaatggttatcaagatgattgaccagggtctgattctccaggatggttcttattttagggatctgtggaatatacttgactttgtagtagtggtgggtgccctggtggcattcgccctcgctaacgccttgggtactaacaaggggagggacattaaaactattaagagtctccgggtgctgagagtacttaggccattaaaaacaataaagagactgcccaaattgaaggccgtgtttgactgtgtagtcactagcttgaagaacgtgttcaatatactaattgtatataagctgtttatgtttatttttgcagttatcgctgttcagctgttcaagggcaagttcttttactgcacagattcgtctaaagacaccgaaaaagagtgtataggtaattatgtggatcacgagaagaacaagatggaggtgaaaggtagagagtggaaaaggcacgaatttcattacgacaatatcatttgggctttgttgaccctgttcactgtgtctacgggggaaggctggcctcaggtcctgcagcatagtgttgatgtaacagaggaagacaggggaccctctaggagcaacaggatggaaatgtcaatcttttatgtggtctatttcgttgtcttcccgtttttcttcgtgaacatctttgtggccctcattatcataacgttccaggagcagggggataagatgatggaagaatgctctttagagaagaacgagcgcgcatgtatcgactttgcaatttccgccaagcccctgacccgatacatgccacagaaccggcatacattccaatacagggtgtggcactttgtggtgtccccatcatttgagtatactatcatggctatgatcgccctcaataccgtcgtgctcatgatgaagtactactcggccccctgtacctatgagctggctctgaagtatttgaacattgcattcaccatggtgttcagcctggaatgcgtcctcaaagtaattgcctttggctttttgaactactttagggacacctggaatatctttgacttcatcaccgtgatcgggtccatcacagaaataatcctgaccgattccaaactcgtcaacacatcgggcttcaatatgtcatttctcaagctgttcagagctgctcgtctgattaaattgctgaggcagggctacacaattaggatccttttatggaccttcgtgcaaagctttaaggcgctgccctacgtctgtttgcttattgcaatgctgttctttatatacgccatcatcggtatgcaggtgttcggaaatattaaacttgatgaagagagccatatcaacagacataacaacttccggagcttcttcgggagcctgatgctactatttcgcagtgcaaccggggaggcgtggcaggaaatcatgctgtcttgcttaggcgagaaaggctgcgagcccgacaccaccgcaccgtccggtcaaaatgagaatgaaagatgtggaacagacctggcatatgtttattttgtcagtttcatatttttttgcagtttcttgatgctcaatctgttcgtggccgtgataatggacaacttcgagtacttgacaagagatagttctatcctgggaccccatcacctggacgagttcgtcagggtgtgggccgagtatgaccgggccgcctgcggaagaatccactacacagagatgtacgaaatgctgactctgatgtcacctcccctcggactgggcaagaggtgcccatccaaagtggcatacaagagactggtgctgatgaacatgccggtcgcagaagacatgacggtacatttcacctccactttgatggcacttattagaaccgccctggatattaagatcgccaagggtggcgcagaccgacagcagctcgacagcgaactccaaaaagaaactctggcaatctggccacacctgtctcagaagatgctcgatttgttggtccccatgcctaaggctagcgatctcaccgttggcaagatctacgcggctatgatgattatggactactataagcagagcaaggttaaaaagcagcggcaacagttggaggaacagaagaacgcacctatgttccagcgcatggagccatcatctctcccccaggagatcatcgccaatgccaaggctctcccatatcttcagcaagaccccgttagcggactctctggccgatcaggttatccgtcgatgagtccactgtctccacaggacatttttcagctcgcctgcatggatcctgcggacgatggtcagtttcaggaaagacagtcacttgagcccgaggtcagtgagctgaaatcagttcaaccgagcaaccatggaatatatttgccaagcgatacacaagaacatgctggttcagggagagcaagctcaatgccaaggcttactgtcgatccacaggtagttaccgatccctcttccatgcggcggagtttcagcactatccgggataagagaagcaactcttcatggcttgaagagttctccatggagaggagctctgagaacacctacaaatctagaagaagatcctaccactcctctctgcgcctctcagcacaccggcttaattcggactcaggacacaaatccgatacccaccgttcaggaggtagggagagaggaaggagcaaagagagaaaacatctgctgagccccgacgtaagcagatgcaattcggaagaacgcgggacccaggccgactgggagtctcctgagcgccgacagtctaggtctccctctgaaggcaggtcccagaccccaaaccgccaggggacaggatctctatctgagtctagtatcccatcagtgtctgacacctccacacctcgtagaagccgcaggcaacttcccccagtacctcctaagccacgtcctctgcttagctacagctctctgatccgccatgctgggagcatttcaccccctgccgatggatcagaggagggctcaccattaacaagccaggcgctggaatccaataacgcttgcctcacggaatcgagtaactctccgcacccccaacagtctcagcacgcctctccgcaaagatacatatccgagccttacctagccttacacgaggattcacacgcaagcgattgcggtgaagaagaaaccctgacttttgaagccgctgtagcgacctccctgggccgcagcaacacgattggatcagcacctcccctgaggcactcatggcagatgccaaatgggcattaccgtagaaggaggcggggaggccctgggcctggaatgatgtgcggggcagtgaacaacctcctgagcgacacagaggaagatgataaatgttag

SEQ ID NO: 298969 - DNA, 6884 bp, Artificial Sequence
  derived and/or modified sequence
atggcgaggtttggagaggcagttgttgccaggccagggtctggggacggtgattctgaccagagccgtaacaggcagggaacaccagtgcctgcttccgggcaggcagcagcctataaacaaaccaaagcacagcgcgctcggaccatggcactctacaacccaattccagtgagacagaactgctttactgtcaatcgctccctgtttatcttcggcgaagataatattgtgaggaaatacgccaagaagctgatcgactggccacctttcgaatatatgatcctggccaccatcatagccaactgcatcgtgcttgcattggaacagcatctgccagaggatgacaaaacccccatgtccagaagactggagaaaaccgaaccatattttataggaatcttttgctttgaagcgggtattaagatagtcgcactggggttcatattccataaaggttcgtacctacgcaacgggtggaatgtgatggacttcattgttgttctgagcggtattcttgccacggcgggaacccactttaacactcacgttgatctacgcaccttaagagccgttcgggtactgcggcctctgaagctggtgagcggcattccttccctgcagatcgtccttaagtctattatgaaagccatggtgccactcttgcagatcggcctgcttttgttttttgcgatcctaatgttcgccatcatcggactagaattttactcaggcaaactgcaccgtgcatgttttatgaataattctgggatcctggagggattcgacccccctcacccctgtggcgttcagggatgcccagctggttacgagtgtaaggattggattggccctaacgacggcattacacagtttgataacattcttttcgcagttctcaccgtgttccagtgtataactatggaaggctggactacagtgctctataacaccaacgacgcactgggtgcaacctggaattggctgtacttcattccactgatcatcataggttctttttttgtgctgaatctcgtcctcggtgtgctctcaggagagttcgcgaaggagagggagcgtgtcgaaaacagaagggccttcatgaagttgcgacgccaacagcagatcgagcgcgagctcaatggctacagggcctggattgacaaggctgaggaagtgatgctggcggaggagaataaaaacgcaggaacttccgccctggaggtactgaggcgcgcaactattaaaaggagtagaacagaggccatgacacgcgattccagtgacgaacattgcgtcgacatttcttcagtgggaactccccttgcacgtgcgtcgatcaagtccgctaaagtcgacggtgtatcatattttagacataaagaacggttactgcggatctctattcgacatatggtgaagtcccaggtgttctactggatcgttctgagcctggtggctctgaacaccgcgtgcgttgcaatcgttcaccacaatcagcctcagtggctaacccaccttctttactatgcggagtttctcttcctcggtctgttcttactggagatgtccctgaagatgtacggcatggggcctcgactttacttccacagtagcttcaactgttttgacttcggggtgaccgtagggagcatttttgaagtagtgtgggctatcttccgcccaggaacaagctttggcatctccgtcctgagggctcttcgtctgctgaggatttttaagataacaaagtattgggcttcactccggaacctggtggtttccctgatgtcctccatgaagtctattattagcctgctgtttctgctctttctcttcatcgtcgtcttcgcacttctcggaatgcaactgtttggaggcagatttaattttaacgatggtacaccaagcgcaaactttgatacatttcctgccgctatcatgactgtgtttcaaatcctgactggcgaagactggaacgaggtcatgtataatgggatacgctctcaggggggtgtgagctctggtatgtggagcgccatttattttattgtcctcaccctattcggtaattacaccttacttaatgtatttttggccatcgcggtggataacttagccaatgcccaggagctaaccaaagatgagcaggaggaagaggaggctttcaatcaaaagcacgcactgcagaaggcgaaagaagttagcccaatgagcgcacctaacatgcccagtatagagcgcgaacgcagaaggaggcatcatatgtctgtgtgggaacaacgaacctctcagttaaggaagcacatgcagatgagcagccaggaggcccttaatagggaggaagccccaacaatgaacccactcaatccactcaaccccctttcaagcctgaaccctctgaatgcacacccctcactgtacagaaggccaagagctatcgagggtttggcactggggctggccctagaaaaattcgaagaggagcgcatcagccggggaggtagtctaaagggcgatgggggtgataggagcagcgcgctggataatcaaaggacgccactctctctcggccagagagagccaccatggttagctagaccctgccatggaaactgcgatccgacccagcaggaggcagggggtggtgaagcagttgttacgttcgaggatcgggctagacacagacaatcacagcgccgttcaaggcaccgcagggtccggaccgagggcaaggagtcatcatccgcgtctcgtagtcgaagcgcctcgcaggaacggagtttagacgaagccatgcccacagagggcgagaaagatcacgagttgcgcggtaaccatggggcaaaggagcctaccatccaggaagaacgagctcaagatctgcgccgaactaactcattgatggtgtcccgcggatccggactggccggtggcttggacgaagccgacacaccactggtgctgccacaccccgagttggaggtaggaaaacacgttgtgcttaccgagcaggaacccgaaggatcctctgaacaagccctgctggggaacgtccagctggatatgggcagggtgatctcccagagtgaaccggacctctcttgtatcactgctaacaccgataaggcaaccactgaatcaaccagcgtcacagttgctatcccggacgtggaccccttagttgacagcactgtggtccacatatctaacaaaactgatggtgaagcctcgccactcaaagaagctgaaattagagaagacgaggaggaggtagagaagaagaagcagaaaaaggagaagcgcgagactgggaaggcgatggtcccccatagttctatgttcatcttttccacaaccaatcctattcgcagagcctgccactatatcgtgaacctcagatattttgaaatgtgcatactcctcgtgatcgccgcttcttccatcgccctggccgcagaggatccagtcctcacaaatagcgagaggaacaaggtattgcgctattttgattacgtgttcaccggggtcttcacattcgagatggtgatcaaaatgattgaccaaggtcttatccttcaggatggctcttatttccgcgatctctggaacattttggactttgtggtggtggtgggcgctttagtcgctttcgccctcgccaacgccttggggacaaacaagggaagagacatcaaaaccataaaaagtttgcgtgttctgcgggtcttgcgacccctcaagaccatcaagaggctccctaagctgaaagcggtgttcgattgcgttgtgactagccttaaaaatgttttcaatatcctcatagtctacaagctgttcatgtttatatttgctgtgatcgctgtgcaactttttaaaggaaagtttttctattgtactgactctagcaaggacactgagaaggagtgtatcggcaactacgttgatcacgagaagaacaagatggaggtcaaagggcgagaatggaaacgccatgaattccattacgacaatattatatgggcgcttctgaccctgttcacagtttccactggggagggctggccacaggtgttacagcatagtgtcgatgtgactgaggaagaccgcggaccttccaggagcaaccgtatggagatgtcaattttctacgtcgtgtattttgtcgttttccccttttttttcgttaacatctttgtggctctgatcattataacgttccaggagcagggcgacaagatgatggaggagtgcagtctggaaaagaacgaacgggcttgtatcgatttcgccatcagcgctaagccactgactaggtacatgcctcagaaccgtcatacctttcagtaccgagtgtggcacttcgtggtgtctccaagtttcgaatacaccataatggcaatgatcgctctcaacaccgttgttttgatgatgaagtattattccgcaccctgtacttatgagttagctctaaaatatctaaatattgccttcacaatggttttttccctggagtgcgtgctgaaggtgattgccttcggcttcctgaattacttccgtgatacttggaacatttttgatttcattactgtgattggctctatcacagagatcatccttaccgacagcaagttggttaatacatcaggattcaacatgagctttctgaaattgttccgggcagctagactaatcaaattgctccgtcaggggtacaccatccggattctgttatggacctttgttcagagctttaaggccctgccttacgtgtgtctcttgatcgccatgttattcttcatttacgccattatcggcatgcaggttttcggcaatatcaagctagatgaagagagccatattaaccgccacaacaacttcaggtcattttttgggtccctgatgcttttgtttcgctcagccaccggggaggcttggcaggaaataatgcttagctgcctcggcgagaaaggttgcgagccagataccacggctcctagtgggcagaacgagaacgagcgatgcggtacagaccttgcctacgtgtatttcgtttcctttattttcttctgcagtttcctgatgctcaacctttttgtggccgtgatcatggacaatttcgaatacctgacacgggactcaagcatactgggccctcatcacttagacgagtttgtgcgtgtctgggcagagtatgacagagccgcttgcggccgaatacactacacagaaatgtacgaaatgttaaccctgatgagccccccactgggactgggtaagcgctgcccctcaaaggtcgcctataaacgcctggtgctcatgaacatgcccgtggccgaggacatgaccgtgcacttcacatccactctgatggcattaatacgtacagctctggatattaaaatcgctaagggaggagctgacagacaacagttagactcggaacttcagaaggagaccctggctatatggcctcatctaagccagaagatgctggatttgctggtccctatgccgaaagccagcgatctgacggttggcaagatttatgctgcaatgatgataatggattactacaagcagtctaaagtgaaaaaacagcgccagcagcttgaagagcaaaagaacgctcctatgttccaaagaatggagccatcctccttgcctcaagaaatcatcgcaaacgctaaagcgctgccatacctgcagcaggacccagtgagcggtctgtccggtcgaagcggttatccttccatgtcccccctaagccctcaggacatttttcagttagcttgcatggacccagctgacgatggccagtttcaggaacggcaatctctggagccggaggtatccgagctgaaaagcgtgcagccgtcaaatcacggtatttacctgcctagtgacacacaggagcatgcagggagcggccgagccagtagtatgccaaggttaacagtagacccccaagttgtcaccgacccatctagtatgcgccgttccttcagcactatcagagacaagcgttccaactcgtcctggctcgaagagttttcaatggagagatctagcgaaaacacctacaaatccagacggcgatcgtatcatagttccctgaggctctccgcccacagactgaattcagattccggccataagtctgacacacaccgctcaggcggtcgggagcggggacgctccaaggagcggaagcatctcctgagccccgatgtgtctaggtgtaatagtgaggagcggggaacccaggcagactgggagtcccccgagcgacgacagagtaggtctcccagcgaaggaagatctcagacacctaacagacagggaacgggtagtctgtctgagagttccatacctagtgtctccgacactagcacccccagaagatcaaggcggcagctgccgcctgtacccccaaagcctcgaccgcttttgtcctacagttctctcatacgccatgccggttcaataagcccacctgcagacggctccgaggagggatcaccacttacaagtcaggcactggaatccaacaacgcttgcctgactgaatcctctaatagtccccatccccaacagtcccagcatgcctcgccccaaagatatatctctgagccatacctggcccttcatgaggacagccatgcctccgattgtggagaggaggaaaccttaacatttgaagccgctgtcgccacctcacttggtcggtccaatacgatagggtccgccccacccttaaggcactcctggcaaatgccaaacggacattaccgcaggcgcaggcggggagggcctggccctggcatgatgtgcggcgcagtcaacaatctgctgagcgacactgaagaagacgataaatgcta

SEQ ID NO: 298970 - DNA, 6970 bp, Artificial Sequence
  derived and/or modified sequence
cctcaggatggctcgcttcggggaggcggtggtcgccaggccagggtccggcgatggagactcggaccagagcaggaaccggcaaggaacccccgtgccggcctcggggcaggcggccgcctacaagcagacgaaagcacagagggcgcggactatggctttgtacaaccccattcccgtccggcagaactgtttcaccgtcaacagatccctgttcatcttcggagaagataacattgtcaggaaatatgccaagaagctcatcgattggccgccatttgagtacatgatcctggccaccatcattgccaactgcatcgtcctggccctggagcagcatcttcctgaggatgacaagacccccatgtcccgaagactggagaagacagaaccttatttcattgggatcttttgctttgaagctgggatcaaaattgtggccctggggttcatcttccataagggctcttacctccgcaatggctggaatgtcatggacttcatcgtggtcctcagtggcatcctggccactgcaggaacccacttcaatactcacgtggacctgaggaccctccgggctgtgcgtgtcctgcggcctttgaagctcgtgtcagggatacctagcctgcagattgtgttgaagtccatcatgaaggccatggtacctcttctgcagattggccttctgctcttctttgccatcctgatgtttgctatcattggtttggagttctacagtggcaagttacatcgagcatgcttcatgaacaattcaggtattctagaaggatttgacccccctcacccatgtggtgtgcagggctgcccagctggttatgaatgcaaggactggatcggccccaatgatgggatcacccagtttgataacatcctttttgctgtgctgactgtcttccagtgcatcaccatggaagggtggaccactgtgctgtacaataccaatgatgccttaggagccacctggaattggctgtacttcatccccctcatcatcattggatccttctttgttctcaacctagtcctgggagtgctttccggggaatttgccaaagagagagagagagtggagaaccgaagggctttcatgaagctgcggcgccagcagcagattgagcgtgagctgaatggctaccgtgcctggatagacaaagcagaggaagtcatgctcgctgaagaaaataaaaatgctggaacatccgccttagaagtgcttcgaagggcaaccatcaagaggagccggacagaggccatgactcgagactccagtgatgagcactgtgttgatatctcctctgtgggcacacctctggcccgagccagtatcaaaagtgcaaaggtagacggggtctcttatttccggcacaaggaaaggcttctgcgcatctccattcgccacatggttaaatcccaggtgttttactggattgtgctgagccttgtggcactcaacactgcctgtgtggccattgtccatcacaaccagccccagtggctcacccacctcctctactatgcagaatttctgtttctgggactcttcctcttggagatgtccctgaagatgtatggcatggggcctcgcctttattttcactcttcattcaactgctttgattttggggtcacagtgggcagtatctttgaagtggtctgggcaatcttcagacctggtacgtcttttggaatcagtgtcttgcgagccctccggcttctaagaatatttaaaataaccaagtattgggcttccctacggaatttggtggtctccttgatgagctcaatgaagtctatcatcagtttgcttttcctcctcttcctcttcatcgttgtctttgctctcctaggaatgcagttatttggaggcaggtttaactttaatgatgggactccttcggcaaattttgataccttccctgcagccatcatgactgtgttccagatcctgacgggtgaggactggaatgaggtgatgtacaatgggatccgctcccagggtggggtcagctcaggcatgtggtctgccatctacttcattgtgctcaccttgtttggcaactacacgctactgaatgtgttcttggctatcgctgtggataatctcgccaacgcccaggaactgaccaaggatgaacaggaggaagaagaggccttcaaccagaaacatgcactgcagaaggccaaggaggtcagcccgatgtctgcacccaacatgccttcgatcgagagggagcggaggcgccggcaccacatgtccgtgtgggagcagcgtaccagccagctgaggaagcacatgcagatgtccagccaggaggccctcaacagagaggaggcgccgaccatgaacccgctcaaccccctcaacccgctcagctccctcaacccgctcaatgcccaccccagcctttatcggcgacccagggccattgagggcctggccctgggcctggccctggagaagttcgaggaggagcgcatcagccgtggggggtccctcaagggggatggaggggaccgatccagtgccctggacaaccagaggacccctttgtccctgggccagcgggagccaccatggctggccaggccctgtcatggaaactgtgacccgactcagcaggaggcagggggaggagaggctgtggtgacctttgaggaccgggccaggcacaggcagagccaacggcgcagccggcatcgccgcgtcaggacagaaggcaaggagtcctcttcagcctcccggagcaggtctgccagccaggaacgcagtctggatgaagccatgcccactgaaggggagaaggaccatgagctcaggggcaaccatggtgccaaggagccaacgatccaagaagagagagcccaggatttaaggaggaccaacagtctgatggtgtccagaggctccgggctggcaggaggccttgatgaggctgacacccccctagtcctgccccatcctgagctggaagtggggaagcacgtggtgctgacggagcaggagccagaaggcagcagtgagcaggccctgctggggaatgtgcagctagacatgggccgggtcatcagccagagcgagcctgacctctcctgcatcacggccaacacggacaaggccaccaccgagagcaccagcgtcaccgtcgccatccccgacgtggaccccttggtggactcaaccgtggtgcacattagcaacaagacggatggggaagccagtcccttgaaggaggcagagatcagagaggatgaggaggaggtggagaagaagaagcagaagaaggagaagcgtgagacaggcaaagccatggtgccccacagctcaatgttcatcttcagcaccaccaacccgatccggagggcctgccactacatcgtgaacctgcgctactttgagatgtgcatcctcctggtgattgcagccagcagcatcgccctggcggcagaggaccccgtcctgaccaactcggagcgcaacaaagtcctgaggtattttgactatgtgttcacgggcgtgttcacctttgagatggttataaagatgatagaccaaggcttgatcctgcaggatgggtcctacttccgagacttgtggaacatcctggactttgtggtggtcgttggcgcattggtggcctttgctctggcgaacgctttgggaaccaacaaaggacgggacatcaagaccatcaagtctctgcgggtgctccgagttctaaggccactgaaaaccatcaagcgcttgcccaagctcaaggccgtcttcgactgcgtagtgacctccttgaagaatgtcttcaacatactcattgtgtacaagctcttcatgttcatctttgctgtcatcgcagttcagctcttcaagggaaagttcttttattgcacggacagttccaaggacacagagaaggagtgcataggcaactatgtagatcatgagaaaaacaagatggaggtgaagggccgggaatggaagcgccatgaattccactacgacaacattatctgggccctgctgaccctcttcaccgtctccacaggggaaggatggcctcaagttctgcagcactctgtagatgtgacagaggaagaccgaggcccaagccgcagcaaccgcatggagatgtctatcttttatgtagtctactttgtggtcttccccttcttctttgtcaatatctttgtggctctcatcatcatcaccttccaggagcaaggggataagatgatggaggagtgcagcctggagaagaatgagagggcgtgcatcgacttcgccatcagcgccaaacctctcacccgctacatgccgcagaacagacacaccttccagtaccgcgtgtggcactttgtggtgtctccgtcctttgagtacaccattatggccatgatcgccttgaatactgttgtgctgatgatgaagtattattctgctccctgtacctatgagctggccctgaagtacctgaatatcgccttcaccatggtgttttccctggaatgtgtcctgaaggtcatcgcttttggctttttgaactatttccgagacacctggaatatctttgacttcatcaccgtgattggcagtatcacagaaattatcctgacagacagcaagctggtgaacaccagtggcttcaatatgagctttctgaagctcttccgagctgcccgcctcataaagctcctgcgtcagggctataccatacgcattttgctgtggacctttgtgcagtcctttaaggccctcccttatgtctgccttttaattgccatgcttttcttcatttatgccatcattgggatgcaggtatttggaaacataaaattagacgaggagagtcacatcaaccggcacaacaacttccggagtttctttgggtccctaatgctactcttcaggagtgccacaggtgaggcctggcaggagattatgctgtcatgccttggggagaagggctgtgagcctgacaccaccgcaccatcagggcagaacgagaacgaacgctgcggcaccgatctggcctacgtgtactttgtctccttcatcttcttctgctccttcttgatgctcaacctgtttgtggccgtcatcatggacaactttgagtacctgactcgggactcctccatcctggggcctcaccacttggacgagtttgtccgcgtctgggcagaatatgaccgagcagcatgtggccgcatccattacactgagatgtatgaaatgctgactctcatgtcacctccgctaggcctcggcaagagatgtccctccaaagtggcatataagaggttggtcctgatgaacatgccagtagctgaggacatgacggtccacttcacctccacacttatggctctgatccggacagctctggacattaaaattgccaaaggtggtgcagacaggcagcagctagactcagagctacaaaaggagaccctagccatctggcctcacctatcccagaagatgctggatctgcttgtgcccatgcccaaagcctctgacctgactgtgggcaaaatctatgcagcaatgatgatcatggactactataagcagagtaaggtgaagaagcagaggcagcagctggaggaacagaaaaatgcccccatgttccagcgcatggagccttcatctctgcctcaggagatcattgctaatgccaaagccctgccttacctccagcaggaccccgtttcaggcctgagtggccggagtggatacccttcgatgagtccactctctccccaggatatattccagttggcttgtatggaccccgccgatgacggacagttccaagaacggcagtctctggagccagaggttagtgaattaaaaagcgtgcagccctctaaccatggcatctaccttccttcggacacccaggagcatgcgggatctgggagggcatcttctatgccacgtctgactgtggatccccaggtggtgacagaccctagctccatgagacgttcattttccactattcgggataagcgttcaaattcctcgtggttggaggaattctccatggagcgaagcagtgaaaatacctacaagtcccgtcgccggagttaccactcctccttgcggctgtcagcccaccgcctgaactctgattcaggccacaagtctgacactcaccgctcagggggcagggagcggggacgatcaaaagagcgaaagcatcttctctctcctgatgtctcccgctgcaattcagaagagcgagggacccaggctgactgggagtccccagagcgccgtcaatccaggtcacccagtgagggcaggtcacagacgcccaacagacagggcacaggttccctaagtgagagctccatcccctctgtctctgacaccagcaccccaagaagaagtcgtcggcagctcccacccgtcccgccaaagccccggcccctcctttcctacagctccctgattcgacacgcgggcagcatctctccacctgctgatggaagcgaggagggctccccgctgacctcccaagctctggagagcaacaatgcttgcctgaccgagtcttccaactctccgcacccccagcagagccaacatgcctccccacagcgctacatctccgagccctacttggccctgcacgaagactcccacgcctcagactgtggtgaggaggagacgctcactttcgaagcagccgtggctactagcctgggccgttccaacaccatcggctcagccccacccctgcggcatagctggcagatgcccaacgggcactatcggcggcggaggcgcggggggcctgggccaggcatgatgtgtggggctgtcaacaacctgctaagtgacacggaagaagatgacaaatgctagaggctgctcccccctccgatgcatgctcttctctcacatggagaaaaccaagacagaattgggaagccagtgcggccc

SEQ ID NO: 298971 - DNA, 6885 bp, Artificial Sequence
  derived and/or modified sequence
atggccagattcggcgaggccgtggtggccagacccggcagcggcgacggcgacagcgaccagagcagaaacagacagggcacccccgtgcccgccagcggccaggccgccgcctacaagcagaccaaggcccagagagccagaaccatggccctgtacaaccccatccccgtgagacagaactgcttcaccgtgaacagaagcctgttcatcttcggcgaggacaacatcgtgagaaagtacgccaagaagctgatcgactggccccccttcgagtacatgatcctggccaccatcatcgccaactgcatcgtgctggccctggagcagcacctgcccgaggacgacaagacccccatgagcagaagactggagaagaccgagccctacttcatcggcatcttctgcttcgaggccggcatcaagatcgtggccctgggcttcatcttccacaagggcagctacctgagaaacggctggaacgtgatggacttcatcgtggtgctgagcggcatcctggccaccgccggcacccacttcaacacccacgtggacctgagaaccctgagagccgtgagagtgctgagacccctgaagctggtgagcggcatccccagcctgcagatcgtgctgaagagcatcatgaaggccatggtgcccctgctgcagatcggcctgctgctgttcttcgccatcctgatgttcgccatcatcggcctggagttctacagcggcaagctgcacagagcctgcttcatgaacaacagcggcatcctggagggcttcgaccccccccacccctgcggcgtgcagggctgccccgccggctacgagtgcaaggactggatcggccccaacgacggcatcacccagttcgacaacatcctgttcgccgtgctgaccgtgttccagtgcatcaccatggagggctggaccaccgtgctgtacaacaccaacgacgccctgggcgccacctggaactggctgtacttcatccccctgatcatcatcggcagcttcttcgtgctgaacctggtgctgggcgtgctgagcggcgagttcgccaaggagagagagagagtggagaacagaagagccttcatgaagctgagaagacagcagcagatcgagagagagctgaacggctacagagcctggatcgacaaggccgaggaggtgatgctggccgaggagaacaagaacgccggcaccagcgccctggaggtgctgagaagagccaccatcaagagaagcagaaccgaggccatgaccagagacagcagcgacgagcactgcgtggacatcagcagcgtgggcacccccctggccagagccagcatcaagagcgccaaggtggacggcgtgagctacttcagacacaaggagagactgctgagaatcagcatcagacacatggtgaagagccaggtgttctactggatcgtgctgagcctggtggccctgaacaccgcctgcgtggccatcgtgcaccacaaccagccccagtggctgacccacctgctgtactacgccgagttcctgttcctgggcctgttcctgctggagatgagcctgaagatgtacggcatgggccccagactgtacttccacagcagcttcaactgcttcgacttcggcgtgaccgtgggcagcatcttcgaggtggtgtgggccatcttcagacccggcaccagcttcggcatcagcgtgctgagagccctgagactgctgagaatcttcaagatcaccaagtactgggccagcctgagaaacctggtggtgagcctgatgagcagcatgaagagcatcatcagcctgctgttcctgctgttcctgttcatcgtggtgttcgccctgctgggcatgcagctgttcggcggcagattcaacttcaacgacggcacccccagcgccaacttcgacaccttccccgccgccatcatgaccgtgttccagatcctgaccggcgaggactggaacgaggtgatgtacaacggcatcagaagccagggcggcgtgagcagcggcatgtggagcgccatctacttcatcgtgctgaccctgttcggcaactacaccctgctgaacgtgttcctggccatcgccgtggacaacctggccaacgcccaggagctgaccaaggacgagcaggaggaggaggaggccttcaaccagaagcacgccctgcagaaggccaaggaggtgagccccatgagcgcccccaacatgcccagcatcgagagagagagaagaagaagacaccacatgagcgtgtgggagcagagaaccagccagctgagaaagcacatgcagatgagcagccaggaggccctgaacagagaggaggcccccaccatgaaccccctgaaccccctgaaccccctgagcagcctgaaccccctgaacgcccaccccagcctgtacagaagacccagagccatcgagggcctggccctgggcctggccctggagaagttcgaggaggagagaatcagcagaggcggcagcctgaagggcgacggcggcgacagaagcagcgccctggacaaccagagaacccccctgagcctgggccagagagagcccccctggctggccagaccctgccacggcaactgcgaccccacccagcaggaggccggcggcggcgaggccgtggtgaccttcgaggacagagccagacacagacagagccagagaagaagcagacacagaagagtgagaaccgagggcaaggagagcagcagcgccagcagaagcagaagcgccagccaggagagaagcctggacgaggccatgcccaccgagggcgagaaggaccacgagctgagaggcaaccacggcgccaaggagcccaccatccaggaggagagagcccaggacctgagaagaaccaacagcctgatggtgagcagaggcagcggcctggccggcggcctggacgaggccgacacccccctggtgctgccccaccccgagctggaggtgggcaagcacgtggtgctgaccgagcaggagcccgagggcagcagcgagcaggccctgctgggcaacgtgcagctggacatgggcagagtgatcagccagagcgagcccgacctgagctgcatcaccgccaacaccgacaaggccaccaccgagagcaccagcgtgaccgtggccatccccgacgtggaccccctggtggacagcaccgtggtgcacatcagcaacaagaccgacggcgaggccagccccctgaaggaggccgagatcagagaggacgaggaggaggtggagaagaagaagcagaagaaggagaagagagagaccggcaaggccatggtgccccacagcagcatgttcatcttcagcaccaccaaccccatcagaagagcctgccactacatcgtgaacctgagatacttcgagatgtgcatcctgctggtgatcgccgccagcagcatcgccctggccgccgaggaccccgtgctgaccaacagcgagagaaacaaggtgctgagatacttcgactacgtgttcaccggcgtgttcaccttcgagatggtgatcaagatgatcgaccagggcctgatcctgcaggacggcagctacttcagagacctgtggaacatcctggacttcgtggtggtggtgggcgccctggtggccttcgccctggccaacgccctgggcaccaacaagggcagagacatcaagaccatcaagagcctgagagtgctgagagtgctgagacccctgaagaccatcaagagactgcccaagctgaaggccgtgttcgactgcgtggtgaccagcctgaagaacgtgttcaacatcctgatcgtgtacaagctgttcatgttcatcttcgccgtgatcgccgtgcagctgttcaagggcaagttcttctactgcaccgacagcagcaaggacaccgagaaggagtgcatcggcaactacgtggaccacgagaagaacaagatggaggtgaagggcagagagtggaagagacacgagttccactacgacaacatcatctgggccctgctgaccctgttcaccgtgagcaccggcgagggctggccccaggtgctgcagcacagcgtggacgtgaccgaggaggacagaggccccagcagaagcaacagaatggagatgagcatcttctacgtggtgtacttcgtggtgttccccttcttcttcgtgaacatcttcgtggccctgatcatcatcaccttccaggagcagggcgacaagatgatggaggagtgcagcctggagaagaacgagagagcctgcatcgacttcgccatcagcgccaagcccctgaccagatacatgccccagaacagacacaccttccagtacagagtgtggcacttcgtggtgagccccagcttcgagtacaccatcatggccatgatcgccctgaacaccgtggtgctgatgatgaagtactacagcgccccctgcacctacgagctggccctgaagtacctgaacatcgccttcaccatggtgttcagcctggagtgcgtgctgaaggtgatcgccttcggcttcctgaactacttcagagacacctggaacatcttcgacttcatcaccgtgatcggcagcatcaccgagatcatcctgaccgacagcaagctggtgaacaccagcggcttcaacatgagcttcctgaagctgttcagagccgccagactgatcaagctgctgagacagggctacaccatcagaatcctgctgtggaccttcgtgcagagcttcaaggccctgccctacgtgtgcctgctgatcgccatgctgttcttcatctacgccatcatcggcatgcaggtgttcggcaacatcaagctggacgaggagagccacatcaacagacacaacaacttcagaagcttcttcggcagcctgatgctgctgttcagaagcgccaccggcgaggcctggcaggagatcatgctgagctgcctgggcgagaagggctgcgagcccgacaccaccgcccccagcggccagaacgagaacgagagatgcggcaccgacctggcctacgtgtacttcgtgagcttcatcttcttctgcagcttcctgatgctgaacctgttcgtggccgtgatcatggacaacttcgagtacctgaccagagacagcagcatcctgggcccccaccacctggacgagttcgtgagagtgtgggccgagtacgacagagccgcctgcggcagaatccactacaccgagatgtacgagatgctgaccctgatgagcccccccctgggcctgggcaagagatgccccagcaaggtggcctacaagagactggtgctgatgaacatgcccgtggccgaggacatgaccgtgcacttcaccagcaccctgatggccctgatcagaaccgccctggacatcaagatcgccaagggcggcgccgacagacagcagctggacagcgagctgcagaaggagaccctggccatctggccccacctgagccagaagatgctggacctgctggtgcccatgcccaaggccagcgacctgaccgtgggcaagatctacgccgccatgatgatcatggactactacaagcagagcaaggtgaagaagcagagacagcagctggaggagcagaagaacgcccccatgttccagagaatggagcccagcagcctgccccaggagatcatcgccaacgccaaggccctgccctacctgcagcaggaccccgtgagcggcctgagcggcagaagcggctaccccagcatgagccccctgagcccccaggacatcttccagctggcctgcatggaccccgccgacgacggccagttccaggagagacagagcctggagcccgaggtgagcgagctgaagagcgtgcagcccagcaaccacggcatctacctgcccagcgacacccaggagcacgccggcagcggcagagccagcagcatgcccagactgaccgtggacccccaggtggtgaccgaccccagcagcatgagaagaagcttcagcaccatcagagacaagagaagcaacagcagctggctggaggagttcagcatggagagaagcagcgagaacacctacaagagcagaagaagaagctaccacagcagcctgagactgagcgcccacagactgaacagcgacagcggccacaagagcgacacccacagaagcggcggcagagagagaggcagaagcaaggagagaaagcacctgctgagccccgacgtgagcagatgcaacagcgaggagagaggcacccaggccgactgggagagccccgagagaagacagagcagaagccccagcgagggcagaagccagacccccaacagacagggcaccggcagcctgagcgagagcagcatccccagcgtgagcgacaccagcacccccagaagaagcagaagacagctgccccccgtgccccccaagcccagacccctgctgagctacagcagcctgatcagacacgccggcagcatcagcccccccgccgacggcagcgaggagggcagccccctgaccagccaggccctggagagcaacaacgcctgcctgaccgagagcagcaacagcccccacccccagcagagccagcacgccagcccccagagatacatcagcgagccctacctggccctgcacgaggacagccacgccagcgactgcggcgaggaggagaccctgaccttcgaggccgccgtggccaccagcctgggcagaagcaacaccatcggcagcgccccccccctgagacacagctggcagatgcccaacggccactacagaagaagaagaagaggcggccccggccccggcatgatgtgcggcgccgtgaacaacctgctgagcgacaccgaggaggacgacaagtgctag

SEQ ID NO: 298972 - protein, 202 aa, Artificial Sequence
  derived and/or modified sequence
MLLWSLLVIFERVRENLDSLTLVAPSSVFEGDSIVLKCQGEQNWKIQKMAYHKDNKELSVFKKFSDFLIQSAVLSDSGNYFCSTKGQLFLWDKTSNIVKIKVQGPDGYRRDLMTAGVLWGLFGVLGFTGVALLLYALFHKISGESSATNEPRGASRPNPQEFTYSSPTPDMEELQPVYVNANIRTLLENKDSQVIYSSVKKS

SEQ ID NO: 298973 - protein, 202 aa, Artificial Sequence
  derived and/or modified sequence
MLLWSLLVIFDAVTEQADSLTLVAPSSVFEGDSIVLKCQGEQNWKIQKMAYHKDNKELSVFKKFSDFLIQSAVLSDSGNYFCSTKGQLFLWDKTSNIVKIKVQGPDGYRRDLMTAGVLWGLFGVLGFTGVALLLYALFHKISGESSATNEPRGASRPNPQEFTYSSPTPDMEELQPVYVNANIRTLLENKDSQVIYSSVKKS

SEQ ID NO: 298974 - protein, 192 aa, Artificial Sequence
  derived and/or modified sequence
MWEWKICNSHGARPFAEPAGWEFVNLLRHHKSFLIAPLCLSVPVSRPVLTLRSPGAQAAVGDLLELHCEALRGSPPILYQFYHEDVTLGNSSAPSGGGASFNLSLTAEHSGNYSCEANNGLGAQCSEAVPVSISGPDGYRRDLMTAGVLWGLFGVLGFTGVALLLYALFHKISGCIYHLDSPYFAMTFPLLI

SEQ ID NO: 298975 - DNA, 579 bp, Artificial Sequence
  derived and/or modified sequence
atgtgggagtggaagatctgcaacagccacggcgccagacccttcgccgagcccgccggctgggagttcgtgaacctgctgagacaccacaagagcttcctgatcgcccccctgtgcctgagcgtgcccgtgagcagacccgtgctgaccctgagaagccccggcgcccaggccgccgtgggcgacctgctggagctgcactgcgaggccctgagaggcagcccccccatcctgtaccagttctaccacgaggacgtgaccctgggcaacagcagcgcccccagcggcggcggcgccagcttcaacctgagcctgaccgccgagcacagcggcaactacagctgcgaggccaacaacggcctgggcgcccagtgcagcgaggccgtgcccgtgagcatcagcggccccgacggctacagaagagacctgatgaccgccggcgtgctgtggggcctgttcggcgtgctgggcttcaccggcgtggccctgctgctgtacgccctgttccacaagatcagcggctgcatctaccacctggacagcccctacttcgccatgaccttccccctgctgatctag

SEQ ID NO: 298976 - DNA, 902 bp, Artificial Sequence
  derived and/or modified sequence
gaagagggctggatgggcacaggaaaacaatcagatgagaacaacagatgaccgtgtctgcaggcagcacccagaactgatattcccctcaaacgtctaaatatattgttgagaaaattatctctaactgttctagtgggaatgtgggaatggaaaatatgcaacagccatggggccaggccctttgctgagcctgcaggttgggagtttgtgaatctattgaggcatcacaaatcttttctgatagcccctctgtgtctgtcagttccagtgtctcgccctgtcctcaccctcaggtctcctggggcccaggctgcagtgggggacctgctggagcttcactgtgaggccctgagaggctctcccccaatcttgtaccaattttatcatgaggatgtcacccttgggaacagctcggccccctctggaggaggggcctccttcaacctctctttgactgcagaacattctggaaactactcctgtgaggccaacaacggcctgggggcccagtgcagtgaggcagtgccagtctccatctcaggacctgatggctatagaagagacctcatgacagctggagttctctggggactgtttggtgtccttggtttcactggtgttgctttgctgttgtatgccttgttccacaagatatcaggttgtatctaccatttggattctccatattttgctatgacctttccactactgatatagattgaaattacaaaaaaagaagagagaaaagaaaactctccaaaagccaataatttctttttatgcttcataattctgcaaggctctgtgcaatgctcaatgtggtcatactgctaattatacaatatgtcactgttccctgtgcatagtcactggagattaaattatttacacattctttc

SEQ ID NO: 298977 - DNA, 579 bp, Artificial Sequence
  derived and/or modified sequence
atgtgggagtggaaaatttgtaactctcacggggcccggccattcgcagaacccgctgggtgggagtttgtgaacctccttcgacaccacaagtccttcctcatagctcctctgtgcctatcagtgccagtcagccgacccgtgttgactctgcgcagccctggggcgcaggccgcagttggtgacttacttgagttacattgtgaggcactacggggaagcccgccaatactgtatcagttttatcacgaggatgtgactctgggaaattcaagcgccccctcaggggggggtgcatcattcaatctaagcctgaccgccgagcactccggaaattattcctgtgaggcgaataatggcctaggggcccagtgtagcgaggccgttccagtaagcatcagcggtcccgacggatatagacgggacctcatgaccgcaggggtgttgtggggattgttcggggttcttgggttcacaggtgtggctcttttgctgtacgctctgttccacaagatctctgggtgcatctaccatctggattctccatactttgcgatgaccttccctctgctcatttag

SEQ ID NO: 298978 - DNA, 579 bp, Artificial Sequence
  derived and/or modified sequence
atgtgggagtggaagatctgcaacagccacggggcccggccctttgctgagcctgctggctgggagtttgtgaacctgctgcggcaccacaagagcttcctgattgcccccctgtgcctgtctgtgcctgtgtccaggcctgtgctgaccctgcggagccctggggcccaggccgctgtgggggacctgctggagctgcactgtgaggccctgcggggcagcccccccatcctgtaccagttctaccatgaagatgtgaccctgggcaacagcagcgcccccagcggcggcggggccagcttcaacctgagcctgacagctgagcacagcggcaactacagctgtgaggccaacaacggcctgggcgcccagtgcagcgaggccgtgcctgtgtccatcagcggcccagatggctaccgccgggacctgatgacagctggggtgctgtggggcctgtttggagtgctgggcttcaccggggtggccctgctgctgtatgccctcttccacaagatcagcggctgcatctaccacctggacagcccctactttgccatgaccttccccctgctgatctag

SEQ ID NO: 298979 - DNA, 579 bp, Artificial Sequence
  derived and/or modified sequence
atgtgggagtggaagatctgcaacagccacggcgcccggcccttcgctgaacctgccgggtgggagtttgtcaatctccttagacaccacaagtctttcctgatagcacctctgtgcttatcagtgcctgtttctagacccgttctgactcttcgctcacctggcgcccaggccgccgtgggcgatctgttggaattacactgcgaggctttgcgggggtccccgccaatcctgtatcagttttaccacgaggacgtcacactaggcaattcctccgccccttccggcgggggggcaagtttcaatctttccctcactgccgaacattcagggaactattcttgtgaggcgaacaacggactcggcgctcagtgttctgaggccgtgcctgtgagtatttctgggccagacggttaccgccgggacctgatgaccgccggcgtgctttggggcctgtttggagtgctagggtttactggagtggcccttctgctctatgccctttttcacaaaataagtgggtgtatctaccaccttgattccccgtacttcgcgatgacattccctcttttgatttag

SEQ ID NO: 298980 - DNA, 579 bp, Artificial Sequence
  derived and/or modified sequence
atgtgggaatggaagatctgtaacagccatggtgctagacctttcgctgaaccagccggttgggagtttgtcaatctcctccgccatcataagtcttttctaatcgctccactgtgtctgtccgtgcccgtgtcgcgccctgtgctgactcttcgcagccctggtgcccaagccgcagtcggcgacctgttagagttacactgtgaggctttaagaggaagcccgccaattttgtaccagttctatcacgaagacgtgaccctaggaaacagctctgcacctagcggcggaggcgcttccttcaacttgtctctcacagctgagcactccgggaattacagctgcgaagccaacaacgggcttggagctcaatgctctgaggcggtgccagtatccatcagtgggcctgatggataccgcagagacctgatgaccgcaggggtattgtgggggctgttcggagtgctgggttttacgggtgtggcactcctgctctatgccctatttcataagatcagtgggtgtatctaccatcttgacagcccttattttgccatgacctttcccttgctcatctag

SEQ ID NO: 298981 - DNA, 1101 bp, Artificial Sequence
  derived and/or modified sequence
ggaacatcggcggctgcccgggtgacttggttatatgtcacagaataacattcgagaatgggacatggaatgaggcgacggccccagcaagccccagcagccccagccccagccccaggcccagcagcagcagcagcagcccctgctctcccgccgcccggagaggctctgcagccatgaagccaaccgtcccgaggcaccgccggtaagcagggagcctccgcggagctcccgccgccgctcccccttggcgccaaaggcacccggtcccggagcagccacgcgcggcccgtgagcctcgccaccagcgggggctcagaggaggaggacaaagacggcggggtgctgttccacgtcaacaagagcggcttccccatcgacagccacacctgggagcgcatgtggatgcacgtggccaaggtgcaccctaaggggggagaaatggtgggcgccatcaggaacgccgccttcttggcaaagccttcaataccccaggtcccaaactacaggctgtcgatgacgatcccagactggctccaggcgatccagaattacatgaagaccctacaatataatcacacagggacccagttctttgaaattaggaaaatgagaccgctgagtgggttaatggaaacagcaaaagaaatgacccgagagtccttgcctatcaaatgccttgaagctgtcatcctgggcatctacttaaccaatgggcagccttccattgagcggttccccatcagctttaaaacctacttctcaggaaactactttcaccacgttgtgctggggatttactgcaatggccgctatggctcattgggcatgagccgcagggctgagctgatggacaagccattgacttttcggactctgagtgacctcatctttgactttgaggactcttacaagaaatacctgcacacagtcaagaaggtcaagattgggctgtacgtcccccatgagcctcatagcttccagcccattgagtggaagcagctggtcctcaacgtctcaaagatgctgagggctgacataaggaaggagctggagaaatatgccagggacatgagaatgaagggcttgtgcagtcactaa

SEQ ID NO: 298982 - protein, 156 aa, Artificial Sequence
  derived and/or modified sequence
METAKEMTRESLPIKCLEAVILGIYLTNGQPSIERFPISFKTYFSGNYFHHVVLGIYCNGRYGSLGMSRRAELMDKPLTFRTLSDLIFDFEDSYKKYLHTVKKVKIGLYVPHEPHSFQPIEWKQLVLNVSKMLRADIRKELEKYARDMRMKGLCSH

SEQ ID NO: 298983 - protein, 251 aa, Artificial Sequence
  derived and/or modified sequence
MTIPDWLQAIQNYMKTLQYNHTGTQFFEIRKMRPLSGLMETAKEMTRESLPIKCLEAVILGIYLTNGQPSIERFPISFKTYFSGNYFHHVVLGIYCNGRYGSLGMSRRAELMDKPLTFRTLSDLIFDFEDSYKKYLHTVKKVKIGLYVPHEPHSFQPIEWKQLVLNVSKMLRADIRKELEKYARDMRMKILKPASAHSPTQVRSRGKSLSPRRRQASPPRRLGRREKSPALPEKKVADLSTLNEVGYQIRI

SEQ ID NO: 298984 - DNA, 1206 bp, Artificial Sequence
  derived and/or modified sequence
agcagcagcagcagcagcccctgctctcccgccgcccggagaggctctgcagccatgaagccaaccgtcccgagccttcaataccccaggtcccaaactacaggctgtcgatgacgatcccagactggctccaggcgatccagaattacatgaagaccctacaatataatcacacagggacccagttctttgaaattaggaaaatgagaccgctgagtgggttaatggaaacagcaaaagaaatgacccgagagtccttgcctatcaaatgccttgaagctgtcatcctgggcatctacttaaccaatgggcagccttccattgagcggttccccatcagctttaaaacctacttctcaggaaactactttcaccacgttgtgctggggatttactgcaatggccgctatggctcattgggcatgagccgcagggctgagctgatggacaagccattgacttttcggactctgagtgacctcatctttgactttgaggactcttacaagaaatacctgcacacagtcaagaaggtcaagattgggctgtacgtcccccatgagcctcatagcttccagcccattgagtggaagcagctggtcctcaacgtctcaaagatgctgagggctgacataaggaaggagctggagaaatatgccagggacatgagaatgaagatcctgaaacctgcaagtgcccactctccgacccaagtgagaagccggggaaaatccctgtcccccagaaggagacaggcaagccccccgaggaggctcggccggcgagagaagtcgcctgcactgcctgaaaagaaggtggctgatctgagcactctgaatgaagtgggctatcaaatccgaatttagccaagccataccggccagcaagagggtttctgtggtgcttctctctgcactttacccagcatcttcaggaggaactgcaactatttattaagaacttgtgaattttatttttaaggattcacctggaaatagaatctgagtgggtggtaaccattagctttaaaaaattcactaaaaggcaccatgaaaaggctgaagtaataagccccactggggttggactatgtccctcactcaagatcttaaggataaccgtaactgaagttttatatttttccatttacctactttcttttacttgctttgaacattatgcctcaccaatagtaaatgttcatga

SEQ ID NO: 298985 - DNA, 471 bp, Artificial Sequence
  derived and/or modified sequence
atggagaccgccaaggagatgaccagagagagcctgcccatcaagtgcctggaggccgtgatcctgggcatctacctgaccaacggccagcccagcatcgagagattccccatcagcttcaagacctacttcagcggcaactacttccaccacgtggtgctgggcatctactgcaacggcagatacggcagcctgggcatgagcagaagagccgagctgatggacaagcccctgaccttcagaaccctgagcgacctgatcttcgacttcgaggacagctacaagaagtacctgcacaccgtgaagaaggtgaagatcggcctgtacgtgccccacgagccccacagcttccagcccatcgagtggaagcagctggtgctgaacgtgagcaagatgctgagagccgacatcagaaaggagctggagaagtacgccagagacatgagaatgaagggcctgtgcagccactag

SEQ ID NO: 298986 - DNA, 471 bp, Artificial Sequence
  derived and/or modified sequence
atggagactgctaaggaaatgacgcgcgaatcgctgccgatcaagtgcctggaggcagtgattttggggatttatttaaccaatgggcagccttccatcgaacgatttcctatctccttcaaaacttacttttcaggcaactacttccaccacgtagttcttggtatttattgcaatggaaggtacggctccctcggaatgagccgccgcgcagagctgatggacaaacctctgaccttccgaactctgtctgatctcatttttgacttcgaagactcctacaaaaagtatctccacactgtaaaaaaggtcaagatcggcctttacgtgccgcatgagccccattcattccagccaatagaatggaagcagttagtgctaaacgtctcaaagatgctgcgggccgatattcgcaaggaactcgaaaagtacgcccgcgacatgaggatgaagggtttgtgctcccactag

SEQ ID NO: 298987 - DNA, 471 bp, Artificial Sequence
  derived and/or modified sequence
atggagacagccaaggagatgacccgggagagcctgcccatcaagtgcctggaggccgtcatcctgggcatctacctgaccaacggccagcccagcattgagcgcttccccatctccttcaagacctacttcagcggcaactacttccaccacgtggtgctgggcatctactgcaatggccgctatggcagcctgggcatgagcagaagagctgagctgatggacaagcccctgaccttccgcaccctgagtgacctgatctttgattttgaagattcctacaagaagtacctgcacacagtgaagaaggtgaagattggcctgtatgtgccccatgagccccacagcttccagcccatcgagtggaagcagctggtgctgaatgtgtccaagatgctgcgggctgacatcaggaaggagctggagaagtatgcccgggacatgaggatgaagggcctgtgcagccactag

SEQ ID NO: 298988 - DNA, 471 bp, Artificial Sequence
  derived and/or modified sequence
atggagaccgccaaggagatgacccgggagagcctgcccatcaagtgtctcgaggccgtgattttggggatctacctcacgaacggacagcccagcattgaacgttttcccatcagcttcaagacttacttcagcggtaattatttccaccatgttgtccttggcatttactgcaacggccggtacggctccttggggatgagtaggcgtgcagagctcatggacaaaccactgacatttcgcacgctcagcgacctgatctttgacttcgaagatagttataaaaagtacctgcacacggtgaaaaaggtcaaaataggattatacgtgccacacgaaccacattcctttcagcctatcgagtggaagcagctagtgctgaatgttagtaaaatgctgagagccgatatcagaaaggagttagaaaagtatgcgcgcgacatgcgtatgaaaggcttatgttcccattag

SEQ ID NO: 298989 - DNA, 471 bp, Artificial Sequence
  derived and/or modified sequence
atggagaccgccaaggaaatgacccgtgagagtctgccgatcaagtgtcttgaagctgtaattctcggtatatacctcactaatggccaaccgagcatcgagcgttttccgatttccttcaagacttatttcagcgggaactactttcaccacgtggtgctgggaatctattgtaatggccgttacggatcgctcgggatgtctaggcgcgctgagttgatggataagcctctcacttttcgcacgctgagcgacctgatcttcgacttcgaagatagctataagaaatacctgcacacagtcaagaaagtcaaaattggtctgtacgtcccccacgaaccccattcatttcaacctattgaatggaagcaactagtgctgaacgtgtctaagatgctgagagctgatatacgcaaggagctggagaagtacgcaagagacatgcgtatgaaaggcttatgcagccattag

SEQ ID NO: 298990 - DNA, 303 bp, Artificial Sequence
  derived and/or modified sequence
atgggtacatctagcatcttcttgtgcgtcctcttcttatgcggggcactcgggctgactatgtctcccgctcgcggtcggcttcgctgctatatttgtggttttacaaaaccctgccacccagtgccgacagagtgcagagatgatgaggcctgtggaatcagcataggaacatcgggacgcacccttgtccaatggcctttcagtcggagactccccacttccatccatccggctttccccgtcgcgccagcctccgcgtgtctgttccatcctaccgatcagagtgaaatcaccgagtag

SEQ ID NO: 298991 - DNA, 78 bp, Artificial Sequence
  derived and/or modified sequence
atgtggatgcacgtggccaaggtgcaccccaagggcggcgagatggtgggcgccatcagaaacgccgccttcctgtag

SEQ ID NO: 298992 - DNA, 78 bp, Artificial Sequence
  derived and/or modified sequence
atgtggatgcacgttgcaaaggttcaccccaaagggggggagatggtgggagctatacgtaatgccgcctttctgtag

SEQ ID NO: 298993 - DNA, 78 bp, Artificial Sequence
  derived and/or modified sequence
atgtggatgcacgtggccaaggtgcaccccaagggcggggagatggtgggcgccatcagaaatgctgccttcctgtag

SEQ ID NO: 298994 - DNA, 78 bp, Artificial Sequence
  derived and/or modified sequence
atgtggatgcacgtggccaaggtgcaccccaagggcggcgagatggtgggcgcgattcggaatgcagctttcttatag

SEQ ID NO: 298995 - DNA, 78 bp, Artificial Sequence
  derived and/or modified sequence
atgtggatgcacgtggcaaaggtccaccctaagggcggagagatggtgggggctatcaggaacgcagcatttctatag

SEQ ID NO: 298996 - DNA, 581 bp, Artificial Sequence
  derived and/or modified sequence
ttcgagaatgggacatggaatgaggcgacggccccagcaagccccagcagccccagccccagccccaggcccagcagcagcagcagcagcccctgctctcccgccgcccggagaggctctgcagccatgaagccaaccgtcccgaggtaatcgcagggctggaagcccgtcatcgattctcagggaggctgtcagcgtgcaggggggagcggggagtgtcgtggagacactccgggacccctcactcggttccgctgtgcgtccacttagctgtggtgtcagctgtgtctccgctgatttcaggcaccgccggtaagcagggagcctccgcggagctcccgccgccgctcccccttggcgccaaaggcacccggtcccggagcagccacgcgcggcccgtgagcctcgccaccagcgggggctcagaggaggaggacaaagacggcggggtgctgttccacgtcaacaagagcggcttccccatcgacagccacacctgggagcgcatgtggatgcacgtggccaaggtgcaccctaaggggggagaaatggtgggcgccatcaggaacgccgccttcttg

SEQ ID NO: 298997 - protein, 674 aa, Artificial Sequence
  derived and/or modified sequence
MLLWVILLVLAPVSGQFASLILQAPLSVFEGDSVVLRCRAKAEVTLNNTIYKNDNVLAFLNKRTDFHIPHACLKDNGAYRCTGYKESCCPVSSNTVKIQVQEPFTRPVLRASSFQPISGNPVTLTCETQLSLERSDVPLRFRFFRDDQTLGLGWSLSPNFQITAMWSKDSGFYWCKAATMPYSVISDSPRSWIQVQIPASHPVLTLSPEKALNFEGTKVTLHCETQEDSLRTLYRFYHEGVPLRHKSVRCERGASISFSLTTENSGNYYCTADNGLGAKPSKAVSLSVTVPVSHPVLNLSSPEDLIFEGAKVTLHCEAQRGSLPILYQFHHEGAALERRSANSAGGVAISFSLTAEHSGNYYCTADNGFGPQRSKAVSLSVTVPVSHPVLTLSSAEALTFEGATVTLHCEVQRGSPQILYQFYHEDMPLWSSSTPSVGRVSFSFSLTEGHSGNYYCTADNGFGPQRSEVVSLFVTVPVSRPILTLRVPRAQAVVGDLLELHCEAPRGSPPILYWFYHEDVTLGSSSAPSGGEASFNLSLTAEHSGNYSCEANNGLVAQHSDTISLSVIVPVSRPILTFRAPRAQAVVGDLLELHCEALRGSSPILYWFYHEDVTLGKISAPSGGGASFNLSLTTEHSGIYSCEADNGLEAQRSEMVTLKVAGEWALPTSSTSEN

SEQ ID NO: 298998 - DNA, 2025 bp, Artificial Sequence
  derived and/or modified sequence
atgctgctgtgggtgatcctgctggtgctggcccccgtgagcggccagttcgccagcctgatcctgcaggcccccctgagcgtgttcgagggcgacagcgtggtgctgagatgcagagccaaggccgaggtgaccctgaacaacaccatctacaagaacgacaacgtgctggccttcctgaacaagagaaccgacttccacatcccccacgcctgcctgaaggacaacggcgcctacagatgcaccggctacaaggagagctgctgccccgtgagcagcaacaccgtgaagatccaggtgcaggagcccttcaccagacccgtgctgagagccagcagcttccagcccatcagcggcaaccccgtgaccctgacctgcgagacccagctgagcctggagagaagcgacgtgcccctgagattcagattcttcagagacgaccagaccctgggcctgggctggagcctgagccccaacttccagatcaccgccatgtggagcaaggacagcggcttctactggtgcaaggccgccaccatgccctacagcgtgatcagcgacagccccagaagctggatccaggtgcagatccccgccagccaccccgtgctgaccctgagccccgagaaggccctgaacttcgagggcaccaaggtgaccctgcactgcgagacccaggaggacagcctgagaaccctgtacagattctaccacgagggcgtgcccctgagacacaagagcgtgagatgcgagagaggcgccagcatcagcttcagcctgaccaccgagaacagcggcaactactactgcaccgccgacaacggcctgggcgccaagcccagcaaggccgtgagcctgagcgtgaccgtgcccgtgagccaccccgtgctgaacctgagcagccccgaggacctgatcttcgagggcgccaaggtgaccctgcactgcgaggcccagagaggcagcctgcccatcctgtaccagttccaccacgagggcgccgccctggagagaagaagcgccaacagcgccggcggcgtggccatcagcttcagcctgaccgccgagcacagcggcaactactactgcaccgccgacaacggcttcggcccccagagaagcaaggccgtgagcctgagcgtgaccgtgcccgtgagccaccccgtgctgaccctgagcagcgccgaggccctgaccttcgagggcgccaccgtgaccctgcactgcgaggtgcagagaggcagcccccagatcctgtaccagttctaccacgaggacatgcccctgtggagcagcagcacccccagcgtgggcagagtgagcttcagcttcagcctgaccgagggccacagcggcaactactactgcaccgccgacaacggcttcggcccccagagaagcgaggtggtgagcctgttcgtgaccgtgcccgtgagcagacccatcctgaccctgagagtgcccagagcccaggccgtggtgggcgacctgctggagctgcactgcgaggcccccagaggcagcccccccatcctgtactggttctaccacgaggacgtgaccctgggcagcagcagcgcccccagcggcggcgaggccagcttcaacctgagcctgaccgccgagcacagcggcaactacagctgcgaggccaacaacggcctggtggcccagcacagcgacaccatcagcctgagcgtgatcgtgcccgtgagcagacccatcctgaccttcagagcccccagagcccaggccgtggtgggcgacctgctggagctgcactgcgaggccctgagaggcagcagccccatcctgtactggttctaccacgaggacgtgaccctgggcaagatcagcgcccccagcggcggcggcgccagcttcaacctgagcctgaccaccgagcacagcggcatctacagctgcgaggccgacaacggcctggaggcccagagaagcgagatggtgaccctgaaggtggccggcgagtgggccctgcccaccagcagcaccagcgagaactag

SEQ ID NO: 298999 - DNA, 2352 bp, Artificial Sequence
  derived and/or modified sequence
gagagcacagcttctcagatgtgctccttggagctggtgtgcagtgtcctgactgtaagatcaagtccaaacctgttttggaattgaggaaacttctcttttgatctcagcccttggtggtccaggtcttcatgctgctgtgggtgatattactggtcctggctcctgtcagtggacagtttgcttcgctgatcctgcaagctccactttctgtgtttgaaggagactctgtggttctgaggtgccgggcaaaggcggaagtaacactgaataatactatttacaagaatgataatgtcctggcattccttaataaaagaactgacttccatattcctcatgcatgtctcaaggacaatggtgcatatcgctgtactggatataaggaaagttgttgccctgtttcttccaatacagtcaaaatccaagtccaagagccatttacacgtccagtgctgagagccagctccttccagcccatcagcgggaacccagtgaccctgacctgtgagacccagctctctctagagaggtcagatgtcccgctccggttccgcttcttcagagatgaccagaccctgggattaggctggagtctctccccgaatttccagattactgccatgtggagtaaagattcagggttctactggtgtaaggcagcaacaatgccttacagcgtcatatctgacagcccgagatcctggatacaggtgcagatccctgcatctcatcctgtcctcactctcagccctgaaaaggctctgaattttgagggaaccaaggtgacacttcactgtgaaacccaggaagattctctgcgcactttgtacaggttttatcatgagggtgtccccctgaggcacaagtcagtccgctgtgaaaggggagcatccatcagcttctcactgactacagagaattcagggaactactactgcacagctgacaatggccttggcgccaagcccagtaaggctgtgagcctctcagtcactgttcccgtgtctcatcctgtcctcaacctcagctctcctgaggacctgatttttgagggagccaaggtgacacttcactgtgaagcccagagaggttcactccccatcctgtaccagtttcatcatgagggtgctgccctggagcgtaggtcggccaactctgcaggaggagtggccatcagcttctctctgactgcagagcattcagggaactactactgcacagctgacaatggctttggcccccagcgcagtaaggcggtgagcctctccgtcactgtccctgtgtctcatcctgtcctcaccctcagctctgctgaggccctgacttttgaaggagccactgtgacacttcactgtgaagtccagagaggttccccacaaatcctataccagttttatcatgaggacatgcccctgtggagcagctcaacaccctctgtgggaagagtgtccttcagcttctctctgactgaaggacattcagggaattactactgcacagctgacaatggctttggtccccagcgcagtgaagtggtgagcctttttgtcactgttccagtgtctcgccccatcctcaccctcagggttcccagggcccaggctgtggtgggggacctgctggagcttcactgtgaggccccgagaggctctcccccaatcctgtactggttttatcatgaggatgtcaccctggggagcagctcagccccctctggaggagaagcttctttcaacctctctctgactgcagaacattctggaaactactcatgtgaggccaacaatggcctagtggcccagcacagtgacacaatatcactcagtgttatagttccagtatctcgtcccatcctcaccttcagggctcccagggcccaggctgtggtgggggacctgctggagcttcactgtgaggccctgagaggctcctccccaatcctgtactggttttatcatgaagatgtcaccctgggtaagatctcagccccctctggaggaggggcctccttcaacctctctctgactacagaacattctggaatctactcctgtgaggcagacaatggtctggaggcccagcgcagtgagatggtgacactgaaagttgcaggtgagtgggccctgcccaccagcagcacatctgagaactgactgtgcctgttctccctgcagctgaaaatggagccacagagctcctcagggctgtttgcttgtgtggcatcccagcacacttcctgcctgcagaacctccctgtgaaagtctcggatcctttgtggtatggttccaggaatctgatgtttcccagcagtcttcttgaagatgatcaaagcacctcactaaaaatgc

SEQ ID NO: 299000 - DNA, 2025 bp, Artificial Sequence
  derived and/or modified sequence
atgttgctttgggtgatcctgctcgtccttgcacccgtctcagggcagtttgcgtccctgatcttgcaagcgccactctccgtcttcgaaggagacagcgttgttctgcgctgccgggcaaaagcagaggtgacgctgaataatactatctataagaacgacaacgtgctggctttcctcaataaaagaactgactttcatatcccgcacgcatgtttaaaggataacggcgcctacagatgcacaggttacaaggagagctgttgccccgtgagctccaacaccgtgaaaatccaggtgcaagagcccttcacaaggcctgtccttagagcctcttcctttcaaccaatatcaggcaatcccgtcaccctgacctgtgaaacccagctgtccctggagcggtccgacgtgcccctgcgctttcggttttttcgggacgatcagaccctggggctcggttggtctctctcccccaacttccaaatcacggccatgtggtcaaaggactccggtttttattggtgtaaagccgccacgatgccctactcagttatctcagacagccctcgcagctggattcaggtgcagattcctgcctcgcacccggtgcttaccttgagtccagagaaggccctcaatttcgaggggaccaaggtaactctgcattgtgaaactcaggaagactctctgaggactctgtatcgcttctatcacgagggagttccactgagacataaatccgttcggtgtgaaagaggtgctagtatatctttcagcctgactacagagaattccgggaattactactgcacagccgacaacgggctgggggccaaaccttcaaaagctgtgtcgttaagtgtgactgtgcccgtgagccaccccgttctcaacctgagttctcccgaggatctaatttttgagggggcaaaggtcacactacactgtgaggcacaacgtggctccctgccgatcctgtaccagtttcaccacgaaggcgccgccctggagcgccggtcagcaaatagcgccggcggtgttgccatctcattctctctcacagcagaacacagcggcaattattattgcactgctgacaacgggttcggccctcaacgcagcaaggctgtgagcctgagtgtcacggtacccgtgtcacacccggttctgaccctcagtagcgcggaggcactgactttcgagggagctactgtaactcttcactgcgaggttcagagaggaagcccccagattctgtaccaattctaccatgaggacatgcctctgtggtcgtcaagcacacctagcgtgggtagggtgtcatttagcttctccctcacggaggggcactccggcaattactattgtaccgctgacaacggattcgggccacaacgatcagaggtcgtatcactgttcgttaccgtgcccgtgtcccggcccatactgacgcttcgtgtgccccgagctcaggcggtggttggcgatctgctcgaactacattgcgaggcccccaggggatccccacccatcttgtattggttctaccatgaagacgtaacgctgggtagtagttccgctccctcaggcggagaagccagtttcaacttatctcttaccgccgaacactctgggaattactcttgcgaagcaaacaatggtttggtggcgcagcacagtgacacgatcagcttatccgtgatcgtgcctgtgtcacggcccatactaacgttccgtgctccccgagcgcaggccgtggtgggagacctcctggagctacactgcgaggcgttgcggggaagctcccccattctgtactggttctaccatgaggatgttacgttggggaagatttcagcaccgtcggggggcggcgcctcgttcaacctcagtctgacaaccgagcacagcggtatatactcctgcgaggcagacaacgggctggaagctcagaggagcgaaatggtaacgttgaaggtagctggtgaatgggccctacctaccagcagtacatctgaaaactag

SEQ ID NO: 299001 - DNA, 2025 bp, Artificial Sequence
  derived and/or modified sequence
atgctgctgtgggtgatcctgctggtgctggcccctgtgtctggccagtttgccagcctcatcctgcaggcccccctgtctgtgtttgaaggagacagcgtggtgctgcgctgccgggccaaggccgaggtgaccctgaacaacaccatctacaagaatgacaacgtgctggccttcctgaacaagaggacagacttccacatcccccacgcctgcctgaaggacaacggggcctaccgctgcaccggctacaaggagagctgctgccctgtgagcagcaacacagtgaagatccaggtgcaggagcccttcaccaggcctgtgctgcgggccagcagcttccagcccatcagcggcaaccctgtgaccctgacctgtgagacccagctgagcctggagaggagtgatgtgcccctgcgcttccgcttcttcagagatgaccagaccctgggcctgggctggagcctgagccccaacttccagatcacagccatgtggagcaaggacagcggcttctactggtgcaaggccgccaccatgccctacagcgtcatcagtgacagccccaggtcctggatccaggtgcagatcccagccagccaccctgtgctgaccctgagccctgagaaggccctgaactttgagggcaccaaggtgaccctgcactgtgagacccaggaggacagcctgcggaccctgtaccgcttctaccacgagggcgtgcccctgcggcacaagtctgtgcgctgtgagcggggggccagcatctccttcagcctgaccacagaaaattctggcaactactactgcacagctgacaatggcctgggcgccaagcccagcaaggctgtgtccctgtctgtgacagtgcctgtgagccaccctgtgctgaacctgagcagcccagaagatctcatctttgaaggagccaaggtgaccctgcactgtgaggcccagaggggcagcctgcccatcctgtaccagttccaccatgaaggagctgccctggagcggcgcagcgccaacagcgctgggggcgtggccatctccttcagcctgacagctgagcacagcggcaactactactgcacagctgacaatggatttggcccccagaggagcaaggctgtgtccctgtctgtgacagtgcctgtgagccaccctgtgctgaccctgagcagcgctgaggccctgacctttgagggcgccaccgtgaccctgcactgtgaggtgcagaggggcagcccccagatcctgtaccagttctaccacgaggacatgcccctgtggagcagcagcacccccagcgtgggccgggtgtccttctccttcagcctgacagagggccacagcggcaactactactgcacagctgacaatggcttcggcccccagaggtctgaggtggtgtccctgtttgtgacagtgcctgtgtcccggcccatcctgaccctgcgggtgccccgggcccaggccgtggtgggggacctgctggagctgcactgtgaggccccccggggcagcccccccatcctgtactggttctaccatgaagatgtgaccctgggcagcagcagcgcccccagcggcggggaggccagcttcaacctgagcctgacagctgagcacagcggcaactacagctgtgaggccaacaacggcctggtggcccagcacagcgacaccatcagcctgagcgtcatcgtgcctgtgtcccggcccatcctgaccttccgggccccccgggcccaggccgtggtgggggacctgctggagctgcactgtgaggccctgcggggcagcagccccatcctgtactggttctaccatgaagatgtgaccctgggcaagatcagcgcccccagcggcggcggggccagcttcaacctgagcctgaccacagagcacagcggcatctacagctgtgaggccgacaatggcctggaggcccagaggtctgagatggtgaccctgaaggtggccggggagtgggccctgcccaccagcagcaccagtgaaaattag

SEQ ID NO: 299002 - DNA, 2025 bp, Artificial Sequence
  derived and/or modified sequence
atgctgctgtgggtgatcctgctggtgctggcccccgtgagcggccaattcgcgtcgctcatccttcaggctcctctgtcagtttttgagggagactctgtcgtgctgcggtgtcgcgctaaggctgaagtgacactcaacaacaccatctacaagaacgacaatgtgttggccttcctgaataagaggaccgacttccacatcccacacgcctgtctgaaggataacggagcttaccgctgcacagggtataaggagtcatgctgccctgttagctccaacaccgtcaaaatccaggtgcaggagccgtttacccggccagtactgagagccagctcctttcagccgatttctgggaacccagtgactttgacatgcgagacccagctgtctctggaaagatccgatgttccccttagatttcgctttttcagggacgatcagacgctggggctcgggtggtcccttagccccaattttcagatcacagccatgtggagtaaagatagcgggttttattggtgcaaggcggccacaatgccctattctgttattagcgatagcccgcgcagctggatccaagtacagatccctgctagccatccggtgctaactctttctcccgagaaagctttgaattttgaaggaacgaaggtgaccctccactgcgagactcaagaagattctctgagaactctttaccgtttttaccacgaaggagtgccactcagacataagtcagtcaggtgtgagcggggggctagcatttccttctccttgaccacagaaaatagcggaaactactattgcaccgccgacaacgggctcggtgcgaagcccagcaaggctgtgtctctgagcgtcactgttcccgtctctcatcccgttctaaacctgtcttctcccgaggacctgatttttgagggagctaaagtgaccctgcactgcgaggcccagaggggaagtctccccatcctctatcagtttcaccacgaaggggccgctctcgaaagacgatccgccaactccgcaggaggggtggcaataagctttagcctgactgctgaacattccggcaattactactgtacggcggacaacggcttcggtccacaaaggtccaaggcagtcagcttgtctgtgacggtgccggtgtctcaccctgtacttaccctcagcagcgccgaggccctgacctttgaaggcgccaccgttacccttcattgtgaagtgcagagaggctctccacagatcctgtaccagttttaccatgaggatatgcccctgtggtcttcctccacccctagtgtaggtcgggtcagctttagctttagcctcactgaggggcactctggaaattattattgcactgcagacaatggcttcggacctcagcgctcagaggtagtcagtttatttgtcactgtccctgtatcccggcccatcctaaccctaagagttccacgggctcaagctgtggtcggagacctcctcgagctgcattgtgaagcccccaggggtagccctcctatcctctactggttttaccatgaggacgtgaccctcgggtcctcctcagcaccttccgggggtgaggcaagtttcaacctgtccctgacagcagagcactcgggaaactactcttgtgaggcaaataatgggttggtcgcccagcatagcgatacaatttctttaagtgtaatcgtgccagtgtcgagacctatcctgacttttcgagctcctcgagcccaggctgttgttggggacctgctggaactacactgtgaggccctgagaggttcttctccaatcttgtattggttctaccacgaagatgtaactctaggaaaaatttctgcccctagcggagggggcgcaagcttcaatctgtccctgacaactgagcatagcgggatttactcttgtgaggcagacaacggactcgaagcccagaggtccgagatggtgaccttaaaggtagccggagagtgggccctgccaacctctagtacctccgaaaactag

SEQ ID NO: 299003 - DNA, 2025 bp, Artificial Sequence
  derived and/or modified sequence
atgctgctttgggtgatcctactggtgttagctcccgtgtcaggccagttcgcatctcttattttgcaggctcccctgtctgtctttgagggagactccgtggttctgaggtgccgggctaaggccgaagtgacacttaacaatacaatctataagaacgacaacgtgcttgccttcttgaacaagcgtactgactttcacattccacacgcatgtctgaaagacaacggcgcttaccgttgcaccggctataaggaaagttgttgtccagtcagctccaacacagtcaagattcaggtacaggagccctttacaagaccggttctgcgagctagttctttccaacctatttccggaaaccctgtgactcttacttgtgaaacccagctcagtctcgagcgcagcgatgtccctctgcgcttcagattcttccgtgacgatcaaacactggggctgggatggagcctgtcgcctaacttccagataacagccatgtggtcaaaagactctggattttattggtgtaaagctgcaaccatgccttacagtgttatctcagacagtcctcggtcttggatccaagtgcaaatcccagcatcccaccccgtcctcactctgtcaccggagaaggccctaaatttcgaaggaacaaaggtcacccttcactgtgagacacaagaagacagcttgcggacactctatcggttctaccacgagggcgtcccacttagacacaaatcagtcagatgcgagaggggcgcttccatctctttcagcctgacaacggagaactccggcaactactactgtaccgccgacaacggactcggggcaaagcccagtaaggcagtgagcctcagtgtgactgtccccgtgtcccaccccgtacttaacctgtctagcccagaagaccttatcttcgagggggcaaaggtgacactgcactgtgaggctcagcggggttccctgcccattctgtaccagttccatcacgagggggctgctctggagagacgttccgctaatagcgccggtggagtggccattagtttctctctcaccgcagaacacagcggcaactactattgtaccgctgacaatggctttggtccccaacgctcaaaggctgtgagtctaagcgtcacagttccagtgagccaccctgttctgaccctctccagcgctgaggcactgacatttgaaggcgctacagtcaccctgcactgtgaggtgcagaggggctctccccaaattttataccaattttatcatgaagatatgccactgtggagcagttccacgcccagtgttggcagggttagcttcagcttctccctcaccgaggggcacagcggcaattactattgcaccgctgataacggatttggcccacagcgcagcgaggtcgtgagtctgttcgtcaccgtgcctgttagtcgccctattctgactttacgcgtgccccgagcgcaggcagttgtgggcgatttattagaactgcattgtgaagcgccacgtggctctcccccaatcttgtactggttttatcatgaggatgtcacgctgggtagcagcagtgctccttccggcggagaggcgtccttcaatctgtcactgaccgctgaacatagcgggaactattcttgtgaggctaataacggtcttgttgcacagcactctgataccatttcgctgagcgtcatcgtgcctgtgtcccgacccatccttactttcagagcacccagggctcaagcggtggtaggggatttgttggaactgcactgcgaggctctgcggggatcttcacccatcctgtattggttctatcatgaagacgtcactcttggcaagatttccgcaccgagtggaggtggagcgtcttttaacctcagccttaccaccgagcattccggaatatactcatgtgaggcggataacggcttggaagcacagcggagtgagatggtcactctgaaggtggcgggtgagtgggccctgccgactagttcaacctcagagaattag

SEQ ID NO: 299004 - DNA, 375 bp, Artificial Sequence
  derived and/or modified sequence
atgctgctgtgggtgatcctgctggtgctggcccccgtgagcggccagttcgccagaacccccagacccatcatcttcctgcagcccccctggaccaccgtgttccagggcgagagagtgaccctgacctgcaagggcttcagattctacagcccccagaagaccaagtggtaccacagatacctgggcaaggagatcctgagagagacccccgacaacatcctggaggtgcaggagagcggcgagtacagatgccaggcccagggcagccccctgagcagccccgtgcacctggacttcagcagcgagatgggcttcccccacgccgcccaggccaacgtggagctgctgggcagcagcgacctgctgacctag

SEQ ID NO: 299005 - DNA, 1779 bp, Artificial Sequence
  derived and/or modified sequence
atgctgctgtgggtgatcctgctggtgctggcccccgtgagcggccagttcgccagaacccccagacccatcatcttcctgcagcccccctggaccaccgtgttccagggcgagagagtgaccctgacctgcaagggcttcagattctacagcccccagaagaccaagtggtaccacagatacctgggcaaggagatcctgagagagacccccgacaacatcctggaggtgcaggagagcggcgagtacagatgccaggcccagggcagccccctgagcagccccgtgcacctggacttcagcagcgccagcctgatcctgcaggcccccctgagcgtgttcgagggcgacagcgtggtgctgagatgcagagccaaggccgaggtgaccctgaacaacaccatctacaagaacgacaacgtgctggccttcctgaacaagagaaccgacttccacatcccccacgcctgcctgaaggacaacggcgcctacagatgcaccggctacaaggagagctgctgccccgtgagcagcaacaccgtgaagatccaggtgcaggagcccttcaccagacccgtgctgagagccagcagcttccagcccatcagcggcaaccccgtgaccctgacctgcgagacccagctgagcctggagagaagcgacgtgcccctgagattcagattcttcagagacgaccagaccctgggcctgggctggagcctgagccccaacttccagatcaccgccatgtggagcaaggacagcggcttctactggtgcaaggccgccaccatgccctacagcgtgatcagcgacagccccagaagctggatccaggtgcagatccccgccagccaccccgtgctgaccctgagccccgagaaggccctgaacttcgagggcaccaaggtgaccctgcactgcgagacccaggaggacagcctgagaaccctgtacagattctaccacgagggcgtgcccctgagacacaagagcgtgagatgcgagagaggcgccagcatcagcttcagcctgaccaccgagaacagcggcaactactactgcaccgccgacaacggcctgggcgccaagcccagcaaggccgtgagcctgagcgtgaccgtgcccgtgagccaccccgtgctgaacctgagcagccccgaggacctgatcttcgagggcgccaaggtgaccctgcactgcgaggcccagagaggcagcctgcccatcctgtaccagttccaccacgagggcgccgccctggagagaagaagcgccaacagcgccggcggcgtggccatcagcttcagcctgaccgccgagcacagcggcaactactactgcaccgccgacaacggcttcggcccccagagaagcaaggccgtgagcctgagcgtgaccgtgcccgtgagccaccccgtgctgaccctgagcagcgccgaggccctgaccttcgagggcgccaccgtgaccctgcactgcgaggtgcagagaggcagcccccagatcctgtaccagttctaccacgaggacatgcccctgtggagcagcagcacccccagcgtgggcagagtgagcttcagcttcagcctgaccgagggccacagcggcaactactactgcaccgccgacaacggcttcggcccccagagaagcgaggtggtgagcctgttcgtgaccggcaagtgctgggtgctggccagccacccccccctggccgagttcagcctgacccacagcttcaagaacctgttcgccctgagcagcttcctgccctag

SEQ ID NO: 299006 - DNA, 2280 bp, Artificial Sequence
  derived and/or modified sequence
atgctgctgtgggtgatcctgctggtgctggcccccgtgagcggccagttcgccagaacccccagacccatcatcttcctgcagcccccctggaccaccgtgttccagggcgagagagtgaccctgacctgcaagggcttcagattctacagcccccagaagaccaagtggtaccacagatacctgggcaaggagatcctgagagagacccccgacaacatcctggaggtgcaggagagcggcgagtacagatgccaggcccagggcagccccctgagcagccccgtgcacctggacttcagcagcgccagcctgatcctgcaggcccccctgagcgtgttcgagggcgacagcgtggtgctgagatgcagagccaaggccgaggtgaccctgaacaacaccatctacaagaacgacaacgtgctggccttcctgaacaagagaaccgacttccacatcccccacgcctgcctgaaggacaacggcgcctacagatgcaccggctacaaggagagctgctgccccgtgagcagcaacaccgtgaagatccaggtgcaggagcccttcaccagacccgtgctgagagccagcagcttccagcccatcagcggcaaccccgtgaccctgacctgcgagacccagctgagcctggagagaagcgacgtgcccctgagattcagattcttcagagacgaccagaccctgggcctgggctggagcctgagccccaacttccagatcaccgccatgtggagcaaggacagcggcttctactggtgcaaggccgccaccatgccctacagcgtgatcagcgacagccccagaagctggatccaggtgcagatccccgccagccaccccgtgctgaccctgagccccgagaaggccctgaacttcgagggcaccaaggtgaccctgcactgcgagacccaggaggacagcctgagaaccctgtacagattctaccacgagggcgtgcccctgagacacaagagcgtgagatgcgagagaggcgccagcatcagcttcagcctgaccaccgagaacagcggcaactactactgcaccgccgacaacggcctgggcgccaagcccagcaaggccgtgagcctgagcgtgaccgtgcccgtgagccaccccgtgctgaacctgagcagccccgaggacctgatcttcgagggcgccaaggtgaccctgcactgcgaggcccagagaggcagcctgcccatcctgtaccagttccaccacgagggcgccgccctggagagaagaagcgccaacagcgccggcggcgtggccatcagcttcagcctgaccgccgagcacagcggcaactactactgcaccgccgacaacggcttcggcccccagagaagcaaggccgtgagcctgagcgtgaccgtgcccgtgagccaccccgtgctgaccctgagcagcgccgaggccctgaccttcgagggcgccaccgtgaccctgcactgcgaggtgcagagaggcagcccccagatcctgtaccagttctaccacgaggacatgcccctgtggagcagcagcacccccagcgtgggcagagtgagcttcagcttcagcctgaccgagggccacagcggcaactactactgcaccgccgacaacggcttcggcccccagagaagcgaggtggtgagcctgttcgtgaccgtgcccgtgagcagacccatcctgaccctgagagtgcccagagcccaggccgtggtgggcgacctgctggagctgcactgcgaggcccccagaggcagcccccccatcctgtactggttctaccacgaggacgtgaccctgggcagcagcagcgcccccagcggcggcgaggccagcttcaacctgagcctgaccgccgagcacagcggcaactacagctgcgaggccaacaacggcctggtggcccagcacagcgacaccatcagcctgagcgtgatcgtgcccgtgagcagacccatcctgaccttcagagcccccagagcccaggccgtggtgggcgacctgctggagctgcactgcgaggccctgagaggcagcagccccatcctgtactggttctaccacgaggacgtgaccctgggcaagatcagcgcccccagcggcggcggcgccagcttcaacctgagcctgaccaccgagcacagcggcatctacagctgcgaggccgacaacggcctggaggcccagagaagcgagatggtgaccctgaaggtggccggcgagtgggccctgcccaccagcagcaccagcgagaactag

SEQ ID NO: 299007 - DNA, 403 bp, Artificial Sequence
  derived and/or modified sequence
atctcagcccttggtggtccaggtcttcatgctgctgtgggtgatattactggtcctggctcctgtcagtggacagtttgcaaggacacccaggcccattattttcctccagcctccatggaccacagtcttccaaggagagagagtgaccctcacttgcaagggatttcgcttctactcaccacagaaaacaaaatggtaccatcggtaccttgggaaagaaatactaagagaaaccccagacaatatccttgaggttcaggaatctggagagtacagatgccaggcccagggctcccctctcagtagccctgtgcacttggatttttcttcagagatgggatttcctcatgctgcccaggctaatgttgaactcctgggctcaagtgatctgctcacctag

SEQ ID NO: 299008 - DNA, 4424 bp, Artificial Sequence
  derived and/or modified sequence
gtgcagtgtcctgactgtaagatcaagtccaaacctgttttggaattgaggaaacttctcttttgatctcagcccttggtggtccaggtcttcatgctgctgtgggtgatattactggtcctggctcctgtcagtggacagtttgcaaggacacccaggcccattattttcctccagcctccatggaccacagtcttccaaggagagagagtgaccctcacttgcaagggatttcgcttctactcaccacagaaaacaaaatggtaccatcggtaccttgggaaagaaatactaagagaaaccccagacaatatccttgaggttcaggaatctggagagtacagatgccaggcccagggctcccctctcagtagccctgtgcacttggatttttcttcagcttcgctgatcctgcaagctccactttctgtgtttgaaggagactctgtggttctgaggtgccgggcaaaggcggaagtaacactgaataatactatttacaagaatgataatgtcctggcattccttaataaaagaactgacttccatattcctcatgcatgtctcaaggacaatggtgcatatcgctgtactggatataaggaaagttgttgccctgtttcttccaatacagtcaaaatccaagtccaagagccatttacacgtccagtgctgagagccagctccttccagcccatcagcgggaacccagtgaccctgacctgtgagacccagctctctctagagaggtcagatgtcccgctccggttccgcttcttcagagatgaccagaccctgggattaggctggagtctctccccgaatttccagattactgccatgtggagtaaagattcagggttctactggtgtaaggcagcaacaatgccttacagcgtcatatctgacagcccgagatcctggatacaggtgcagatccctgcatctcatcctgtcctcactctcagccctgaaaaggctctgaattttgagggaaccaaggtgacacttcactgtgaaacccaggaagattctctgcgcactttgtacaggttttatcatgagggtgtccccctgaggcacaagtcagtccgctgtgaaaggggagcatccatcagcttctcactgactacagagaattcagggaactactactgcacagctgacaatggccttggcgccaagcccagtaaggctgtgagcctctcagtcactgttcccgtgtctcatcctgtcctcaacctcagctctcctgaggacctgatttttgagggagccaaggtgacacttcactgtgaagcccagagaggttcactccccatcctgtaccagtttcatcatgagggtgctgccctggagcgtaggtcggccaactctgcaggaggagtggccatcagcttctctctgactgcagagcattcagggaactactactgcacagctgacaatggctttggcccccagcgcagtaaggcggtgagcctctccgtcactgtccctgtgtctcatcctgtcctcaccctcagctctgctgaggccctgacttttgaaggagccactgtgacacttcactgtgaagtccagagaggttccccacaaatcctataccagttttatcatgaggacatgcccctgtggagcagctcaacaccctctgtgggaagagtgtccttcagcttctctctgactgaaggacattcagggaattactactgcacagctgacaatggctttggtccccagcgcagtgaagtggtgagcctttttgtcactggtaagtgctgggttcttgccagtcacccacccctggctgagttctctctcacccattcctttaaaaatctgtttgcactgtccagtttcctcccctaatcaacttaatccccttcttggcttcctcctcaactaactagctggggttttccgtactcataagtcctggctcagccagacccctaaaacagctcagtagattccccagcttttaccaaatgaatttatttattgtattttctcctcattccttgtatgttccaacagtacgccaatttttcttgatgcacggagcgtgtcctacttctctactgacatttacatattaacttagctacaagcacagtcttatagataaatattggtcaagaccttaaattctccaaaggatttccaatcttatggtagatttggagaaagctgctggtgaacaaagggggaaatggctccctaggaaccaactcctcaaacttctggagtttttatgatcccttgttttctaacctgctaaaatcagtatcattttattgtattattttaaaaaaactattgttgaagtatgacatacattcaagaaacgtgtgcaaattgtatgtgtacgatttggtgtctttttaggagctaagttgcttctgtttttacttgaatctttgtttatagaaactgggggaaagtttactttcttttcagagaagccaaatggtatgatagaaaaatcttgagcctgatgtgtcagacatgcccctagcataacttgttgagtaaagaggttatttttaaaatgtgaatgttctgagactactccaaagtcagagccaaatctactaggaagcttctagacttcactcattctgcatcccattactatctttttatccatgttttactttcttctcatattcagcagcatcttaagcctctttattttctgtttcttgactgtcacccttaatgccagtagaatgtaagcttcatgagaacagaactgcatccatcttggtcttcacaacatccctgtgcctactcagtgtttggcacacagtaggtcctcagtcaacatttgtaatttagtggacagatgatatgacaagatgataagaggggatttaaaaaaatcatctagcaaagcccaagaggaaaaaaaacaaagctattttagaaatgaaataccaatttgaagcagtaagaatagattggatatctttgaaaaccattaattgaatgaagaaccaatttgagaaaacaatacagaatgcaaagtagaaagatacagaaataaaggcaaaaattataatatggaaatcagacaatggatttgtctgtatccagttatgtggataattaaaatggagaccctcagaaaattgaaccgaagagtaaaatgaaactcaaaaatgtagtagaaattgttgggaagtaaagaaaacttgaatatgtagatcagaacatatatgttgatgacgttattgactttgaggttaaaaatatatatatgtgcctatgattatggggaaaaaagcagtcgtctcagaaagaaaaacatcaagttagtcttagactttgcagtgcactcaataccaaagagagaggaggtccagacttggacctgcgagggaagaataataaccgaaaattttatatcaattcaaaaagacattgtcaaaaatacagggattcaggaaactgagaatgcactaagccttctggaaaaaacacctaatgacaaaatctagcccaacaagatgtaaatgaatataaaggactcataatgaggaaaccgcattatgactggctctcaaccctggctgcatattagactcgtcaaagacctttgtaaaaggtcacacattgactcgtcaaagcccctctccagactaattcaattcagaatctcacagatggggccacagaatcagtattttttgacacaacctcaagtgagaatattgtgtagacaagattggaaaccactgatttagatatagaaacaaaggctaatcaactgtgagaattatggtcacagaatagaaagtaactattatgaacactgaaaatgtaaaaaaaatgtaacaaagaaaaatagttagaggaaggagaggaagtaaaggaacaatcattttctcatgattattattatttcagagtaaattgtgagttatttcacaattcaaaaagaatggactgttttaaaaaattagtaatagatttcaaaatgtccattttgtaaatcgtttctgaatactttgtcaacagttactcatcattaatggcttatacttcactaaaattccatggaaaaccaactagtagcctgtagagtcacataggagagaacaagtgaattctttgggtggcgcaagcatagatgttaggactgacaaaaaaaaaataataaaaataaacctgtgcattgatatgatcacaaatgatcagggaaagaggaaacagaaactctcatacgccattattacaagcgtaaattggttcaaccttttcgtcttaattgacacattgtaattgtatatatttatggaagcacagtttgatattttgatatacatacatggtatataacgatcaaattaggatatttaatgtacccatcatctcatgcatttatcatttctttggaataaaaacattcaaaagcc

SEQ ID NO: 299009 - DNA, 2800 bp, Artificial Sequence
  derived and/or modified sequence
gtgcagtgtcctgactgtaagatcaagtccaaacctgttttggaattgaggaaacttctcttttgatctcagcccttggtggtccaggtcttcatgctgctgtgggtgatattactggtcctggctcctgtcagtggacagtttgcaaggacacccaggcccattattttcctccagcctccatggaccacagtcttccaaggagagagagtgaccctcacttgcaagggatttcgcttctactcaccacagaaaacaaaatggtaccatcggtaccttgggaaagaaatactaagagaaaccccagacaatatccttgaggttcaggaatctggagagtacagatgccaggcccagggctcccctctcagtagccctgtgcacttggatttttcttcagcttcgctgatcctgcaagctccactttctgtgtttgaaggagactctgtggttctgaggtgccgggcaaaggcggaagtaacactgaataatactatttacaagaatgataatgtcctggcattccttaataaaagaactgacttccatattcctcatgcatgtctcaaggacaatggtgcatatcgctgtactggatataaggaaagttgttgccctgtttcttccaatacagtcaaaatccaagtccaagagccatttacacgtccagtgctgagagccagctccttccagcccatcagcgggaacccagtgaccctgacctgtgagacccagctctctctagagaggtcagatgtcccgctccggttccgcttcttcagagatgaccagaccctgggattaggctggagtctctccccgaatttccagattactgccatgtggagtaaagattcagggttctactggtgtaaggcagcaacaatgccttacagcgtcatatctgacagcccgagatcctggatacaggtgcagatccctgcatctcatcctgtcctcactctcagccctgaaaaggctctgaattttgagggaaccaaggtgacacttcactgtgaaacccaggaagattctctgcgcactttgtacaggttttatcatgagggtgtccccctgaggcacaagtcagtccgctgtgaaaggggagcatccatcagcttctcactgactacagagaattcagggaactactactgcacagctgacaatggccttggcgccaagcccagtaaggctgtgagcctctcagtcactgttcccgtgtctcatcctgtcctcaacctcagctctcctgaggacctgatttttgagggagccaaggtgacacttcactgtgaagcccagagaggttcactccccatcctgtaccagtttcatcatgagggtgctgccctggagcgtaggtcggccaactctgcaggaggagtggccatcagcttctctctgactgcagagcattcagggaactactactgcacagctgacaatggctttggcccccagcgcagtaaggcggtgagcctctccgtcactgtccctgtgtctcatcctgtcctcaccctcagctctgctgaggccctgacttttgaaggagccactgtgacacttcactgtgaagtccagagaggttccccacaaatcctataccagttttatcatgaggacatgcccctgtggagcagctcaacaccctctgtgggaagagtgtccttcagcttctctctgactgaaggacattcagggaattactactgcacagctgacaatggctttggtccccagcgcagtgaagtggtgagcctttttgtcactgttccagtgtctcgccccatcctcaccctcagggttcccagggcccaggctgtggtgggggacctgctggagcttcactgtgaggccccgagaggctctcccccaatcctgtactggttttatcatgaggatgtcaccctggggagcagctcagccccctctggaggagaagcttctttcaacctctctctgactgcagaacattctggaaactactcatgtgaggccaacaatggcctagtggcccagcacagtgacacaatatcactcagtgttatagttccagtatctcgtcccatcctcaccttcagggctcccagggcccaggctgtggtgggggacctgctggagcttcactgtgaggccctgagaggctcctccccaatcctgtactggttttatcatgaagatgtcaccctgggtaagatctcagccccctctggaggaggggcctccttcaacctctctctgactacagaacattctggaatctactcctgtgaggcagacaatggtctggaggcccagcgcagtgagatggtgacactgaaagttgcaggtgagtgggccctgcccaccagcagcacatctgagaactgactgtgcctgttctccctgcagctgaaaatggagccacagagctcctcagggctgtttgcttgtgtggcatcccagcacacttcctgcctgcagaacctccctgtgaaagtctcggatcctttgtggtatggttccaggaatctgatgtttcccagcagtcttcttgaagatgatcaaagcacctcactaaaaatgcaaataagacttttttagaacataaactatattctgaactgaaattattacatgaaaatgaaaccaaagaattctgagcatatgtttctctgccgtagaaaggattaagctgtttcttgtccggattcttctctcattgacttctaacaagcctctactcttgagtctctttcattactggggatgtaaatgttccttacatttccacattaaaaatcctatgttaacataa

SEQ ID NO: 299010 - DNA, 375 bp, Artificial Sequence
  derived and/or modified sequence
atgctcctgtgggtgatcttgctggtgctggcccctgtttctggccagtttgccagaacaccccggcccataattttcctacagccaccctggaccacggtctttcaaggggaaagagtgaccttaacctgtaaaggatttcgattctattctccccagaagaccaagtggtaccaccggtatctcggtaaggagatactgcgggagacgcctgataacattttggaggtgcaggagtctggagagtaccgctgtcaggcacagggctctccattaagctcccccgttcaccttgacttcagctctgagatgggcttcccacatgccgctcaggcaaacgtggaactactgggaagtagtgacttgctcacctag

SEQ ID NO: 299011 - DNA, 1779 bp, Artificial Sequence
  derived and/or modified sequence
atgctcctgtgggttattcttctcgtgctggctcccgtgtctggccaattcgcccggacaccacgccccataatattccttcaaccgccttggactactgtgttccagggtgagcgggtgactttgacctgtaagggctttagattttatagtccccagaagactaaatggtaccatcgatacctcggcaaagagatactacgtgaaactcctgacaacatcctggaagtgcaagagtccggggagtataggtgccaggcacagggtagcccattgtccagcccagttcacttggatttcagcagcgctagtctgattcttcaggcccctctgagtgtttttgaaggtgattctgtggtcctgcgctgcagggctaaggcagaagtgacgctgaacaatacaatctacaagaacgacaatgttctagcctttcttaacaagcgtaccgattttcatataccgcatgcatgtctcaaagacaacggggcgtatcgttgcacggggtataaggaatcttgctgtccagtgtcatcaaataccgtcaaaatccaagtccaggagccctttaccagacccgtgctgcgagcctctagttttcagcctattagcgggaaccctgtcacattgacttgcgaaacccagctatccctcgagagatccgacgtgcctctgcggtttagattctttcgcgacgaccaaacactcggcctcgggtggtctctcagcccaaattttcagatcacggctatgtggtccaaagatagtggattttattggtgtaaagccgccacaatgccttattcagtgatctccgattcacctaggagctggatacaggttcaaatcccagcctcccacccagtcctcactctctctccagagaaagctctgaactttgagggtactaaggtgacccttcattgtgagacacaggaggattccctcaggactctgtataggttttaccatgaaggcgtgcctctgcgccacaaaagtgtgcggtgtgagcggggcgcatccattagcttttccctaacaactgagaactccgggaactactactgtacagccgataacggactaggggccaagccctctaaggctgtctcgctaagcgtcactgtgcctgtttctcatcccgtactaaacctgtcgagtccagaagatctgatctttgagggtgcaaaagtgaccctgcattgtgaagcccagcgtggctccctgcctattctctaccaatttcatcatgaaggggctgccttagaaaggcgctctgctaacagcgcgggaggcgtagcaatatccttttctctcactgcggaacattccggcaattactactgcactgccgacaacggatttggcccgcagcgatctaaggccgtgagtctgagcgtgacagtgcccgtgtctcatccagttcttaccctgtcaagtgccgaggcactcacatttgagggggcgaccgttactctgcactgcgaggtacagaggggtagtccccagattctttaccaattctaccatgaagatatgccactctggagctcatccacaccaagtgtgggccgcgtgtccttctctttttccttaacagaagggcacagtggcaactactattgtaccgccgacaacggatttggcccccagaggagcgaggtggtgtctctcttcgtaacaggaaaatgctgggtattggcatcacatccacccttggctgagttttccctgacacactcctttaaaaatctgttcgccctttcttcttttctgccatag

SEQ ID NO: 299012 - DNA, 2280 bp, Artificial Sequence
  derived and/or modified sequence
atgctgttgtgggtgatcctcctggtgttagcgcccgtgtcaggacagttcgccagaacgccacggcccatcattttccttcagcccccttggacaactgtattccagggcgagcgggtgacactgacatgtaaaggtttcagattttattcaccccagaaaactaagtggtatcaccgatatctcggtaaggagattctgcgcgaaaccccagacaatattctggaagtgcaggaaagcggggagtataggtgtcaggcacaaggcagcccactgagctctccagtccatcttgacttctccagcgcctccctgatcctgcaggctccattgagcgtgttcgagggcgatagcgtggtgctcagatgccgggcgaaggcggaggtcacactgaacaacacaatttacaaaaatgataacgtcctcgctttccttaataaacgtacagattttcacattcctcatgcatgccttaaagacaatggcgcttaccgctgtaccggttacaaggagtcatgttgccccgtgtcatctaataccgtgaagatccaggttcaagaaccgttcacacgaccagtactgcgtgctagctccttccagcctatttctgggaatccagtcacactcacctgtgagacacagttgtcccttgaaaggtcagatgtgcctttgagattcagattttttcgagatgatcagacattagggctgggatggtcactgtctcctaacttccagattaccgccatgtggtctaaagattcgggcttttattggtgcaaagccgcaacaatgccgtatagcgtaatcagcgattcacccaggtcttggatacaagtccaaataccagcaagccatccagtgctcactctctctcctgaaaaggctctgaacttcgaaggcactaaggtaacgttacactgcgaaacgcaggaggacagcttgcggacactgtatcggttttaccatgagggtgtgcccttgaggcacaagtccgttcgatgcgagagaggggccagtatctccttttctctgaccactgagaattcgggcaactattattgcacggcagacaacggactgggggccaagcctagcaaagccgtgagtttatccgtgacagtccctgtctcacaccctgtcctgaacctttcaagtcccgaggatctaatcttcgaaggcgccaaggtgaccctgcactgcgaggcccagcgtgggtcgctgccgattttgtatcaattccaccacgagggtgcagccctagagagaagaagcgccaactccgcaggcggagtcgctatatccttcagtctgactgcagagcatagcggtaactactactgtactgccgacaatgggttcggcccgcagaggtctaaggcagtgtcactgagtgtgaccgtcccggtctcacaccccgttctgaccctgagctcagccgaggcgcttacgtttgaaggagcaacagtaacactccattgcgaagtgcagaggggatcaccacagatactatatcagttctatcacgaggacatgcccctctggtcttcctcaaccccttctgtgggtcgggtttcgtttagtttctcattgacggagggccacagcggtaattactattgtactgcagacaacggcttcgggccgcagcggagcgaggtggtgagtctatttgtcaccgttccagtatcgagaccgatcttgaccttacgtgtgccaagggcccaagcagtggtgggcgacttgcttgagcttcattgcgaggcgccccgcggatcaccaccgatactatactggttttaccacgaggatgtcactcttgggagcagttccgcccccagtgggggcgaggcatcctttaacctcagcctgacagctgagcatagcggcaactattcttgtgaagctaacaacggcttagtggcacagcactctgatacgatcagcctgtcggtgatcgtgccggtatcgaggccaatcttaacattccgcgcgccccgcgctcaggcagtggtaggcgaccttctggaattgcattgcgaggctctgcggggctcttctcctatcctgtactggttctaccatgaggacgttaccttgggcaagatatccgcgccctccgggggcggcgccagttttaacctgtcgctcactactgaacactcgggcatatattcctgcgaggctgacaacggcctcgaagctcagaggtccgaaatggttaccctgaaggtggctggcgaatgggcactgccaacttctagcacatcagagaactag

SEQ ID NO: 299013 - DNA, 375 bp, Artificial Sequence
  derived and/or modified sequence
atgctgctgtgggtgatcctgctggtgctggcccctgtgtctggccagtttgcccggaccccccggcccatcatcttcctgcagcccccctggaccaccgtcttccagggcgagcgggtgaccctgacctgcaagggcttccgcttctacagcccccagaagaccaagtggtaccaccgctacctgggcaaggagatcctgcgggagaccccagacaacatcctggaggtgcaggagagcggggagtaccgctgccaggcccagggcagccccctgagcagccctgtgcacctggacttcagcagcgagatgggcttcccccatgctgcccaggccaacgtggagctgctgggcagcagtgacctgctgacctag

SEQ ID NO: 299014 - DNA, 1779 bp, Artificial Sequence
  derived and/or modified sequence
atgctgctgtgggtgatcctgctggtgctggcccctgtgtctggccagtttgcccggaccccccggcccatcatcttcctgcagcccccctggaccaccgtcttccagggcgagcgggtgaccctgacctgcaagggcttccgcttctacagcccccagaagaccaagtggtaccaccgctacctgggcaaggagatcctgcgggagaccccagacaacatcctggaggtgcaggagagcggggagtaccgctgccaggcccagggcagccccctgagcagccctgtgcacctggacttcagcagcgccagcctcatcctgcaggcccccctgtctgtgtttgaaggagacagcgtggtgctgcgctgccgggccaaggccgaggtgaccctgaacaacaccatctacaagaatgacaacgtgctggccttcctgaacaagaggacagacttccacatcccccacgcctgcctgaaggacaatggagcctaccgctgcaccggctacaaggagagctgctgccctgtgagcagcaacacagtgaagatccaggtgcaggagcccttcaccaggcctgtgctgcgggccagcagcttccagcccatcagcggcaaccctgtgaccctgacctgtgagacccagctgagcctggagaggagtgatgtgcccctgcgcttccgcttcttcagagatgaccagaccctgggcctgggctggagcctgagccccaacttccagatcacagccatgtggagcaaggacagcggcttctactggtgcaaggccgccaccatgccctacagcgtcatcagtgacagccccaggtcctggatccaggtgcagatcccagccagccaccctgtgctgaccctgagccctgagaaggccctgaactttgagggcaccaaggtgaccctgcactgtgagacccaggaggacagcctgcggaccctgtaccgcttctaccatgaaggagtgcccctgcggcacaagtctgtgcgctgtgagcggggggccagcatctccttcagcctgaccacagagaacagcggcaactactactgcacagctgacaatggcctgggcgccaagcccagcaaggctgtgtccctgtctgtgacagtgcctgtgagccaccctgtgctgaacctgagcagccctgaggacctgatctttgagggcgccaaggtgaccctgcactgtgaggcccagaggggcagcctgcccatcctgtaccagttccaccacgagggcgccgccctggagaggagaagtgccaacagcgctggaggagtggccatctccttcagcctgacagctgagcacagcggcaactactactgcacagctgacaatggcttcggcccccagaggagcaaggctgtgtccctgtctgtgacagtgcctgtgagccaccctgtgctgaccctgagcagcgctgaggccctgacctttgaaggagccaccgtgaccctgcactgtgaggtgcagaggggcagcccccagatcctgtaccagttctaccacgaggacatgcccctgtggagcagcagcaccccatctgtgggccgggtgtccttctccttcagcctgacagagggccacagcggcaactactactgcacagctgacaatggatttggcccccagaggtctgaggtggtgtccctgtttgtgacaggcaagtgctgggtgctggccagccacccccccctggccgagttcagcctgacccacagcttcaagaacctgtttgccctgagcagcttcctgccctag

SEQ ID NO: 299015 - DNA, 2280 bp, Artificial Sequence
  derived and/or modified sequence
atgctgctgtgggtgatcctgctggtgctggcccctgtgtctggccagtttgcccggaccccccggcccatcatcttcctgcagcccccctggaccaccgtcttccagggcgagcgggtgaccctgacctgcaagggcttccgcttctacagcccccagaagaccaagtggtaccaccgctacctgggcaaggagatcctgcgggagaccccagacaacatcctggaggtgcaggagagcggggagtaccgctgccaggcccagggcagccccctgagcagccctgtgcacctggacttcagcagcgccagcctcatcctgcaggcccccctgtctgtgtttgaaggagacagcgtggtgctgcgctgccgggccaaggccgaggtgaccctgaacaacaccatctacaagaatgacaacgtgctggccttcctgaacaagaggacagacttccacatcccccacgcctgcctgaaggacaatggagcctaccgctgcaccggctacaaggagagctgctgccctgtgagcagcaacacagtgaagatccaggtgcaggagcccttcaccaggcctgtgctgcgggccagcagcttccagcccatcagcggcaaccctgtgaccctgacctgtgagacccagctgagcctggagaggagtgatgtgcccctgcgcttccgcttcttcagagatgaccagaccctgggcctgggctggagcctgagccccaacttccagatcacagccatgtggagcaaggacagcggcttctactggtgcaaggccgccaccatgccctacagcgtcatcagtgacagccccaggtcctggatccaggtgcagatcccagccagccaccctgtgctgaccctgagccctgagaaggccctgaactttgagggcaccaaggtgaccctgcactgtgagacccaggaggacagcctgcggaccctgtaccgcttctaccatgaaggagtgcccctgcggcacaagtctgtgcgctgtgagcggggggccagcatctccttcagcctgaccacagagaacagcggcaactactactgcacagctgacaatggcctgggcgccaagcccagcaaggctgtgtccctgtctgtgacagtgcctgtgagccaccctgtgctgaacctgagcagccctgaggacctgatctttgagggcgccaaggtgaccctgcactgtgaggcccagaggggcagcctgcccatcctgtaccagttccaccacgagggcgccgccctggagaggagaagtgccaacagcgctggaggagtggccatctccttcagcctgacagctgagcacagcggcaactactactgcacagctgacaatggcttcggcccccagaggagcaaggctgtgtccctgtctgtgacagtgcctgtgagccaccctgtgctgaccctgagcagcgctgaggccctgacctttgaaggagccaccgtgaccctgcactgtgaggtgcagaggggcagcccccagatcctgtaccagttctaccacgaggacatgcccctgtggagcagcagcaccccatctgtgggccgggtgtccttctccttcagcctgacagagggccacagcggcaactactactgcacagctgacaatggatttggcccccagaggtctgaggtggtgtccctgtttgtgacagtgcctgtgtcccggcccatcctgaccctgcgggtgccccgggcccaggccgtggtgggggacctgctggagctgcactgtgaggccccccggggcagcccccccatcctgtactggttctaccatgaagatgtgaccctgggcagcagcagcgcccccagcggcggggaggccagcttcaacctgagcctgacagctgagcacagcggcaactacagctgtgaggccaacaacggcctggtggcccagcacagcgacaccatcagcctgtctgtgattgtgcctgtgtcccggcccatcctgaccttccgggccccccgggcccaggccgtggtgggggacctgctggagctgcactgtgaggccctgcggggcagcagccccatcctgtactggttctaccatgaagatgtgaccctgggcaagatcagcgcccccagcggcggcggggccagcttcaacctgagcctgaccacagagcacagcggcatctacagctgtgaggccgacaatggcctggaggcccagaggtctgagatggtgaccctgaaggtggccggggagtgggccctgcccaccagcagcaccagcgagaactag

SEQ ID NO: 299016 - DNA, 375 bp, Artificial Sequence
  derived and/or modified sequence
atgctgctgtgggtgatcctgctggtgctggcccccgtgagcggccaatttgccagaacacctagaccgatcattttcctgcaacccccgtggacaacagtgttccagggggaaagagtcaccttgacttgcaaagggttcagattttacagtccacaaaagactaaatggtaccatcgctacttggggaaggagattcttcgcgagacaccggataacatactcgaagttcaggaatcgggcgaatatagatgtcaggcccaagggagccccctgtcctcccccgttcatttggatttctcctccgaaatgggctttccccacgcggcccaggccaatgtcgaactcctgggttctagcgatctgctgacatag

SEQ ID NO: 299017 - DNA, 1779 bp, Artificial Sequence
  derived and/or modified sequence
atgctgctgtgggtgatcctgctggtgctggcccccgtgagcggccagtttgcacggactccacgccctatcatcttcctgcagccaccctggaccaccgtgttccagggtgagagagtcacgcttacgtgtaaggggtttcgcttctattcaccccagaaaacaaagtggtaccatagatatctgggtaaggaaatcctgagggagacacctgataatatcctagaagtccaggagtcgggggagtacaggtgtcaggcccagggaagcccacttagtagcccggtgcacttggatttttcttctgcctccctgatccttcaagctccactgagcgtattcgagggtgactccgttgtgttgagatgtcgcgcgaaggcggaagttactttaaacaataccatctacaagaatgacaacgtcttggccttcctgaataagcggactgattttcacataccacatgcctgcctcaaagataacggggcctacaggtgcacgggatacaaggagtcatgttgtccggtcagttcaaatacagttaaaatccaggtacaggagccattcacacggcccgtgttgagagcatctagctttcaacccattagcggcaatccagtgacactcacttgcgagacgcaactcagccttgaaagaagtgatgtccccctccgctttcggttttttcgcgatgaccaaacgctgggcttagggtggagcttgtctccaaatttccagatcacagcaatgtggagcaaagactctggattttattggtgcaaggcggctacaatgccatattcagtaatttctgattcacctcgcagttggatccaagtacaaattccggcctcccacccagtactgactctgagcccagaaaaggctctgaactttgaaggcaccaaagttacactccattgtgagacacaagaagacagcctccgcaccctgtatcgtttttatcatgaaggcgtgcccctcagacataaaagtgtccggtgtgaacggggcgctagcatatcgttctccctaaccaccgagaacagcggaaactattactgcactgctgacaatggcctcggcgctaaaccttctaaggcggtgtccctctccgtgacggtgcccgtgtcccaccccgtgctcaacctgtcttcgcctgaagatttgatctttgagggggcaaaggtgacccttcactgcgaagcccaaagaggttctttgccaatcctttaccagttccaccatgagggcgccgctcttgagcggaggtctgctaactccgctggcggggtggcgataagcttttcactgaccgcagagcattccggcaattattattgcacagcagacaacggattcggcccccaacgatctaaggctgttagcctgtccgttacagtccccgtctcacaccccgtcctgaccctctctagcgccgaggcacttacatttgagggagctactgttaccttgcactgtgaggtccagagggggtctccccaaatactttatcagttttaccacgaggacatgcccctgtggagcagctctactccttcagtgggacgagtcagtttctcgttttctttgacagaaggacattctggaaattattattgtactgctgataatggatttgggcctcagcggagcgaggtcgtgagcctctttgtcacaggaaagtgctgggtcctcgcaagccacccaccacttgcggaattcagcctcacccactctttcaagaacctttttgccctgtcctcattcctgccctag

SEQ ID NO: 299018 - DNA, 2280 bp, Artificial Sequence
  derived and/or modified sequence
atgctgctgtgggtgatcctgctggtgctggcccccgtgagcggccaatttgcaagaactccacgccccattatcttcctgcagccaccttggaccaccgtgtttcaaggtgagagagtgactttaacgtgcaaaggattcaggttttacagcccccaaaaaaccaagtggtaccatcgttatctgggcaaagaaattttgcgagagacccccgataatatcctggaagtgcaggaatcaggcgagtatagatgtcaggcgcagggcagtccattgtcctccccagtgcatctagatttctcttcagcaagtctgatcctccaggccccactgtcagttttcgagggtgacagcgtggtattgaggtgcagagccaaggcagaggtcacacttaataatacaatctacaaaaacgataacgtgctcgcattcctgaataagcggacagactttcacattccccacgcctgcctgaaggacaacggcgcctaccgctgcacaggttataaggagtcttgttgcccagtgtcctcaaataccgtcaaaatccaggtgcaggaaccttttacccgtcccgtattacgcgccagttcatttcagcctatatctgggaatcccgtgaccctgacatgcgagacccagttgtcacttgaaaggtcagacgttcctctcaggttcaggtttttcagggatgatcagacgctgggtttgggatggtcactgagtcccaacttccagatcacagcaatgtggtccaaagactcaggattttactggtgtaaggctgctaccatgccatatagcgtgatttccgattcgccccgttcctggatccaggttcagatcccggcctctcatcctgttctcactctgagcccagagaaggctctgaatttcgaaggcaccaaagtgacattacattgtgagacccaggaggattcattacgcaccctgtatcggttttaccatgagggagtgcccttgcgccacaagtcagtccggtgcgaaaggggcgcatcgatttctttcagcctcacgaccgagaatagcggcaattattactgcactgctgacaatgggctcggggccaagccctccaaggctgtgagtttaagtgttacggttccagtgtcgcacccagtccttaacctcagtagtccagaggatttgatttttgaaggcgccaaggtgacccttcactgcgaagcccaaagaggctctctccccatcctgtatcagtttcaccacgaaggggccgccctggagcgccgtagtgccaattcagctgggggagtggcaattagtttcagcctcacagccgagcactcgggtaattattactgcactgccgataacggattcggcccccagaggtctaaggccgtgagcctgtccgtgactgtgcccgtgtctcacccagtcctgactctcagctccgccgaagcgcttacgtttgagggcgccacagtcaccttacattgtgaggttcagaggggcagcccccagattctgtatcagttttaccacgaggatatgcccttgtggagcagttctaccccctccgtgggtagagtatccttttctttctccctgaccgaagggcacagcggtaattattattgtactgccgacaacggcttcgggccacaacgcagtgaagtagtcagcttgtttgtcacagtacccgtgtcacggcccatcctgactttgcgcgtacctcgcgcgcaggccgtagtgggtgacctgttagagctgcactgtgaggcgccacgcgggtctcctcccatattatattggttctatcatgaggatgtgaccctcggcagctcctctgctcccagcgggggggaggcttcatttaacctctcactgactgctgaacactctggaaactactcttgtgaggcaaacaacggtttggtggcacagcactctgacacaattagcctgagcgtcatcgtgcctgtgtctcggcccatactgaccttcagagcccccagagcccaagccgtagttggcgatctgcttgaactgcattgtgaagccttgagaggatcgtccccaattctctactggttctatcacgaggatgtgaccctgggtaaaatcagcgcccccagcgggggcggggcatctttcaacctctctctaactaccgaacatagcgggatctactcatgtgaagccgataacggtctggaggcccagagaagcgagatggtgacgctgaaagtggccggagagtgggctctacctacttcatctacctctgagaactag

SEQ ID NO: 299019 - DNA, 375 bp, Artificial Sequence
  derived and/or modified sequence
atgcttctgtgggtgatcctcctggtactcgcacccgtgagcggtcagttcgcacggacacctagacccataattttccttcagcccccttggactacagtgtttcaaggggaaagagttacattaacctgcaaaggtttccgattctatagccctcaaaaaactaagtggtaccacagatacctcggcaaagaaatcctcagggaaactccagataacatccttgaggtgcaggaaagcggcgagtacagatgtcaagcccaggggtcgccgcttagctctcccgtgcacttggatttctccagtgagatggggttccctcacgccgctcaagccaacgtggagctgttgggctcatcagatctcctcacttag

SEQ ID NO: 299020 - DNA, 1779 bp, Artificial Sequence
  derived and/or modified sequence
atgctgttgtgggtcatcttactcgtgcttgccccagtctccggccagttcgcaagaacccccaggcccatcatttttctccagcccccatggacaacagtgtttcagggtgagcgagtgaccctcacatgcaagggttttcggttttacagccctcagaagacaaaatggtaccacagatatctgggaaaggaaattcttcgcgagactccagataacatcctggaagtgcaggaaagcggagaatatagatgccaggcccagggcagcccactgtcatcccctgtgcatctggatttctccagcgcaagccttattctgcaagcgcctcttagtgttttcgaaggcgatagtgtcgtgctccgatgccgcgcaaaagcagaggttactctgaacaataccatctataagaacgacaacgtcctggcatttctgaataagcggacagattttcacattccccacgcttgtctaaaagataatggagcctaccgttgcacgggctataaagagtcttgctgccctgtatccagcaataccgtgaagatccaagtccaggagccgttcacaaggcccgtgctaagggctagttcctttcagcccatctctggaaaccctgtgacattgacatgtgagactcaactctccctagaaagatccgacgtgccgctgcgtttccgcttctttcgagacgaccaaactcttggtctgggatggagcctcagtcctaatttccagattaccgcaatgtggtcaaaggacagcggtttctattggtgcaaggcggcaaccatgccttactctgtaatttcagactctcccaggtcttggatccaggttcagattcctgctagccatcctgtgcttaccttgtcccctgaaaaggctctgaattttgagggaacgaaggttactctgcactgtgagacgcaggaggacagtcttcggactctgtatcgcttctatcacgaaggtgtcccgctcaggcacaagagcgtcagatgcgaacgaggcgcatctataagcttctctctgacaaccgagaacagcgggaattactactgtacggcagataacggcttgggagccaaaccttcgaaggccgtcagcctttccgtcaccgtccccgtcagccacccagttcttaacttgagtagtccagaggatctgatttttgagggggcaaaggtgaccctgcattgcgaggcacagcgaggctcactccctattctgtaccaattccaccacgaaggggctgctctggagcgcagatccgccaactccgctggtggggtggctatctcgttcagcctcactgctgagcattccggaaattattactgtacagctgacaacggcttcgggccacaacggtcgaaagcggtctctctctctgtaaccgtgcctgtgtctcatccagtgctaactctgtcaagcgctgaggctcttacctttgaaggagccactgtcacattacactgcgaggtccaaagggggagcccccagatcctttaccagttctatcatgaggacatgccgttatggagcagcagcacaccctccgtggggcgagtttcattttctttctctctaactgaaggacacagtggcaattactactgcaccgcagataatggattcggtcctcagcggagcgaggttgttagcttgtttgtaacaggcaagtgttgggtcctagcttcacaccccccactcgccgaattcagcctgactcactctttcaaaaatttattcgctctctcatctttcctcccgtag

SEQ ID NO: 299021 - DNA, 2280 bp, Artificial Sequence
  derived and/or modified sequence
atgttgttgtgggtcatcctactcgtgctggccccagtttctgggcagtttgctaggaccccaaggcccattatatttctccagccgccttggaccaccgtgttccagggtgagagagtaaccctcacatgtaaaggtttcaggttttacagtccacagaagacaaagtggtatcaccgctacctagggaaggagattctgcgagaaacccccgacaacatccttgaggtgcaggagtccggagaatacagatgccaagcccagggatcacccctgtctagccctgtacacctagacttttcttccgcttcactgattttgcaggcgccactcagtgtgttcgagggggacagtgtggttctgaggtgcagggccaaagcggaggtgacccttaacaatactatatacaagaatgataacgtccttgctttcttaaacaaacggaccgatttccacattcctcacgcatgcctgaaggataacggggcatatcgctgcaccgggtataaggaatcgtgctgtccagtttcttccaataccgttaaaatccaagtacaggaacccttcactagacctgtgctccgcgctagctcattccagcctatcagcggcaacccagtcacgctcacttgcgaaactcagttgagcctggagagaagtgacgtgcctctgcgctttcgcttctttagagatgaccaaactttaggactcggatggagcctcagccccaactttcagatcacagcaatgtggagcaaagacagtggattttactggtgcaaggctgcaacgatgccctatagtgtgatctccgatagccccaggtcttggattcaagtgcaaattcctgcttctcaccccgtcctgactctttcaccagaaaaggctctgaatttcgaaggcaccaaggttactttacattgcgagactcaggaggactccctgcgcaccctctaccggttttatcacgagggcgtgcccttgcggcacaagagcgtgagatgcgaaaggggggcatctatatctttctcgctcactaccgagaacagtgggaattactactgtaccgctgacaatggactgggagccaaaccctctaaggccgtctccctttccgtgaccgtgccagtgtctcaccccgtccttaatctaagcagtccagaagatttgatattcgagggagctaaggtcacactccactgtgaggctcagcggggttccttaccgattctgtatcaattccaccatgagggagcagccctggaacgcaggagcgccaactccgcgggaggagtagcaatttctttcagtttgacagctgagcacagtggcaattactattgcaccgctgacaacggtttcggccctcagcggtcaaaggccgtctcactttccgtaaccgtgcccgtttctcaccccgtactgactctgagttccgcagaagcactgacatttgagggtgcgactgttaccctgcattgcgaagtacagcgtggttcaccccaaattctgtaccaattttaccacgaggacatgccattatggagttcctccaccccaagtgtgggccgagtctcttttagcttctcgctgaccgaaggacattctggtaattactattgcacagcagacaacggttttgggccacagcgttcagaggtcgtcagcctatttgttacggtgcctgtctctaggccaatcttgaccctgcgcgtgcctcgagctcaggctgtggtgggggatttgctggagctgcactgtgaagctccacgcggaagtcctcccattttgtattggttctatcacgaggacgtgacactcggctcatcttctgctcctagtggcggtgaggcctcctttaatttgagcctgaccgccgagcacagtgggaattatagttgcgaagcaaacaatgggctggtagcccagcactccgatacaataagcttgagcgtgatagttcctgtgtccaggccaattcttacatttcgcgcaccacgggcacaggctgtcgtgggggacttgctagaactgcattgtgaggccctgaggggaagttcccccatactctactggttctatcacgaagacgtgaccctggggaaaatcagcgccccatctggaggcggtgcatcttttaacctatctctgaccacagagcacagtggaatttactcatgcgaagcagacaatggcctggaggcccagaggtccgaaatggtcactctaaaggtggcaggcgaatgggcccttccgacaagttcaacctcagagaactag

SEQ ID NO: 299022 - DNA, 240 bp, Artificial Sequence
  derived and/or modified sequence
atgcggcagcggggccaggagcacctgcccaccagcgtgaagagcgaaccacgggcttgtaataatcctacagtggctgaaaatcgccgcgtgcctagcggtctggccgcggtaattcggaaccttaccgccctgtggaacccctctctgggggtgtctgagcgccgcgggggagactgggagcccagtcgaattccaaggctgtgggctagggtcggttggattcagcttcctgggtag

SEQ ID NO: 299023 - protein, 5518 aa, Artificial Sequence
  derived and/or modified sequence
MISWEVVHTVFLFALLYSSLAQDASPQSEIRAEEIPEGASTLAFVFDVTGSMYDDLVQVIEGASKILETSLKRPKRPLFNFALVPFHDPEIGPVTITTDPKKFQYELRELYVQGGGDCPEMSIGAIKIALEISLPGSFIYVFTDARSKDYRLTHEVLQLIQQKQSQVVFVLTGDCDDRTHIGYKVYEEIASTSSGQVFHLDKKQVNEVLKWVEEAVQASKVHLLSTDHLEQAVNTWRIPFDPSLKEVTVSLSGPSPMIEIRNPLGKLIKKGFGLHELLNIHNSAKVVNVKEPEAGMWTVKTSSSGRHSVRITGLSTIDFRAGFSRKPTLDFKKTVSRPVQGIPTYVLLNTSGISTPARIDLLELLSISGSSLKTIPVKYYPHRKPYGIWNISDFVPPNEAFFLKVTGYDKDDYLFQRVSSVSFSSIVPDAPKVTMPEKTPGYYLQPGQIPCSVDSLLPFTLSFVRNGVTLGVDQYLKESASVNLDIAKVTLSDEGFYECIAVSSAGTGRAQTFFDVSEPPPVIQVPNNVTVTPGERAVLTCLIISAVDYNLTWQRNDRDVRLAEPARIRTLANLSLELKSVKFNDAGEYHCMVSSEGGSSAASVFLTVQEPPKVTVMPKNQSFTGGSEVSIMCSATGYPKPKIAWTVNDMFIVGSHRYRMTSDGTLFIKNAAPKDAGIYGCLASNSAGTDKQNSTLRYIEAPKLMVVQSELLVALGDITVMECKTSGIPPPQVKWFKGDLELRPSTFLIIDPLLGLLKIQETQDLDAGDYTCVAINEAGRATGKITLDVGSPPVFIQEPADVSMEIGSNVTLPCYVQGYPEPTIKWRRLDNMPIFSRPFSVSSISQLRTGALFILNLWASDKGTYICEAENQFGKIQSETTVTVTGLVAPLIGISPSVANVIEGQQLTLPCTLLAGNPIPERRWIKNSAMLLQNPYITVRSDGSLHIERVQLQDGGEYTCVASNVAGTNNKTTSVVVHVLPTIQHGQQILSTIEGIPVTLPCKASGNPKPSVIWSKKGELISTSSAKFSAGADGSLYVVSPGGEESGEYVCTATNTAGYAKRKVQLTVYVRPRVFGDQRGLSQDKPVEISVLAGEEVTLPCEVKSLPPPIITWAKETQLISPFSPRHTFLPSGSMKITETRTSDSGMYLCVATNIAGNVTQAVKLNVHVPPKIQRGPKHLKVQVGQRVDIPCNAQGTPLPVITWSKGGSTMLVDGEHHVSNPDGTLSIDQATPSDAGIYTCVATNIAGTDETEITLHVQEPPTVEDLEPPYNTTFQERVANQRIEFPCPAKGTPKPTIKWLHNGRELTGREPGISILEDGTLLVIASVTPYDNGEYICVAVNEAGTTERKYNLKVHVPPVIKDKEQVTNVSVLLNQLTNLFCEVEGTPSPIIMWYKDNVQVTESSTIQTVNNGKILKLFRATPEDAGRYSCKAINIAGTSQKYFNIDVLVPPTIIGTNFPNEVSVVLNRDVALECQVKGTPFPDIHWFKDGKPLFLGDPNVELLDRGQVLHLKNARRNDKGRYQCTVSNAAGKQAKDIKLTIYIPPSIKGGNVTTDISVLINSLIKLECETRGLPMPAITWYKDGQPIMSSSQALYIDKGQYLHIPRAQVSDSATYTCHVANVAGTAEKSFHVDVYVPPMIEGNLATPLNKQVVIAHSLTLECKAAGNPSPILTWLKDGVPVKANDNIRIEAGGKKLEIMSAQEIDRGQYICVATSVAGEKEIKYEVDVLVPPAIEGGDETSYFIVMVNNLLELDCHVTGSPPPTIMWLKDGQLIDERDGFKILLNGRKLVIAQAQVSNTGLYRCMAANTAGDHKKEFEVTVHVPPTIKSSGLSERVVVKYKPVALQCIANGIPNPSITWLKDDQPVNTAQGNLKIQSSGRVLQIAKTLLEDAGRYTCVATNAAGETQQHIQLHVHEPPSLEDAGKMLNETVLVSNPVQLECKAAGNPVPVITWYKDNRLLSGSTSMTFLNRGQIIDIESAQISDAGIYKCVAINSAGATELFYSLQVHVAPSISGSNNMVAVVVNNPVRLECEARGIPAPSLTWLKDGSPVSSFSNGLQVLSGGRILALTSAQISDTGRYTCVAVNAAGEKQRDIDLRVYVPPNIMGEEQNVSVLISQAVELLCQSDAIPPPTLTWLKDGHPLLKKPGLSISENRSVLKIEDAQVQDTGRYTCEATNVAGKTEKNYNVNIWVPPNIGGSDELTQLTVIEGNLISLLCESSGIPPPNLIWKKKGSPVLTDSMGRVRILSGGRQLQISIAEKSDAALYSCVASNVAGTAKKEYNLQVYIRPTITNSGSHPTEIIVTRGKSISLECEVQGIPPPTVTWMKDGHPLIKAKGVEILDEGHILQLKNIHVSDTGRYVCVAVNVAGMTDKKYDLSVHAPPSIIGNHRSPENISVVEKNSVSLTCEASGIPLPSITWFKDGWPVSLSNSVRILSGGRMLRLMQTTMEDAGQYTCVVRNAAGEERKIFGLSVLVPPHIVGENTLEDVKVKEKQSVTLTCEVTGNPVPEITWHKDGQPLQEDEAHHIISGGRFLQITNVQVPHTGRYTCLASSPAGHKSRSFSLNVFVSPTIAGVGSDGNPEDVTVILNSPTSLVCEAYSYPPATITWFKDGTPLESNRNIRILPGGRTLQILNAQEDNAGRYSCVATNEAGEMIKHYEVKVYIPPIINKGDLWGPGLSPKEVKIKVNNTLTLECEAYAIPSASLSWYKDGQPLKSDDHVNIAANGHTLQIKEAQISDTGRYTCVASNIAGEDELDFDVNIQVPPSFQKLWEIGNMLDTGRNGEAKDVIINNPISLYCETNAAPPPTLTWYKDGHPLTSSDKVLILPGGRVLQIPRAKVEDAGRYTCVAVNEAGEDSLQYDVRVLVPPIIKGANSDLPEEVTVLVNKSALIECLSSGSPAPRNSWQKDGQPLLEDDHHKFLSNGRILQILNTQITDIGRYVCVAENTAGSAKKYFNLNVHVPPSVIGPKSENLTVVVNNFISLTCEVSGFPPPDLSWLKNEQPIKLNTNTLIVPGGRTLQIIRAKVSDGGEYTCIAINQAGESKKKFSLTVYVPPSIKDHDSESLSVVNVREGTSVSLECESNAVPPPVITWYKNGRMITESTHVEILADGQMLHIKKAEVSDTGQYVCRAINVAGRDDKNFHLNVYVPPSIEGPEREVIVETISNPVTLTCDATGIPPPTIAWLKNHKRIENSDSLEVRILSGGSKLQIARSQHSDSGNYTCIASNMEGKAQKYYFLSIQVPPSVAGAEIPSDVSVLLGENVELVCNANGIPTPLIQWLKDGKPIASGETERIRVSANGSTLNIYGALTSDTGKYTCVATNPAGEEDRIFNLNVYVTPTIRGNKDEAEKLMTLVDTSINIECRATGTPPPQINWLKNGLPLPLSSHIRLLAAGQVIRIVRAQVSDVAVYTCVASNRAGVDNKHYNLQVFAPPNMDNSMGTEEITVLKGSSTSMACITDGTPAPSMAWLRDGQPLGLDAHLTVSTHGMVLQLLKAETEDSGKYTCIASNEAGEVSKHFILKVLEPPHINGSEEHEEISVIVNNPLELTCIASGIPAPKMTWMKDGRPLPQTDQVQTLGGGEVLRISTAQVEDTGRYTCLASSPAGDDDKEYLVRVHVPPNIAGTDEPRDITVLRNRQVTLECKSDAVPPPVITWLRNGERLQATPRVRILSGGRYLQINNADLGDTANYTCVASNIAGKTTREFILTVNVPPNIKGGPQSLVILLNKSTVLECIAEGVPTPRITWRKDGAVLAGNHARYSILENGFLHIQSAHVTDTGRYLCMATNAAGTDRRRIDLQVHVPPSIAPGPTNMTVIVNVQTTLACEATGIPKPSINWRKNGHLLNVDQNQNSYRLLSSGSLVIISPSVDDTATYECTVTNGAGDDKRTVDLTVQVPPSIADEPTDFLVTKHAPAVITCTASGVPFPSIHWTKNGIRLLPRGDGYRILSSGAIEILATQLNHAGRYTCVARNAAGSAHRHVTLHVHEPPVIQPQPSELHVILNNPILLPCEATGTPSPFITWQKEGINVNTSGRNHAVLPSGGLQISRAVREDAGTYMCVAQNPAGTALGKIKLNVQVPPVISPHLKEYVIAVDKPITLSCEADGLPPPDITWHKDGRAIVESIRQRVLSSGSLQIAFVQPGDAGHYTCMAANVAGSSSTSTKLTVHVPPRIRSTEGHYTVNENSQAILPCVADGIPTPAINWKKDNVLLANLLGKYTAEPYGELILENVVLEDSGFYTCVANNAAGEDTHTVSLTVHVLPTFTELPGDVSLNKGEQLRLSCKATGIPLPKLTWTFNNNIIPAHFDSVNGHSELVIERVSKEDSGTYVCTAENSVGFVKAIGFVYVKEPPVFKGDYPSNWIEPLGGNAILNCEVKGDPTPTIQWNRKGVDIEISHRIRQLGNGSLAIYGTVNEDAGDYTCVATNEAGVVERSMSLTLQSPPIITLEPVETVINAGGKIILNCQATGEPQPTITWSRQGHSISWDDRVNVLSNNSLYIADAQKEDTSEFECVARNLMGSVLVRVPVIVQVHGGFSQWSAWRACSVTCGKGIQKRSRLCNQPLPANGGKPCQGSDLEMRNCQNKPCPVDGSWSEWSLWEECTRSCGRGNQTRTRTCNNPSVQHGGRPCEGNAVEIIMCNIRPCPVHGAWSAWQPWGTCSESCGKGTQTRARLCNNPPPAFGGSYCDGAETQMQVCNERNCPIHGKWATWASWSACSVSCGGGARQRTRGCSDPVPQYGGRKCEGSDVQSDFCNSDPCPTHGNWSPWSGWGTCSRTCNGGQMRRYRTCDNPPPSNGGRACGGPDSQIQRCNTDMCPVDGSWGSWHSWSQCSASCGGGEKTRKRLCDHPVPVKGGRPCPGDTTQVTRCNVQACPGGPQRARGSVIGNINDVEFGIAFLNATITDSPNSDTRIIRAKITNVPRSLGSAMRKIVSILNPIYWTTAKEIGEAVNGFTLTNAVFKRETQVEFATGEILQMSHIARGLDSDGSLLLDIVVSGYVLQLQSPAEVTVKDYTEDYIQTGPGQLYAYSTRLFTIDGISIPYTWNHTVFYDQAQGRMPFLVETLHASSVESDYNQIEETLGFKIHASISKGDRSNQCPSGFTLDSVGPFCADEDECAAGNPCSHSCHNAMGTYYCSCPKGLTIAADGRTCQDIDECALGRHTCHAGQDCDNTIGSYRCVVRCGSGFRRTSDGLSCQDINECQESSPCHQRCFNAIGSFHCGCEPGYQLKGRKCMDVNECRQNVCRPDQHCKNTRGGYKCIDLCPNGMTKAENGTCIDIDECKDGTHQCRYNQICENTRGSYRCVCPRGYRSQGVGRPCMDIDECENTDACQHECKNTFGSYQCICPPGYQLTHNGKTCQDIDECLEQNVHCGPNRMCFNMRGSYQCIDTPCPPNYQRDPVSGFCLKNCPPNDLECALSPYALEYKLVSLPFGIATNQDLIRLVAYTQDGVMHPRTTFLMVDEEQTVPFALRDENLKGVVYTTRPLREAETYRMRVRASSYSANGTIEYQTTFIVYIAVSAYPY

SEQ ID NO: 299024 - protein, 240 aa, Artificial Sequence
  derived and/or modified sequence
AIGSFHCGCEPGYQLKGRKCMDVNECRQNVCRPDQHCKNTRGGYKCIDLCPNGMTKAENGTCIDIDECKDGTHQCRYNQICENTRGSYRCVCPRGYRSQGVGRPCMDIDECENTDACQHECKNTFGSYQCICPPGYQLTHNGKTCQDIDECLEQNVHCGPNRMCFNMRGSYQCIDTPCPPNYQRDPVSGFCLKNCPPNDLECALSPYALEYKLVSLPFGIATNQDLIRLVAYTQDGVMHP

SEQ ID NO: 299025 - DNA, 16557 bp, Artificial Sequence
  derived and/or modified sequence
atgatctcctgggaggtcgtgcacacagttttcttgttcgcattactgtattcaagtctcgcacaggatgcgtcaccacaaagtgaaatacgggccgaggaaataccagagggcgcttccaccctggccttcgtcttcgatgtgacaggttccatgtatgatgatctcgtgcaggtaatcgagggcgcatctaagattctggaaacgagcttgaagaggccaaagaggcccttgtttaacttcgctctggtgccattccatgatcccgaaattggccctgtgacaattaccacggatcctaagaaatttcaatacgaactgagggagctgtatgtgcaagggggaggggactgccccgaaatgtccattggggccatcaagatagcactcgagatttccctgcctggttccttcatttacgtgtttaccgacgcccgaagtaaggactataggctaactcacgaggtgctgcaactcatccagcagaagcagtcacaggtcgtgtttgttcttactggagactgtgatgatcggacacacatcggttacaaagtgtatgaagaaatcgccagcaccagctccgggcaggttttccacctggataagaaacaggtgaacgaggtcttaaaatgggtggaggaagcagtgcaagcttctaaagtgcatctcctctccacagatcatctggagcaggccgttaacacatggagaatccctttcgatccttccctgaaggaggtcacagtctccctgtccggcccgagtcctatgattgaaatccgtaatcccctaggaaaattaatcaaaaaggggtttgggcttcatgaattgctgaatattcacaattcagctaaggtggtcaacgttaaagagccagaagcaggtatgtggacagtgaagacctcgagctcaggccgtcatagcgttcgcatcacaggtctgagcactatcgatttcagggcagggttcagccggaaacccaccttagactttaagaaaacagtcagccgtcctgtgcaaggaatcccaacatacgtcctgctgaacacatctggcatttccactcctgctcgcatcgacttgttggaacttctgagcatctcggggtccagtctaaagaccattcccgtcaagtactaccctcatcgcaagccctacggcatctggaatatcagcgatttcgtgccaccaaatgaggccttcttcctgaaggtcaccgggtacgacaaggatgattaccttttccagagagtgtcctcagttagcttttccagcatagtgcccgacgcccccaaggtcacaatgcctgaaaaaacacctgggtattatttgcagccaggccagatcccttgttcggtggactccctgctgccttttactttatcctttgtgaggaacggggtgaccctgggggtggatcagtatctaaaagaaagcgcctcggtgaaccttgacatagctaaggtgacactcagtgacgagggcttctacgaatgcattgccgtgtcatccgcaggaaccggccgagcccaaacgtttttcgacgtttctgaaccgcctcccgtgatccaggtgcccaataatgtgaccgtgacacctggagagcgagcagtcctgacttgcttgatcatatcggccgtcgactacaatctcacctggcagaggaacgaccgcgatgtcaggctggcggaaccagcccgcatacggacactcgcaaatctgagcctggagctgaagagtgtgaagttcaacgacgccggcgagtaccactgcatggtgagttccgaaggagggtcctcagccgctagtgtgttccttacagttcaggaaccacccaaagtcactgtgatgcctaagaaccagtccttcactggtggctctgaggtgagtataatgtgctctgctacagggtatcctaagcccaagatcgcgtggacagtgaatgacatgttcatcgtgggatctcaccgatatcgtatgacatctgacggcactctatttatcaagaatgctgcgccaaaggacgccggaatctatggctgtctcgcctccaactccgccggcacagacaaacagaacagcaccctgcggtatattgaagcccccaagctgatggtggtgcagagcgagctgctcgtagccttgggagacatcacggttatggagtgcaaaactagcgggatcccacctcctcaagttaagtggttcaaaggcgatctggagctgcgcccctctacattcctgatcatcgatcccctactgggactgcttaaaattcaggagacacaggacctcgatgcaggagactacacttgcgtggctattaatgaagcgggcagagcgacaggaaagattactttggacgtcggcagtccgcccgtgtttatccaagaacctgccgacgtgtctatggagatcggaagtaacgtgactctgccctgctacgtgcagggttatcctgagccaactatcaaatggcggcgactagataacatgccgattttttcacggcctttttccgtgtcaagtatatcccagttaaggactggcgctctttttattctcaatctctgggccagtgacaaagggacttatatctgtgaggccgagaaccaatttggcaagattcagagcgaaacaacagtgaccgtcaccgggttagtggcacccttgatcggtatatcaccatccgtggcgaatgttattgaaggtcagcagctgacacttccctgtaccctgctcgccggtaatccaattccagagcgcaggtggatcaagaattcagctatgctcctgcaaaacccctatattacagttaggtccgacggctctctccacatagaacgggtgcagttgcaggacggaggcgaatacacatgcgtggcgtccaacgtggccggcacaaataataaaaccacttctgtagttgtccatgtgctcccaactatccagcatgggcagcaaatattgagtacgatcgaaggcatccctgtgacccttccgtgtaaagcctctggcaaccccaagccttctgtgatctggtccaagaagggcgaactaatcagcacctcgtccgccaagttcagtgccggggcagatggttcgctctacgtcgtgtcaccaggcggggaggaatctggtgagtacgtctgcactgcaaccaacacagccgggtatgctaaacgcaaagtgcagctgacggtctacgtccggcctcgagtgtttggggaccagagaggcctcagccaagataagcccgtggaaatttccgtcctagcaggggaagaagtgactttgccgtgcgaagtgaagtctctcccgccacccattattacttgggctaaagagacgcagctcatcagcccctttagtccacggcatacctttctgcctagcggtagcatgaaaatcaccgaaactcggactagtgactcaggaatgtacttatgcgtcgctaccaacatcgctggcaacgtgacacaggccgtgaagctgaatgtgcacgtgcccccaaagattcagcggggccctaagcatttgaaagtgcaagtgggccaaagggttgacataccttgcaatgctcagggcactcctcttccagtgattacatggtcaaaagggggatccacgatgctggtcgacggtgagcatcatgtgtcaaatcccgacgggacacttagcattgaccaagcaaccccaagcgacgcgggtatctacacctgtgtggctaccaatattgcaggaactgatgagaccgaaattactttgcacgttcaagagccccccactgtagaggacctggaacctccatacaatactacatttcaagagcgcgttgccaaccagaggattgaatttccttgtcctgcaaaaggcactccaaaaccgaccatcaagtggctgcacaacggcagagaactgaccggccgcgagcctggcatctccattctcgaagacggcaccctcctggtaatagcaagcgttaccccctacgataacggtgaatacatttgtgtggccgtgaacgaggctggtaccactgagagaaaatacaacttgaaggtccatgtgccccctgtcatcaaggacaaggaacaggtcactaatgtgtcagtgctgctcaaccagcttactaatctcttttgtgaggtagagggaacaccatcacccattataatgtggtacaaggacaacgtgcaggtgacggagagctcaaccatccaaaccgtgaacaacgggaaaatcctgaaactatttcgggccaccccagaagatgccggcaggtactcatgtaaagccatcaacatagcggggactagccagaaatactttaatattgacgtactcgtcccaccgaccatcataggcaccaatttcccaaatgaagtgtcagtcgtcttgaacagggatgtggccctggaatgccaagtgaagggcacaccattccccgacatccactggtttaaggatggaaagcctttattcctgggcgacccgaatgtcgaattgctggatcgcgggcaggtacttcaccttaagaacgcccgccgcaacgacaaaggtcgctatcaatgtaccgtgtcgaacgccgctggtaagcaggccaaggatatcaagctcacaatttatattcccccctccatcaaaggcggtaacgtgaccactgacataagtgtgttaattaactcgctcataaaactggagtgcgagaccagaggtcttccaatgcctgcaatcacctggtataaagacggacagcctattatgagttcttcccaggcactctacatagacaagggccagtacctccacatccccagagcccaggtttccgacagtgccacctatacctgtcatgttgccaatgtggctggcacggccgagaagagctttcatgtggatgtttatgtccctccgatgattgagggcaacctggccacccccttaaacaagcaggtggtgattgcacactctttgaccttggagtgtaaagctgctggcaacccctctccaattctcacatggcttaaggacggcgtccctgtcaaagccaacgacaatattaggattgaggccggcggcaaaaaattggagatcatgagtgcacaggagatagatcgcggacaatatatatgcgttgccacttcggtcgcaggtgagaaagagatcaaatatgaggtcgatgtccttgttccacctgctattgaaggcggcgatgagaccagttacttcattgtcatggtgaacaatctgctggagctcgattgtcacgtgaccggctccccccctcccaccattatgtggctgaaggatggacagcttattgatgaacgcgatgggttcaagatcctgcttaacggcagaaaactcgtcatcgcccaggcccaggtgagtaatacaggcctgtacaggtgtatggccgccaatactgcaggagatcacaagaaagagttcgaagtgaccgtccacgttcccccaactattaagagctccgggctgtccgaaagagtggtggtcaaatacaaaccagtcgccctccagtgtattgccaacggtatccctaaccccagcattacatggctgaaagacgaccagcccgtgaacactgcacaaggaaatctgaaaatccaaagctcagggcgcgttctgcagatcgctaaaaccttgttagaggatgccggacgatatacatgtgtagcaacaaacgcagcaggcgagacacaacagcacatacagctccacgtacacgagccccccagccttgaggatgccggcaaaatgctgaatgagaccgtgctagtgtcgaaccctgtgcagctggaatgcaaagctgccggtaatccggtgcctgtgatcacctggtataaggataatcgactgttatccggctccacttccatgacttttctaaatcggggccaaattatcgacattgagtccgcacagatcagtgatgcaggcatttataagtgtgtcgccataaactctgcaggcgctacagagctcttttactccctgcaagttcatgtggccccaagtatctctggctcaaataatatggtcgctgttgtggtgaacaacccagttcggctagaatgtgaagctcggggcattcctgctccaagtttaacctggttgaaggacggcagccccgtttcttccttttctaacggcctccaggtgcttagcggcggtagaatactcgccctcacatctgctcagatcagcgacacgggccggtatacctgcgtggcagtgaacgcagccggcgagaaacagagggatatcgatctacgagtctacgttccccctaatatcatgggagaagagcaaaatgtgtctgtcttgatttctcaggcggttgaactgctctgccagagtgacgcaataccccctccgaccctgacctggcttaaagacggccatcccctgctcaagaagccaggcctgtcaattagtgagaatcgcagtgtgctcaagattgaggacgcccaagttcaagacacaggccgatatacatgcgaagcaaccaatgtggcaggcaagaccgaaaaaaattataacgttaacatctgggtacctcccaacatcggcgggtctgacgagttgacacagttaacagtgattgaaggcaatctgatttcactgctatgtgagtcatctgggataccccctccaaatctcatatggaagaagaaaggctccccggtgctgaccgatagtatggggcgagtgcggattctctccgggggccggcagttgcagatctcgatcgccgaaaagtcagacgcggctctttacagctgtgttgcttccaacgtggcgggaacagctaaaaaggagtataacctccaggtgtacatccgacctaccataacaaacagcggcagccaccctactgaaatcatcgtgactagggggaagtccattagcctggagtgtgaggtgcagggcatccctccccccacagtgacttggatgaaagacggacatccccttattaaggcaaagggtgtcgagattctggatgagggacacatcttgcagctgaaaaatattcacgtgagcgacacaggtcgctatgtgtgcgtcgccgtgaatgtggcaggaatgacagataagaagtatgatctgagcgtacacgcgccaccttcgatcattggcaaccacaggtcccccgagaacattagtgttgtggagaagaattctgtctcattgacctgcgaggccagcggcatcccactcccttccattacctggtttaaggatggctggccagtcagcctttcaaacagcgtcaggattctgtctggcggccgcatgttgagactgatgcaaaccacgatggaggatgccggacagtatacctgtgtagtccgcaatgctgctggtgaggagcggaagatctttggcctctcagttttagtgcctccgcacattgtgggcgaaaatacgctggaagacgtgaaggtcaaggagaaacagagcgtgacactgacttgcgaggtgaccgggaatcctgtgcctgagatcacctggcataaggatggacagccactccaagaggatgaggcccaccacatcatctcagggggccgattccttcaaataacgaatgttcaggttcctcatactgggagatatacatgcctggcttccagcccggccggtcataagtcaagatctttttctttgaacgtgttcgtgagccctacaattgcaggagtgggcagtgatggcaatcccgaagacgtcactgtaattcttaactcccctacctcattagtatgcgaagcttactcataccccccagctaccattacgtggtttaaggacggcacacccctggaaagcaacagaaacataaggatactgcccggcggccgcaccctccagatcctgaatgcccaagaagataacgcaggcaggtactcctgcgttgccaccaatgaggccggcgagatgatcaagcactacgaagtcaaagtctatatcccgccaattatcaacaaaggcgacctctgggggcctgggctctcccccaaagaagtcaaaatcaaggtaaacaatacactcactctggagtgcgaggcatacgccataccaagcgcatctctgagctggtacaaggatggccaaccgctgaagagtgacgatcatgtgaacattgcagcaaatgggcacacactgcagatcaaagaagcccagataagtgacaccgggcgttatacctgtgtggcaagtaacatcgccggcgaagatgaactggactttgacgtgaacatccaggtccctcccagcttccagaagctctgggagatcggaaacatgctggatactggcaggaatggggaagccaaagacgtgattattaacaaccccatctccctttattgcgagaccaacgccgcacctcctcccaccctcacttggtacaaggacggacacccgctgacaagctctgataaagtcctaattttaccgggcggtcgggtccttcaaatcccccgggcaaaggtagaagatgctggacgatatacatgcgtcgcagtaaacgaggccggggaggatagcctccagtacgatgttagggtgttagttccgcccatcattaagggggctaactctgatttgccagaagaagtcactgtactcgtgaataaatcagctctcattgaatgcctgtcgagcggttctccagcaccgcggaatagctggcagaaagatggccagcctctgttagaggatgaccaccataagtttctctctaacgggcgtatactgcagatcctcaatacccaaatcaccgacattggccgatacgtatgcgtagctgaaaatacagccggcagcgccaagaaatacttcaatctgaacgtgcacgttcccccctctgtaattggcccaaaaagcgagaacttaaccgtggtcgttaacaattttatttcactgacctgcgaagtttccggctttccaccccccgacctgagctggctgaagaacgagcaacctatcaagctgaacacaaatactcttattgtgcccggcggccgaactttgcagattatccgtgcaaaggtgtccgatggcggagagtacacatgtatagcgattaaccaagcaggtgaaagtaaaaaaaagttctccctgactgtttacgttccgccaagtatcaaggatcatgacagcgaatcactgtctgttgtcaatgtgcgagagggcactagcgtctctttagagtgcgaatcgaatgccgtgccacctcccgtgataacatggtataaaaatggccgcatgatcaccgaaagcacacacgtggagatcctagccgatggccagatgctccacattaagaaggctgaggtgagcgacaccggtcagtacgtgtgccgcgcaatcaacgtggcaggacgggatgataaaaatttccatttgaatgtatacgtgcccccttcaatagaaggacctgaaagggaggtgatcgtcgaaacaatcagtaacccagttacactgacttgcgatgctactggcattcccccccccactattgcttggctaaaaaatcataaaagaatagagaatagcgactcactggaggtgagaatactcagtggggggtctaagctgcagattgcccgaagtcagcacagtgacagcgggaattacacctgcattgcgtctaacatggaagggaaggcccaaaagtattacttcctctctattcaggtaccaccgagcgtcgcaggagccgaaatcccatctgacgtatctgtgctgctcggagagaacgtggagcttgtatgcaacgctaacgggataccaactccactcattcagtggctgaaagatggcaagcctattgcaagtggagagacggaaaggattagagtcagcgccaacggctctaccttaaacatctatggagccctaacatccgacaccggaaaatatacatgtgtcgctaccaatccggctggagaggaagaccggatttttaatcttaacgtctacgtgactcccacaatccgcgggaacaaagatgaggctgaaaaacttatgactctggtagatacctcaataaacatagagtgcagggccaccggaaccccccccccccagataaattggctcaagaacggtctgcctctgcccctctcgtcacacattcgcctactcgcggccggccaagtgatccgcatcgtgcgggcccaggtatccgacgtggcagtgtacacctgtgtcgctagcaaccgggccggcgtggataataaacattacaacctgcaggtcttcgctccccccaacatggataattcgatggggactgaggagattaccgtactgaagggttcatcaactagtatggcttgcatcacagacgggacgcccgccccatctatggcttggctgagagacgggcagccgctcggcttggatgctcacctcaccgtctctacacatgggatggtccttcagctcctgaaagctgagaccgaggacagtggaaagtatacgtgtattgccagcaacgaagccggcgaagtgtctaagcattttattctcaaggtcctggaacccccacatattaacggttccgaggaacacgaggaaatctccgtgatagttaataaccctctggagctcacctgtatcgctagcgggattcctgcccccaagatgacctggatgaaggatggcaggcctcttcctcagactgatcaggtgcaaacattaggaggcggggaagtgctcaggatatcaaccgcacaggtggaagacaccggccggtacacttgcctggcgtcttctccggctggcgacgatgacaaggagtatctcgttcgcgtgcatgtaccacccaatatcgccgggaccgacgaacccagagatattacagttctgagaaataggcaagtgactctggaatgcaagagtgacgccgtgccaccccccgtaatcacatggcttagaaacggcgagcgcctgcaagccaccccacgagtgcggattctctctggagggcgttatttgcagatcaataacgcggatttgggtgatacagccaattacacctgcgtcgcatccaatatcgctggcaaaaccacacgggaattcatcctgaccgtgaatgtgcctcctaacatcaaagggggccctcagtctttggtgattctactgaacaaaagcacggttctggagtgtattgccgagggagtgccaacaccgcggatcacatggcgtaaggatggcgccgtgctggccggtaaccatgcacgctactcaatactagagaatggcttcttgcatatccagagcgcgcatgtcactgatacagggcgatacctgtgcatggctacgaacgccgctgggacagaccgacggcgcattgatcttcaggtccacgtgcccccctccatcgcaccggggcccacgaacatgaccgtgatcgtgaacgtgcagactacactggcttgcgaagctacgggcatcccaaaaccatccataaactggagaaaaaacgggcatcttctcaacgtggaccagaatcaaaattcttataggctgctcagctcaggaagccttgtgatcatttctccatctgtagacgacactgcaacgtacgagtgcactgtcacaaacggagccggtgatgacaaacgcactgtagatctgaccgtacaggtgcccccaagtattgcggatgaacctacagattttctggtgactaagcacgcgcccgccgtgataacatgcaccgccagcggtgtaccattccctagtattcattggacaaaaaacggtatccgcttgctgccgaggggagatggctacagaatcctgtcaagtggcgctatcgagatcttggctactcagctgaaccacgcaggacggtatacgtgtgtggcacgcaatgcagctggatctgcacaccgccacgttaccctgcatgtgcacgaacctcccgtcattcagcctcaaccctccgagctgcatgttatcctcaataatcccatcctgcttccatgcgaagcaactggtaccccgagtccatttattacatggcaaaaagagggaatcaacgtcaacacatccggtcgcaatcatgcggtgttaccctctggcggacttcagatctcccgcgctgtgcgcgaggacgctggaacatacatgtgtgtcgcccagaatcctgcgggtaccgccttgggtaaaattaaattgaatgtccaggtgccgcctgttatcagcccacatttaaaagaatacgttatagcggtggataaacctattacgttgtcctgtgaagcggatgggcttcccccccccgacatcacatggcacaaggatggccgcgcgatcgtagaatccatccggcaaagagtgctgtcatccggctctctgcagatcgccttcgtgcaaccaggtgatgctgggcattatacttgcatggcagcaaatgtcgcgggtagcagctccaccagcactaagttgacagttcatgtgccccctcgtataagatcaacggaaggccattataccgtaaacgaaaacagccaggccattctaccttgcgttgctgacgggatacctactcccgcaatcaactggaagaaggataatgtcctgttggctaatttgttaggtaaatatactgcagagccttatggagagttgatattagagaatgttgttctggaagactcaggtttctatacctgcgtagccaataacgctgcaggtgaggacacacacacagttagcctcaccgttcatgtgctgcccacttttactgagctccctggagatgtttctcttaacaagggggaacaattacgactaagttgcaaggcaaccggcattccacttccgaaactgacatggactttcaataacaacattatccccgcccattttgatagtgtgaatgggcattctgaactcgttattgaaagagtctctaaagaagacagtggcacatacgtgtgcactgcggagaacagcgtcggttttgtgaaagctatcggctttgtgtacgttaaagagcctcccgtcttcaagggggattatcccagtaactggatcgaacctttagggggcaatgcgatcctcaactgcgaagtgaaaggcgacccaaccccgaccatccagtggaaccgtaaaggagtcgatatcgagatttctcaccgcatcagacagctcggcaacggctccctcgccatctatggcaccgtgaacgaggacgcaggagactacacctgcgtggccactaacgaagcgggggtcgtggagagatcaatgtccctgaccctccagtccccgccaattatcacgttagagccagtcgagaccgtgataaacgccgggggcaaaattattctgaactgtcaggccaccggggagccccagcctactatcacttggtctcgccagggacactcgatcagctgggacgacagggtcaatgtgctaagcaacaacagcctgtatatcgctgacgcacagaaagaagacacttctgaatttgagtgcgtcgctcggaaccttatggggtcggtactcgttcgcgttcccgttatcgtgcaggtccacggcgggttctcccaatggagcgcgtggagggcctgttctgtgacctgcgggaagggtattcaaaagagatctaggctctgcaaccagccactgcccgcaaacggaggaaaaccctgtcagggctcagatttagagatgcggaattgtcagaataagccctgcccggtggatgggtcatggtcagaatggagcctgtgggaagagtgcactagaagttgtggaagaggaaatcaaacacgtactcggacttgcaacaacccgtctgtgcaacatggtggaaggccctgtgagggcaacgccgttgaaattatcatgtgcaatattaggccttgccccgtccatggtgcttggtccgcttggcagccatggggtacctgctcagaaagttgcgggaaaggaactcagactcgggcacgcctgtgtaataatcccccgcctgccttcggtggctcctattgcgacggtgctgagactcagatgcaagtgtgcaatgaaaggaattgccctatccacgggaagtgggccacttgggccagttggtcggcctgctcagtctcgtgtggaggtggtgcacgccagaggaccagaggatgctcggatcccgtgccacagtatggggggcgtaaatgtgagggaagcgacgtgcagagcgatttctgcaattcggacccttgcccaacgcatgggaactggtccccctggtcagggtggggcacctgctcacggacctgcaacggagggcagatgcgtagataccgcacttgtgataaccctcctccatctaacgggggaagagcgtgtggcggccccgacagccagatccagcggtgcaacaccgacatgtgccccgtggatggctcatggggctcctggcactcctggtctcagtgttcggcatcatgtgggggcggcgaaaaaacgcggaaaagactgtgcgaccatcctgtccctgtaaaggggggcaggccttgtcctggggatactacacaggtgacccgatgtaatgtgcaggcttgccctggaggtccccagagagcccgcggctccgtcatcgggaatattaatgatgttgaattcggtatcgccttcctaaacgctaccattacagattctcccaattcagacacacggataatccgcgccaaaattactaacgtccctcgcagtctgggatctgccatgaggaagatagtctccatcctgaatccaatctactggaccactgcaaaagaaatcggagaggctgtgaacggctttaccctgactaatgctgtattcaaacgagaaacccaggtggaattcgccactggggagattctccaaatgtcacacattgcaagggggctggattccgacggaagcctgctcctggacattgtggtgtccggatatgtcctgcagctgcagtcccccgctgaagttactgtgaaagattatacggaagattatatacaaactggacccggtcagttgtacgcctatagcactcgactgttcactatcgacgggatctccattccatacacctggaaccatacagtgttttacgatcaggctcaaggcaggatgccattcttggtcgaaaccctccatgcctcaagcgtggagagcgactataatcaaatcgaggagaccctggggtttaagattcacgcctctatttctaagggcgataggtctaaccaatgtccgtcgggtttcaccctggatagcgtgggaccattttgcgccgatgaagatgaatgcgcggccggaaatccctgtagtcattcttgccataatgctatggggacttattactgcagctgtcctaagggcctgaccatcgctgcagatggccgaacttgtcaggatattgacgagtgcgcattgggccgccatacctgtcacgccgggcaggactgcgataatactataggctcataccgctgtgtggtgcgctgcggttcaggttttcgccgaacgagcgacggcctgagctgccaggacattaacgaatgtcaggagagtagcccgtgccatcaaaggtgctttaacgcaatcggtagcttccactgtggctgtgaacctgggtatcagctgaaaggcaggaagtgtatggatgttaacgagtgtcgccaaaatgtgtgccgacctgatcaacattgcaagaatacccggggcggatacaagtgtatcgatctgtgcccaaacgggatgactaaagctgaaaatggaacttgcatcgacattgatgagtgcaaggacgggacccaccaatgcaggtataaccaaatttgtgaaaataccaggggctcatacaggtgcgtgtgtccccgcgggtaccggtcacagggcgtgggacgcccctgtatggatatcgacgaatgtgaaaacacagatgcctgccaacacgagtgtaaaaacacatttggtagctaccagtgcatctgccctccgggttaccaactgacacacaatggtaagacctgccaggatattgacgaatgcctggagcaaaacgtgcattgtggcccaaacagaatgtgcttcaacatgaggggctcatatcaatgtatcgacacaccatgtcctcctaactatcagcgggatcctgtgtccggattttgcctgaaaaattgccctcccaatgatctggagtgtgcactgtccccgtacgccctggagtacaagctcgtgagtcttccctttggaatcgccaccaaccaggacctcatcagactggttgcgtatacgcaggatggcgtgatgcatccacgcacaaccttcctgatggtcgatgaagagcagaccgtgccttttgccctgcgggatgagaacctgaagggcgtggtgtacaccacccgtccacttcgagaagcagaaacttataggatgagggttagggctagttcctattctgccaatggaaccatagagtatcagaccacattcatagtgtatattgcggtcagcgcctatccttactag

SEQ ID NO: 299026 - DNA, 723 bp, Artificial Sequence
  derived and/or modified sequence
gccattgggagtttccactgcggctgtgaacctggttatcagctgaagggaaggaagtgcatggatgtgaacgagtgtagacagaacgtctgcaggccagaccaacattgcaagaatacgagagggggctataagtgtatcgacctctgcccaaacggcatgactaaggccgaaaacggcacgtgtatcgacatcgacgagtgtaaggatggcacccaccaatgccggtacaatcagatctgtgagaatacgcgcggttcctaccgctgcgtctgcccgagaggctaccggtcccagggagttggcagaccctgcatggatatcgatgaatgcgagaatacagatgcatgccagcacgagtgtaagaacacctttgggtcataccagtgtatttgtcctccgggatatcagcttacacataatggcaagacatgtcaggacatcgacgaatgtctggaacagaacgtccattgtgggccaaaccgtatgtgcttcaacatgagaggaagctaccagtgcattgacaccccctgtccccccaactaccagagagaccccgtgagcggattctgtctcaagaactgcccacccaacgacctggagtgcgctctttccccttatgcactcgaatacaagttagtgagtcttccttttggaattgctaccaaccaggacctaatccggctggtggcgtacacccaagatggtgtgatgcacccatag

SEQ ID NO: 299027 - DNA, 17861 bp, Artificial Sequence
  derived and/or modified sequence
gaagccgcatccagacaaaagctgccgcatccctgccctgcccaacccctggagggattcgagtttggtgcttgtccccgtctgattctcagcgccaaactttttgctagttcagagattccaagagtctgatgagttactctgagaggaaaccctctgcctgttgttgaggaggactgagcacagtgcttaggcgctgagggggaaaaagagggggaaaaaaaagaaaatgatttcctgggaagttgtccatacagtattcctgtttgctcttctttattcttccctagctcaagatgcgagcccccagtcagagatcagagctgaggaaattcccgagggggcctccacgttggcttttgtgtttgatgtgactggttctatgtatgatgatttagttcaggtgattgaaggggcttccaaaattttggagacgtctttgaaaagacctaaaagacctcttttcaactttgcgttggtgcctttccatgatccagaaattggcccagtgacaattaccacagatcccaagaaatttcaatatgaactcagagaactgtatgttcagggtggtggtgattgcccagaaatgagtattggagctataaaaattgccttggaaatttctcttcctggttctttcatctatgttttcactgatgctcggtccaaagattaccggctcacccatgaggtgctgcaacttatccaacagaaacagtcacaagtcgtatttgttctgactggagattgtgatgacaggacccatattggatataaagtctatgaagaaattgcctctacaagttctggtcaagtgttccatctggacaaaaaacaagttaatgaggtattaaaatgggtagaagaagcagtacaggcctccaaagttcaccttttatccacagatcatttggaacaggctgtaaatacttggagaattccttttgatcccagcctgaaagaggtcactgtgtctttgagtgggccttctccaatgattgaaattcgcaatcctttagggaagctgataaaaaagggatttggcctgcatgagctattaaatatccataactctgccaaagtagtgaatgtgaaagagccagaggctggaatgtggacagtgaagacctcaagcagtggaaggcactctgttcgcattactggcctcagtactattgatttccgagctggcttttctcgaaagcccaccctggacttcaaaaaaacagtcagcagaccagtgcaaggaatacctacctatgtactgctcaatacttctggaatttccactccagctagaatagatcttcttgaacttttgagtatctcaggaagttctcttaagactattcctgttaaatattacccacatcgaaaaccttatggcatatggaatatttctgactttgtaccaccaaatgaagctttctttctcaaagtaacaggctatgataaagatgattacctcttccagagagtatcaagtgtttccttttctagtattgtcccagatgctcccaaagttacgatgcctgagaaaaccccaggatactatctgcagccgggccaaattccctgctctgttgacagtcttttgccctttaccttgagctttgtcagaaatggagttacacttggagtagaccagtatttgaaagaatctgccagtgtgaacttagatattgcaaaggtcactttgtctgacgaaggtttctatgaatgcattgctgtcagcagtgcaggtactggacgggcacagacattttttgacgtatcagagccccctccggtcatccaagtgcctaacaatgttacagtcactcctggagagagagcagttttaacatgtctcatcatcagtgcggtggattacaatctaacctggcagaggaatgacagagatgtcagactggcagagccagcgagaattaggaccttggctaatctgtcattggagctaaagagtgtgaaattcaacgatgctggagagtatcattgtatggtttctagtgaaggtggatcatcagccgcttcagttttcctcacagtgcaagaaccacccaaagtcactgtgatgcccaagaatcagtctttcacaggagggtctgaggtctccatcatgtgttctgcaacaggttatcccaaaccaaagattgcctggaccgttaacgatatgtttatcgtgggttcacacaggtataggatgacctcagatggtaccttatttatcaaaaatgcagctcccaaagatgcagggatctatggttgcctagcaagtaattcagctggaacagataaacagaattctactctcagatacattgaagcccctaagttgatggtagttcagagtgagctcttggttgcccttggggatataaccgttatggaatgcaaaacctctggtattcctccacctcaagttaaatggttcaaaggagatcttgagttgaggccctcaacattcctcattattgaccctctcttgggacttttgaagattcaagaaacacaagatctggatgctggcgattatacctgtgtagccatcaatgaggctggaagagcaactggcaagataactctggatgttggctcacctccagttttcatacaagaacctgctgatgtgtctatggaaattggctcaaatgtgacattaccttgttatgttcagggttatccagaaccaacaatcaaatggcgaagattagacaacatgccaattttctcaagacctttttcagttagttccatcagccaactaagaacaggagctctctttattttaaacttatgggcaagtgataaaggaacctatatttgtgaagctgaaaaccagtttggaaagatccagtcagagacaacagtaacagtgaccggacttgttgctccacttattggaatcagcccttcagtggccaatgttattgaaggacagcagcttactttgccctgtactctgttagctggaaatcccattccagaacgtcggtggattaagaattcagctatgttgctccaaaatccttacatcactgtgcgcagtgatgggagcctccatattgaaagagttcagcttcaggatggtggtgaatatacttgtgtggccagtaacgttgctgggaccaataacaaaactacctctgtggttgtgcatgttctgccaaccattcagcatgggcagcagatactcagtacaattgaaggcattccagtaactttaccatgcaaagcaagtggaaatcccaaaccgtctgtcatctggtccaagaaaggagagctgatttcaaccagcagtgctaagttttcagcaggagctgatggtagtctgtatgtggtatcacctggaggagaggagagtggggagtatgtctgcactgccaccaatacagccggctacgccaaaaggaaagtgcagctaacagtctatgtaaggcccagagtgtttggagatcaacgaggactgtcccaggataagcctgttgagatctccgtccttgcaggggaagaggtaacacttccatgtgaagtgaagagcttacctccacccataattacttgggccaaagaaacccagctcatctcaccgttctctccaagacacacattcctcccttctggttcaatgaagatcactgaaacccgcacttcagatagtgggatgtatctttgtgttgccacaaatattgctgggaatgtgactcaggctgtcaaattaaatgtccatgttcctccaaagatacagcgtggacctaaacatctcaaagtccaagttggtcaaagagtggatattccatgtaatgctcaagggactcctcttcctgtaatcacctggtccaaaggtggaagcactatgctggttgatggagagcaccatgttagcaatccagacggaactttaagcatcgaccaagccacgccctcagatgctggcatatatacatgtgttgctactaacatagcaggcactgatgaaacagagataacgctacatgtccaagaaccacccacagtggaagatctagaacctccatataacactactttccaagaaagagtggccaatcaacgcattgaatttccatgtcctgcaaaaggtacccctaaaccaaccatcaaatggttacacaatggtagagagttgacaggcagagagcctggcatttctatcttggaagatggcacattgctggttattgcttctgttacaccctatgacaatggggagtacatctgtgtggcagtcaatgaagctggaaccacagaaagaaaatataacctcaaagtccatgttcctccagtaattaaagataaagaacaagttacaaatgtgtcggtgttgttaaatcagctgaccaatctcttctgtgaagtggaaggcactccatctcccatcattatgtggtataaagataatgtccaggtgactgaaagcagcactattcagactgtgaacaatgggaagatactgaagctcttcagagccactccagaggatgcaggaagatattcctgcaaagcaattaatattgcaggcacttctcagaagtactttaacattgatgtgctagttccacccaccataataggtaccaacttcccaaatgaagtctcagttgtcctcaaccgtgacgtcgcccttgaatgccaggtcaaaggcactccctttcctgatattcattggttcaaagatggcaagcctttatttttgggcgatcctaatgttgaacttctagacagaggacaagtcttacatttaaagaatgcacggagaaatgacaaggggcgctaccaatgtactgtgtctaatgcagctggcaaacaagccaaggatataaaactgactatctatattccacctagtattaaaggaggaaatgtcaccacagacatatcagtattgatcaacagccttattaaactggaatgtgaaacacggggacttccaatgcctgccattacttggtataaggacgggcagccaatcatgtccagctcacaagcactttatattgataaaggacaatatcttcatattcctcgagcacaggtctctgattcagcaacatatacgtgtcatgtagccaatgttgctggaactgctgaaaaatcattccatgtggatgtctatgttcctccaatgattgaaggcaacttggccacgcctttgaataagcaagtagttattgctcattctctgacactggagtgcaaagctgctggaaacccttctcccattctcacctggttgaaagatggtgtacctgtgaaagctaatgacaatatccgcatagaagctggtgggaagaaactcgaaatcatgagtgcccaagaaattgatcgaggacagtacatatgcgtggctaccagtgtggcaggagaaaaggaaatcaaatatgaagttgatgtcttggtgccaccagctatagaaggaggagatgaaacatcttacttcattgtgatggttaataacttactggagctagattgtcatgtgacaggctctcccccaccaactatcatgtggctgaaggatggccagttaattgatgaaagggatggattcaagattttattaaatggacgcaaactggttattgctcaggctcaagtgtcaaacacaggcctttatcggtgcatggcagcaaatactgctggagaccacaagaaggaatttgaagtgactgttcatgttcctccaacaatcaagtcctcaggcctttctgagagagttgtggtaaaatacaagcctgtcgccttgcagtgcatagccaatgggattccaaatccttccattacatggttaaaagatgaccagcctgtgaacactgcccaaggaaaccttaaaatacagtcttctggtcgagttctacaaattgccaaaaccctgttggaagatgctggcagatacacatgtgtggctaccaacgcagctggagaaacacaacagcacattcaactgcatgttcatgaaccacctagtctggaagatgctggaaaaatgctgaatgagactgtgttggtgagcaaccctgtacagctggagtgtaaggcagctggaaatcctgtgcctgttattacatggtacaaagataatcgtctactctcaggttccaccagcatgactttcttgaacagaggacagatcattgatattgaaagtgcccagatctcagatgctggcatatataaatgcgtggccatcaactcagctggagctacagagttattttacagtctgcaagttcatgtggccccatcaatttctggcagcaataacatggtggcagtggtggttaataacccggtgaggttagaatgtgaagccagaggtattcctgccccaagtctgacctggttgaaagatgggagtcctgtttctagtttttctaatggattacaggttctctctggtggtcgaatcctagcattgaccagtgcacaaatcagcgacacaggaaggtacacctgcgtggcagtgaatgctgctggagaaaagcaaagggacattgacctccgagtatatgttccgccaaatattatgggagaagaacagaatgtctctgtcctcattagccaagctgtggaattactatgtcaaagtgatgctattcccccacctactcttacttggttaaaagacggccaccccttgctgaagaaaccaggcctcagtatatctgaaaatagaagtgtgttaaagattgaagatgctcaggttcaagacactggtcgttacacttgtgaagcaacaaatgttgctggaaaaactgaaaaaaactacaatgtcaacatttgggtccccccaaatattggtggttctgatgaacttactcaacttacagtcattgaagggaatctcattagtctgttgtgtgaatcaagtggtattccacccccaaatctcatctggaagaagaaaggctctccagtgctgactgattccatggggcgagttagaattttatctgggggcaggcaattacaaatttcaattgctgaaaagtctgatgcagcactctattcatgtgtggcgtcgaatgttgctgggactgcaaagaaagaatacaatctgcaagtttacattagaccaaccataaccaacagtggcagccaccctactgaaattattgtgacccgagggaagagtatctccttggagtgtgaggtgcagggtattccaccaccaacagtgacctggatgaaagatggccaccccttgatcaaggcaaagggagtagaaatactggatgaaggtcacatccttcagctgaagaacattcatgtatctgacacaggccgttatgtgtgtgttgctgtgaatgtagcaggaatgactgacaaaaaatatgacttaagtgtccatgctcctccaagcatcataggaaaccacaggtcacctgaaaatattagtgtggtagaaaagaactcagtatctttgacttgtgaagcttctggaattcccctgccttccataacctggttcaaagatgggtggcctgtcagccttagcaattctgtgaggattctttcaggaggcaggatgctacggctgatgcagaccacaatggaagatgctggccaatatacttgcgttgtaaggaatgcagctggtgaagaaagaaaaatctttgggctttcagtattagtaccacctcatattgtgggtgaaaatacattggaagatgtgaaggtaaaagagaaacagagtgttacgctgacttgtgaagtgacagggaatccagtgccagaaattacatggcacaaagatgggcagcccctccaagaagatgaagcccatcacattatatctggtggccgttttcttcaaattaccaatgtccaggtgccacacactggaagatatacatgtttggcttccagtccagctggccacaagagcaggagcttcagtcttaatgtatttgtatctcctacaattgctggtgtaggtagtgatggcaaccctgaagatgtcactgtcatccttaacagccctacatctttggtctgtgaagcttattcatatcctccagctaccatcacctggtttaaggatggcactcctttagaatctaaccgaaatattcgtattcttccaggaggcagaactctgcagatcctcaatgcacaggaggacaatgctggaagatactcttgtgtagccacgaatgaggctggagaaatgataaagcactatgaagtgaaggtgtacattccacccataatcaataaaggggacctttgggggccaggtctttcccctaaagaagtgaagatcaaagtaaacaacactctgaccttggaatgtgaagcgtatgcaattccttctgcctccctcagctggtacaaggatggacagccccttaaatccgatgatcatgttaatattgctgcgaatggacacacacttcaaataaaggaggctcaaatatcagacaccggacgatatacttgtgtagcatctaacattgcaggtgaagatgagttggattttgatgtgaatattcaagttcctccaagttttcagaaactctgggaaataggaaacatgctagatactggcaggaatggtgaagccaaagatgtgatcatcaacaatcccatttctctttactgtgagacaaatgctgctccccctcctacactgacatggtacaaagatggccaccctctgacctcaagtgataaagtattgattttgccaggagggcgagtgttgcagattcctcgggctaaagtagaagatgctgggagatacacatgtgtggctgtgaatgaggctggagaagattcccttcaatatgatgtccgtgtactcgtgccgccaattatcaagggagcaaatagtgatctccctgaagaggtcaccgtgctggtgaacaagagtgcactgatagagtgtttatccagtggcagcccagcaccaaggaattcctggcagaaagatggacagcccttgctagaagatgaccatcataaatttctatctaatggacgaattctgcagattctgaatactcaaataacagatatcggcaggtatgtgtgtgttgctgagaacacagctgggagtgccaaaaaatattttaacctcaatgttcatgttcctccaagtgtcattggtcctaaatctgaaaatcttaccgtcgtggtgaacaatttcatctctttgacctgtgaggtctctggttttccacctcctgacctcagctggctcaagaatgaacagcccatcaaactgaacacaaatactctcattgtgcctggtggtcgaactctacagattattcgggccaaggtatcagatggtggtgaatacacttgtatagctatcaatcaagctggcgaaagcaagaaaaagttttccctgactgtttatgtgcccccaagcattaaagaccatgacagtgaatctctttctgtagttaatgtaagagagggaacttctgtgtctttggagtgtgagtcgaacgctgtgccacctccagtcatcacttggtataagaatgggcggatgataacagagtctactcatgtggagattttagctgatggacaaatgctacacattaagaaagctgaggtatctgacacaggccagtatgtatgtagagctataaatgtagcaggacgggatgataaaaatttccacctcaatgtatatgtgccacccagtattgaaggacctgaaagagaagtgattgtggagacgatcagcaatcctgtgacattaacatgtgatgccactgggatcccacctcccacgatagcatggttaaagaaccacaagcgcatagaaaattctgactcactggaagttcgtattttgtctggaggtagcaaactccagattgcccggtctcagcattcagatagtggaaactatacatgtattgcttcaaatatggagggaaaagcccagaaatattactttctttcaattcaagttcctccaagtgttgctggtgctgaaattccaagtgatgtcagtgtccttctaggagaaaatgttgagctggtctgcaatgcaaatggcattcctactccacttattcaatggcttaaagatggaaagcccatagctagtggtgaaacagaaagaatccgagtgagtgcaaatggcagcacattaaacatttatggagctcttacatctgacacggggaaatacacatgtgttgctactaatcccgctggagaagaagaccgaatttttaacttgaatgtctatgttacacctacaattaggggtaataaagatgaagcagagaaactaatgactttagtggatacttcaataaatattgaatgcagagccacagggacgcctccaccacagataaactggctgaagaatggacttcctctgcctctctcctcccatatccggttactggcagcaggacaagttatcaggattgtgagagctcaggtgtctgatgtcgctgtgtatacttgtgtggcctccaacagagctggggtggataataagcattacaatcttcaagtgtttgcaccaccaaatatggacaattcaatggggacagaggaaatcacagttctcaaaggtagttccacctctatggcatgcattactgatggaaccccagctcccagtatggcctggcttagagatggccagcctctggggcttgatgcccatctgacagtcagcacccatggaatggtcctgcagctcctcaaagcagagactgaagattcgggaaagtacacctgcattgcctcaaatgaagctggagaagtcagcaagcactttatcctcaaggtcctagaaccacctcacattaatggatctgaagaacatgaagagatatcagtaattgttaataacccacttgaacttacctgcattgcttctggaatcccagcccctaaaatgacctggatgaaagatggccggccccttccacagacggatcaagtgcaaactctaggaggaggagaggttcttcgaatttctactgctcaggtggaggatacaggaagatatacatgtctggcatccagtcctgcaggagatgatgataaggaatatctagtgagagtgcatgtacctcctaatattgctggaactgatgagccccgggatatcactgtgttacggaacagacaagtgacattggaatgcaagtcagatgcagtgcccccacctgtaattacttggctcagaaatggagaacggttacaggcaacacctcgagtgcgaatcctatctggagggagatacttgcaaatcaacaatgctgacctaggtgatacagccaattatacctgtgttgccagcaacattgcaggaaagactacaagagaatttattctcactgtaaatgttcctccaaacataaaggggggcccccagagccttgtaattcttttaaataagtcaactgtattggaatgcatcgctgaaggtgtgccaactccaaggataacatggagaaaggatggagctgttctagctgggaatcatgcaagatattccatcttggaaaatggattccttcatattcaatcagcacatgtcactgacactggacggtatttgtgtatggccaccaatgctgctggaacagatcgcaggcgaatagatttacaggtccatgttcctccatctattgctccgggtcctaccaacatgactgtaatagtaaatgttcaaactactctggcttgtgaggctactgggataccaaaaccatcaatcaattggagaaaaaatgggcatcttcttaatgtggatcaaaatcagaactcatacaggctcctttcttcaggttcactagtaattatttccccttctgtggatgacactgcaacctatgaatgtactgtgacaaacggtgctggagatgataaaagaactgtggatctcactgtccaagttccaccttccatagctgatgagcctacagatttcctagtaaccaaacatgccccagcagtaattacctgcactgcttcgggagttccatttccctcaattcactggaccaaaaatggtataagactgcttcccaggggagatggctatagaattctgtcctcaggagcaattgaaatacttgccacccaattaaaccatgctggaagatacacttgtgtcgctaggaatgcggctggctctgcacatcgacacgtgacccttcatgttcatgagcctccagtcattcagccccaaccaagtgaactacacgtcattctgaacaatcctattttattaccatgtgaagcaacagggacacccagtcctttcattacttggcaaaaagaaggcatcaatgttaacacttcaggcagaaaccatgcagttcttcctagtggcggcttacagatctccagagctgtccgagaggatgctggcacttacatgtgtgtggcccagaacccggctggtacagccttgggcaaaatcaagttaaatgtccaagttcctccagtcattagccctcatctaaaggaatatgttattgctgtggacaagcccatcacgttatcctgtgaagcagatggcctccctccgcctgacattacatggcataaagatgggcgtgcaattgtggaatctatccgccagcgcgtcctcagctctggctctctgcaaatagcatttgtccagcctggtgatgctggccattacacgtgcatggcagccaatgtagcaggatcaagcagcacaagcaccaagctcaccgtccatgtaccacccaggatcagaagtacagaaggacactacacggtcaatgagaattcacaagccattcttccatgcgtagctgatggaatccccacaccagcaattaactggaaaaaagacaatgttcttttagctaacttgttaggaaaatacactgctgaaccatatggagaactcattttagaaaatgttgtgctggaggattctggcttctatacctgtgttgctaacaatgctgcaggtgaagatacacacactgtcagcctgactgtgcatgttctccccacttttactgaacttcctggagacgtgtcattaaataaaggagaacagctacgattaagctgtaaagctactggtattccattgcccaaattaacatggaccttcaataacaatattattccagcccactttgacagtgtgaatggacacagtgaacttgttattgaaagagtgtcaaaagaggattcaggtacttatgtgtgcaccgcagagaacagcgttggctttgtgaaggcaattggatttgtttatgtgaaagaacctccagtcttcaaaggtgattatccttctaactggattgaaccacttggtgggaatgcaatcctgaattgtgaggtgaaaggagaccccaccccaaccatccagtggaacagaaagggagtggatattgaaattagccacagaatccggcaactgggcaatggctccctggccatctatggcactgttaatgaagatgccggtgactatacatgtgtagctaccaatgaagctggggtggtggagcgcagcatgagtctgactctgcaaagtcctcctattatcactcttgagccagtggaaactgttattaatgctggtggcaaaatcatattgaattgtcaggcaactggagagcctcaaccaaccattacatggtcccgtcaagggcactctatttcctgggatgaccgggttaacgtgttgtccaacaactcattatatattgctgatgctcagaaagaagatacctctgaatttgaatgtgttgctcgaaacttaatgggttctgtccttgtcagagtgccagtcatagtccaggttcatggtggattttcccagtggtctgcatggagagcctgcagtgtcacctgtggaaaaggcatccaaaagaggagtcgtctgtgcaaccagccccttccagccaatggtgggaagccctgccaaggttcagatttggaaatgcgaaactgtcaaaataagccttgtccagtggatggtagctggtcggaatggagtctttgggaagaatgcacaaggagctgtggacgcggcaaccaaaccaggaccaggacttgcaataatccatcagttcagcatggtgggcggccatgtgaagggaatgctgtggaaataattatgtgcaacattaggccttgcccagttcatggagcatggagcgcttggcagccttggggaacatgcagcgaaagttgtgggaaaggtactcagacaagagcaagactttgtaataacccaccaccagcgtttggtgggtcctactgtgatggagcagaaacacagatgcaagtttgcaatgaaagaaattgtccaattcatggcaagtgggcgacttgggccagttggagtgcctgttctgtgtcatgtggaggaggtgccagacagagaacaaggggctgctccgaccctgtgccccagtatggaggaaggaaatgcgaagggagtgatgtccagagtgatttttgcaacagtgacccttgcccaacccatggtaactggagtccttggagtggctggggaacatgcagccggacgtgtaacggagggcagatgcggcggtaccgcacatgtgataaccctcctccctccaatgggggaagagcttgtgggggaccagactcccagatccagaggtgcaacactgacatgtgtcctgtggatggaagttggggaagctggcatagttggagccagtgctctgcctcctgtggaggaggtgaaaagactcggaagcggctgtgcgaccatcctgtgccagttaaaggtggccgtccctgtcccggagacactactcaggtgaccaggtgcaatgtacaagcatgtccaggtgggccccagcgagccagaggaagtgttattggaaatattaatgatgttgaatttggaattgctttccttaatgccacaataactgatagccctaactctgatactagaataatacgtgccaaaattaccaatgtacctcgtagtcttggttcagcaatgagaaagatagtttctattctaaatcccatttattggacaacagcaaaggaaataggagaagcagtcaatggctttaccctcaccaatgcagtcttcaaaagagaaactcaagtggaatttgcaactggagaaatcttgcagatgagtcatattgcccggggcttggattccgatggttctttgctgctagatatcgttgtgagtggctatgtcctacagcttcagtcacctgctgaagtcactgtaaaggattacacagaggactacattcaaacaggtcctgggcagctgtacgcctactcaacccggctgttcaccattgatggcatcagcatcccatacacatggaaccacaccgttttctatgatcaggcacagggaagaatgcctttcttggttgaaacacttcatgcatcctctgtggaatctgactataaccagatagaagagacactgggttttaaaattcatgcttcaatatccaaaggagatcgcagtaatcagtgcccctccgggtttaccttagactcagttggacctttttgtgctgatgaggatgaatgtgcagcagggaatccctgctcccatagctgccacaatgccatggggacttactactgctcctgccctaaaggcctcaccatagctgcagatggaagaacttgtcaagatattgatgagtgtgctttgggtaggcatacctgccacgctggtcaggactgtgacaatacgattggatcttatcgctgtgtggtccgttgtggaagtggctttcgaagaacctctgatgggctgagttgtcaagatattaatgaatgtcaagaatccagcccctgtcaccagcgctgtttcaatgccataggaagtttccattgtggatgtgaacctgggtatcagctcaaaggcagaaaatgcatggatgtgaacgagtgtagacaaaatgtatgcagaccagatcagcactgtaagaacacccgtggtggctataagtgcattgatctttgtccaaatggaatgaccaaggcagaaaatggaacctgtattgatattgatgaatgtaaagatgggacccatcagtgcagatataaccagatatgtgagaatacaagaggcagctatcgttgtgtatgcccaagaggttatcggtctcaaggagttggaagaccctgcatggatattgatgaatgtgaaaatacagatgcctgccagcatgagtgtaagaatacctttggaagttatcagtgcatctgcccacctggctatcaactcacacacaatggaaagacatgccaagatatcgatgaatgtctggagcagaatgtgcactgtggacccaatcgcatgtgcttcaacatgagaggaagctaccagtgcatcgatacaccctgtccacccaactaccaacgggatcctgtttcagggttctgcctcaagaactgtccacccaatgatttggaatgtgccttgagcccatatgccttggaatacaaactcgtctccctcccatttggaatagccaccaatcaagatttaatccggctggttgcatacacacaggatggagtgatgcatcccaggacaactttcctcatggtagatgaggaacagactgttccttttgccttgagggatgaaaacctgaaaggagtggtgtatacaacacgaccactacgagaagcagagacctaccgcatgagggtccgagcctcatcctacagtgccaatgggaccattgaatatcagaccacattcatagtttatatagctgtgtccgcctatccatactaaggaactctccaaagcctattccacatatttaaaccgcattaatcatggcaatcaagcccccttccagattactgtctcttgaacagttgcaatcttggcagcttgaaaatggtgctacactctgttttgtgtgccttccttggtacttctgaggtattttcatgatcccaccatggtcatatcttgaagtatggtctagaaaagtcccttattattttatttattacactggagcagttacttcccaaagattattctgaacatctaacaggacatatcagtgatggtttacagtagtgtagtacctaagatcattttcctgaaagccaaaccaaacaacgaaaaacaagaacaactaattcagaatcaaatagagtttttgagcatttgactatttttagaatcataaaattagttactaagtattttgatcaaagcttataaaataacttacggagatttttgtaagtattgatacattataataggacttgcctattttcatttttaagaagaaaaacaccactcattttataaaatatagtacagctactataaggcttgtttgatcccaaatggtgcttatcttgattgaacattcagaacaaggatattattttcagtgattttgtgagatcagctgaaccacttatgataataataataaaaaagactgctttgccctcacgtcagttgtacatggcatggaactttaaaaattttaatataaactttcatccagttagcttcataacttttacgttccagaattttgtttattttcctgtcaatgaaagcaatttttaaagataccagtgggacagatttggttttttaaaaatctcatgtgttcaaattaacataaatattacacgtcaatacactgtacatggtggtaatagactctaagcaattgccaagatgtattctatttttatgaagtgtatatatattaccttagtgtgcattttctatataatatcttgatggactcttttataaaattattttataaaaaacaatgttacactaaaatcagcctaaataaattttcacaactttttttcataacctt

SEQ ID NO: 299028 - DNA, 720 bp, Artificial Sequence
  derived and/or modified sequence
gccataggaagtttccattgtggatgtgaacctgggtatcagctcaaaggcagaaaatgcatggatgtgaacgagtgtagacaaaatgtatgcagaccagatcagcactgtaagaacacccgtggtggctataagtgcattgatctttgtccaaatggaatgaccaaggcagaaaatggaacctgtattgatattgatgaatgtaaagatgggacccatcagtgcagatataaccagatatgtgagaatacaagaggcagctatcgttgtgtatgcccaagaggttatcggtctcaaggagttggaagaccctgcatggatattgatgaatgtgaaaatacagatgcctgccagcatgagtgtaagaatacctttggaagttatcagtgcatctgcccacctggctatcaactcacacacaatggaaagacatgccaagatatcgatgaatgtctggagcagaatgtgcactgtggacccaatcgcatgtgcttcaacatgagaggaagctaccagtgcatcgatacaccctgtccacccaactaccaacgggatcctgtttcagggttctgcctcaagaactgtccacccaatgatttggaatgtgccttgagcccatatgccttggaatacaaactcgtctccctcccatttggaatagccaccaatcaagatttaatccggctggttgcatacacacaggatggagtgatgcatccc

SEQ ID NO: 299029 - DNA, 16557 bp, Artificial Sequence
  derived and/or modified sequence
atgatctcctgggaggtggtgcacacagtgttcctgtttgccctgctgtacagcagcctggcccaggatgccagcccccagagcgagatccgggcagaggagatccctgagggcgccagcaccctggcctttgtgtttgatgtgacaggctccatgtatgatgacctggtgcaggtgattgagggcgccagcaagatcctggagaccagcctgaagaggcccaagaggcccctcttcaactttgccctggtgcccttccatgaccctgagatcggccctgtgaccatcaccacagaccccaagaagttccagtatgagctgcgggagctgtatgtgcagggcggcggggactgcccagagatgagcattggagccatcaagatcgccctggagatcagcctgcccggcagcttcatctacgtgttcacagatgcccggagcaaggactaccgcctgacccatgaggtgctgcagctgatccagcagaagcagagccaggtggtgtttgtgctgaccggggactgtgatgacaggacccacatcggctacaaggtgtatgaggagatcgccagcaccagcagcggccaggtgttccacctggacaagaagcaggtgaatgaggtgctgaagtgggtggaggaggccgtgcaggccagcaaggtgcacctgctgagcacagaccacctggagcaggccgtgaacacctggaggatcccctttgaccccagcctgaaggaggtgacagtgtccctgagcggccccagccccatgattgagatccggaaccccctgggcaagctgatcaagaagggcttcggcctgcacgagctgctgaacatccacaacagcgccaaggtggtgaatgtgaaggagcctgaggccggcatgtggacagtgaagaccagcagcagcggccgccacagcgtgcgcatcaccggcctgagcaccatcgacttccgggccggcttcagcaggaagcccaccctggacttcaagaagacagtgtccaggcctgtgcagggcatccccacctacgtgctgctgaacaccagcggcatcagcaccccagccagaattgacctgctggagctgctgagcatcagcggcagcagcctgaagaccatccctgtgaagtactacccccacaggaagccctacggcatctggaacatcagtgactttgtgcccccaaatgaggccttcttcctgaaggtgacaggctatgacaaggatgactacctgttccagagggtgtcctctgtgtccttcagcagcatcgtgcctgatgcccccaaggtgaccatgcctgagaagaccccaggctactacctgcagcccggccagatcccctgcagcgtggacagcctgctgcccttcaccctgagctttgtgagaaatggagtgaccctgggcgtggaccagtacctgaaggagagcgcctctgtgaacctggacatcgccaaggtgaccctgagtgatgagggcttctatgagtgcatcgctgtgagcagcgctggcaccggccgggcccagaccttctttgatgtgtctgagcccccacctgtgatccaggtgcccaacaacgtgacagtgaccccaggagagagagctgtgctgacctgcctgatcatctctgctgtggactacaacctgacctggcagagaaatgacagagatgtgcggctggccgagcccgcccgcatccgcaccctggccaacctgagcctggagctgaagtctgtgaagttcaatgatgctggggagtaccactgcatggtgtcctctgagggcggcagcagcgctgcctctgtgttcctgactgtgcaggagccccccaaggtgacagtgatgcccaagaaccagagcttcaccggcggcagcgaggtgtccatcatgtgcagcgccaccggctaccccaagcccaagatcgcctggacagtgaatgacatgttcatcgtgggcagccaccgctacaggatgaccagtgatggcaccctcttcatcaagaatgctgcccccaaggatgctggcatctacggctgcctggccagcaacagcgctggaacagacaagcagaacagcaccctgcgctacatcgaggcccccaagctgatggtggtgcagagcgagctgctggtggccctgggggacatcaccgtgatggagtgcaagaccagcggcatccccccaccccaggtgaagtggttcaagggggacctggagctgcggcccagcaccttcctgatcatcgaccccctgctgggcctgctgaagatccaggagacccaggacctggatgctggggactacacctgtgtggccatcaatgaggccggccgggccaccgggaagatcaccctggatgtgggcagcccccctgtgttcatccaggagccagcagatgtgtccatggagatcggcagcaatgtgaccctgccctgctacgtgcagggctacccagagcccaccatcaagtggaggcggctggacaacatgcccatcttcagccggcccttctctgtgagcagcatcagccagctgaggactggagccctcttcatcctgaacctgtgggccagtgacaagggcacctacatctgtgaggccgagaaccagtttgggaagatccagagcgagaccaccgtgacagtgacaggcctggtggcccccctcatcggcatcagccccagcgtggccaacgtcatcgagggccagcagctgaccctgccctgcaccctgctggccggcaaccccatccctgagcggcgctggatcaagaacagcgccatgctgctgcagaacccctacatcaccgtgcggagtgatggcagcctgcacatcgagcgggtgcagctgcaggacggcggggagtacacctgtgtggccagcaatgtggccggcaccaacaacaagaccacctctgtggtggtgcacgtgctgcccaccatccagcacggccagcagatcctgagcaccatcgagggcatccctgtgaccctgccctgcaaggccagcggcaaccccaagcccagcgtcatctggagcaagaagggggagctgatcagcaccagcagcgccaagttctctgctggagcagatggcagcctgtatgtggtgtccccaggaggagaggagagcggggagtatgtgtgcacagccaccaacacagctggctacgccaagaggaaggtgcagctgactgtgtatgtgcggccccgggtgtttggagaccagaggggcctgagccaggacaagcctgtggagatctctgtgctggccggggaggaggtgaccctgccctgtgaggtgaagagcctgcccccacccatcatcacctgggccaaggagacccagctgatcagccccttcagccccaggcacaccttcctgcccagcggctccatgaagatcacagagaccaggaccagtgacagcggcatgtacctgtgtgtggccaccaacattgctggaaatgtgacccaggccgtgaagctgaatgtgcacgtgccccccaagatccagaggggccccaagcacctgaaggtgcaggtgggccagagggtggacatcccctgcaatgcccagggcacccccctgcccgtcatcacctggagcaagggcggcagcaccatgctggtggatggagagcaccacgtgagcaacccagatggcaccctgagcattgaccaggccacccccagtgatgctggcatctacacctgtgtggccaccaacattgctggaacagatgaaacagagatcaccctgcacgtgcaggagcccccaacagtggaggacctggagcccccctacaacaccaccttccaggagcgggtggccaaccagagaattgagttcccctgcccagccaagggcacccccaagcccaccatcaagtggctgcacaacggccgggagctgaccggccgggagcccggcatcagcatcctggaggatggcaccctgctggtgattgcctctgtgaccccctatgacaatggagagtacatctgtgtggccgtgaatgaggccggcaccacagagaggaagtacaacctgaaggtgcacgtgccccctgtgatcaaggacaaggagcaggtgaccaacgtgtctgtgctgctgaaccagctgaccaacctcttctgtgaggtggagggcacccccagccccatcatcatgtggtacaaggacaacgtgcaggtgacagagagcagcaccatccagacagtgaacaacgggaagatcctgaagctgttccgggccaccccagaagatgctggccgctacagctgcaaggccatcaacattgctggcaccagccagaagtacttcaacattgatgtgctggtgccccccaccatcatcggcaccaacttccccaatgaggtgtctgtggtgctgaacagagatgtggccctggagtgccaggtgaagggcacccccttcccagacatccactggttcaaggatggcaagcccctcttcctgggggaccccaacgtggagctgctggaccggggccaggtgctgcacctgaagaatgccaggagaaatgacaagggccgctaccagtgcaccgtgtccaatgctgctgggaagcaggccaaggacatcaagctgaccatctacatccccccatccatcaagggcggcaatgtgaccacagacatctctgtgctgatcaacagcctcatcaagctggagtgtgagacccggggcctgcccatgcctgccatcacctggtacaaggatggccagcccatcatgagcagcagccaggccctgtacatcgacaagggccagtacctgcacatcccccgggcccaggtgtctgattctgccacctacacctgccacgtggccaacgtggccggcacagctgagaagagcttccacgtggatgtgtatgtgccccccatgattgagggcaacctggccacccccctgaacaagcaggtggtgattgcccacagcctgaccctggagtgcaaggccgccggcaaccccagccccatcctgacctggctgaaggatggagtgcctgtgaaggccaatgacaacatccgcatcgaggccggcggcaagaagctggagatcatgtctgcccaggagattgaccggggccagtacatctgtgtggccacctctgtggccggggagaaggagatcaagtatgaggtggatgtgctggtgcccccagccattgaaggaggagatgagaccagctacttcatcgtgatggtgaacaacctgctggagctggactgccacgtgacaggcagccccccacccaccatcatgtggctgaaggatggccagctgattgatgaaagagatggcttcaagatcctgctgaatggaaggaagctggtgattgcccaggcccaggtgagcaacacaggcctgtaccgctgcatggccgccaacacagctggggaccacaagaaggagtttgaggtgacagtgcacgtgccccccaccatcaagagcagcggcctgtctgagcgggtggtggtgaagtacaagcctgtggccctgcagtgcatcgccaacggcatccccaaccccagcatcacctggctgaaggatgaccagcctgtgaacacagcccagggcaacctgaagatccagagcagcggccgggtgctgcagatcgccaagaccctgctggaggatgctggccgctacacctgtgtggccaccaatgctgctggggagacccagcagcacatccagctgcacgtgcatgagccccccagcctggaggatgctgggaagatgctgaatgaaacagtgctggtgagcaaccctgtgcagctggagtgcaaggctgctggcaaccctgtgcctgtgatcacctggtacaaggacaaccggctgctgagcggcagcacctccatgaccttcctgaacagaggccagatcatcgacatcgagagcgcccagatcagtgatgctggcatctacaagtgtgtggccatcaacagcgctggggccacagagctgttctacagcctgcaggtgcacgtggcccccagcatcagcggcagcaacaacatggtggccgtggtggtgaacaaccctgtgcggctggagtgtgaggcccggggcatcccagcccccagcctgacctggctgaaggatggcagccctgtgagcagcttcagcaatggcctgcaggtgctgagcggcggccgcatcctggccctgaccagcgcccagatcagtgacaccggccgctacacctgtgtggccgtgaatgctgctggggagaagcagagggacatcgacctgcgggtgtatgtgccccccaacatcatgggagaggagcagaatgtgtctgtgctgatcagccaggccgtggagctgctgtgccagagtgatgccatccccccacccaccctgacctggctgaaggatggccaccccctgctgaagaagccaggcctgagcatcagcgagaacagatctgtgctgaagattgaagatgcccaggtgcaggacaccggccgctacacctgtgaggccaccaacgtggccggcaagacagagaagaactacaacgtgaacatctgggtgccccccaacattggaggcagtgatgagctgacccagctgactgtgattgagggcaacctgatcagcctgctgtgtgagagcagcggcatccccccacccaacctgatctggaagaagaagggcagccctgtgctgacagacagcatgggccgggtgcgcatcctgagcggcggccggcagctgcagatcagcattgctgagaagagtgatgctgccctgtacagctgtgtggccagcaatgtggccggcacagccaagaaggagtacaacctgcaggtgtacatccggcccaccatcaccaacagcggcagccaccccacagagatcatcgtgacccggggcaagagcatcagcctggagtgtgaggtgcagggcatccccccacccaccgtgacctggatgaaggatggccaccccctcatcaaggccaagggcgtggagatcctggatgagggccacatcctgcagctgaagaacatccacgtgtctgacaccggccgctacgtgtgtgtggccgtgaatgtggccggcatgacagacaagaagtatgacctgtctgtgcacgcccctccttccatcatcggcaaccacaggagccctgagaacatctctgtggtggagaagaacagcgtgtccctgacctgtgaggccagcggcatccccctgcccagcatcacctggttcaaggatggctggcctgtgtccctgagcaacagcgtgcgcatcctgagcggcggccgcatgctgcggctgatgcagaccaccatggaggatgctggccagtacacctgtgtggtgagaaatgctgctggggaggagaggaagatcttcggcctgtctgtgctggtgcccccccacatcgtgggggagaacaccctggaggatgtgaaggtgaaggagaagcagagcgtgaccctgacctgtgaggtgacaggcaaccctgtgcctgagatcacctggcacaaggatggccagcccctgcaggaggatgaggcccaccacatcatcagcggcggccgcttcctgcagatcaccaacgtgcaggtgccccacacaggccgctacacctgcctggccagcagccctgctggccacaagagccgctccttcagcctgaatgtgtttgtgagccccaccatcgccggcgtgggcagtgatggcaacccagaagatgtgaccgtcatcctgaacagccccaccagcctggtgtgtgaggcctacagctaccccccagccaccatcacctggttcaaggatggcacccccctggagagcaacagaaacatccgcatcctgcccggcggccgcaccctgcagatcctgaatgcccaggaggacaatgccggccgctacagctgtgtggccaccaatgaggccggggagatgatcaagcactatgaggtgaaggtgtacatcccccccatcatcaacaagggggacctgtggggccctggcctgagccccaaggaggtgaagatcaaggtgaacaacaccctgaccctggagtgtgaggcctatgccatccccagcgccagcctgtcctggtacaaggatggccagcccctgaagagtgatgaccacgtgaacattgctgccaacggccacaccctgcagatcaaggaggcccagatcagtgacaccggccgctacacctgtgtggccagcaacattgctggagaagatgagctggactttgatgtgaacatccaggtgcccccatccttccagaagctgtgggagatcggcaacatgctggacaccggcagaaatggagaggccaaggatgtgatcatcaacaaccccatcagcctgtactgtgagaccaatgctgcccccccacccaccctgacctggtacaaggatggccaccccctgaccagcagtgacaaggtgctgatcctgcccggcggccgggtgctgcagatcccccgggccaaggtggaggatgctggccgctacacctgtgtggccgtgaatgaggccggggaggacagcctgcagtatgatgtgcgggtgctggtgccccccatcatcaagggggccaacagcgacctgcctgaggaggtgacagtgctggtgaacaagagcgccctgattgaatgtctgagcagcggcagccctgcccccagaaattcctggcagaaggatggccagcccctgctggaggatgaccaccacaagttcctgagcaatggccgcatcctgcagatcctgaacacccagatcacagacatcggccgctacgtgtgtgtggccgagaacacagctggcagcgccaagaagtacttcaacctgaatgtgcacgtgcccccatctgtgattggccccaagtctgagaacctgactgtggtggtgaacaacttcatcagcctgacctgtgaggtgtctggcttccccccaccagacctgtcctggctgaagaatgagcagcccatcaagctgaacaccaacaccctgattgtgcctgggggccgcaccctgcagatcatccgggccaaggtgtctgatggaggagagtacacctgcatcgccatcaaccaggccggggagagcaagaagaagttcagcctgactgtgtatgtgcccccatccatcaaggaccatgattctgagagcctgtctgtggtgaatgtgcgggagggcacctctgtgtccctggagtgtgagagcaatgctgtgcccccacctgtgatcacctggtacaagaatggccgcatgatcacagagagcacccacgtggagatcctggctgatggccagatgctgcacatcaagaaggccgaggtgtctgacaccggccagtatgtgtgccgggccatcaacgtggccggcagagatgacaagaacttccacctgaatgtgtatgtgccccccagcattgagggccctgagcgggaggtgattgtggagaccatcagcaaccctgtgaccctgacctgtgatgccaccggcatccccccacccaccatcgcctggctgaagaaccacaagagaattgaaaattctgacagcctggaggtgcgcatcctgagcggcggcagcaagctgcagatcgcccggagccagcacagcgacagcggcaactacacctgcatcgccagcaacatggagggcaaggcccagaagtactacttcctgagcatccaggtgccccccagcgtggccggggctgagatccccagtgatgtgtctgtgctgctgggggagaatgtggagctggtgtgcaatgccaacggcatccccacccccctcatccagtggctgaaggatggcaagcccatcgccagcggggagacagagcgcatccgggtgtctgccaacggcagcaccctgaacatctatggagccctgaccagtgacaccgggaagtacacctgtgtggccaccaacccagctggggaggaggaccgcatcttcaacctgaatgtgtatgtgacccccaccatccggggcaacaaggatgaagctgagaagctgatgaccctggtggacaccagcatcaacattgaatgtcgggccaccggcaccccaccaccccagatcaactggctgaagaatggcctgcccctgcccctgagcagccacatccggctgctggccgccggccaggtgatccgcatcgtgcgggcccaggtgtctgatgtggccgtgtacacctgtgtggccagcaacagagctggggtggacaacaagcactacaacctgcaggtgtttgccccacccaacatggacaacagcatgggcacagaggagatcaccgtgctgaagggcagcagcacctccatggcctgcatcacagatggcaccccagcccccagcatggcctggctgagagatggccagcccctgggcctggatgcccacctgactgtgtccacccacggcatggtgctgcagctgctgaaggccgagacagaagattctgggaagtacacctgcatcgccagcaatgaggccggggaggtgtccaagcacttcatcctgaaggtgctggagcccccccacatcaatggcagcgaggagcacgaggagatctctgtgattgtgaacaaccccctggagctgacctgcatcgccagcggcatcccagcccccaagatgacctggatgaaggatggccggcccctgccccagacagaccaggtgcagaccctgggcggcggggaggtgctgcgcatcagcacagcccaggtggaggacaccggccgctacacctgcctggccagcagccctgctggagatgatgacaaggagtacctggtgcgggtgcacgtgccccccaacattgctggaacagatgagccccgggacatcaccgtgctgaggaaccggcaggtgaccctggagtgcaagagtgatgctgtgcccccacctgtgatcacctggctgagaaatggagagcggctgcaggccaccccccgggtgcgcatcctgagcggcggccgctacctgcagatcaacaatgctgacctgggggacacagccaactacacctgtgtggccagcaacattgctgggaagaccacccgggagttcatcctgactgtgaatgtgccccccaacatcaagggcggcccccagagcctggtgatcctgctgaacaagagcacagtgctggagtgcatcgccgagggcgtgcccaccccccgcatcacctggaggaaggatggagctgtgctggccggcaaccacgcccgctacagcatcctggagaatggcttcctgcacatccagagcgcccacgtgacagacaccggccgctacctgtgcatggccaccaatgctgctggaacagacagaagaagaattgacctgcaggtgcacgtgcccccatccatcgcccctggccccaccaacatgaccgtcatcgtgaatgtgcagaccaccctggcctgtgaggccaccggcatccccaagcccagcatcaactggaggaagaatggccacctgctgaatgtggaccagaaccagaacagctaccgcctgctgagcagcggcagcctggtgatcatcagccccagcgtggatgacacagccacctatgaatgtactgtgaccaacggggctggagatgacaagaggacagtggacctgactgtgcaggtgccccccagcattgctgatgagcccacagacttcctggtgaccaagcacgccccagctgtgatcacctgcacagccagcggcgtgcccttccccagcatccactggaccaagaatggcatccggctgctgcccagaggagatggctaccgcatcctgagcagcggggccatcgagatcctggccacccagctgaaccacgccggccgctacacctgtgtggccagaaatgctgctggcagcgcccacagacatgtgaccctgcacgtgcatgagccccctgtgatccagccccagcccagcgagctgcacgtgatcctgaacaaccccatcctgctgccctgtgaggccaccggcacccccagccccttcatcacctggcagaaggagggcatcaacgtgaacaccagcggcagaaatcatgctgtgctgcccagcggcggcctgcagatcagcagagctgtgagagaagatgctggcacctacatgtgtgtggcccagaacccagctggaacagccctgggcaagatcaagctgaatgtgcaggtgccccctgtgatcagcccccacctgaaggagtatgtgattgctgtggacaagcccatcaccctgagctgtgaggctgatggcctgcccccaccagacatcacctggcacaaggatggccgggccatcgtggagagcatccggcagagggtgctgagcagcggcagcctgcagatcgcctttgtgcagcctggagatgctggccactacacctgcatggccgccaacgtggccggcagcagcagcaccagcaccaagctgactgtgcacgtgcccccacgcatccgcagcacagagggccactacacagtgaatgaaaacagccaggccatcctgccctgtgtggctgatggcatccccaccccagccatcaactggaagaaggacaacgtgctgctggccaacctgctgggcaagtacacagctgagccctatggagagctgatcctggagaatgtggtgctggaggacagcggcttctacacctgtgtggccaacaatgctgctggggaggacacccacacagtgtccctgactgtgcacgtgctgcccaccttcacagagctgcctggagatgtgtccctgaacaagggggagcagctgcggctgagctgcaaggccaccggcatccccctgcccaagctgacctggaccttcaacaacaacatcatcccagcccactttgacagcgtgaatggccacagcgagctggtgattgagcgggtgtccaaagaagattctggcacctacgtgtgcacagcagaaaattctgtgggctttgtgaaggccatcggctttgtgtatgtgaaggagccccctgtgttcaagggggactaccccagcaactggattgagcccctgggcggcaatgccatcctgaactgtgaggtgaagggggaccccacccccaccatccagtggaacaggaagggcgtggacatcgagatcagccaccgcatccggcagctgggcaatggcagcctggccatctatggaacagtgaatgaagatgctggggactacacctgtgtggccaccaatgaagctggggtggtggagaggtccatgagcctgaccctgcagagcccccccatcatcaccctggagcctgtggagaccgtcatcaatgccggcggcaagatcatcctgaactgccaggccaccggggagccccagcccaccatcacctggagccggcagggccacagcatctcctgggatgacagagtgaatgtgctgagcaacaacagcctgtacatcgcagatgcccagaaggaggacaccagcgagtttgaatgtgtggccaggaacctgatgggctctgtgctggtgcgggtgcctgtgattgtgcaggtgcatggaggcttcagccagtggagcgcctggagggcctgcagcgtgacctgtgggaagggcatccagaagaggagccggctgtgcaaccagcccctgcctgccaatggaggcaagccctgccagggcagtgacctggagatgaggaactgccagaacaagccctgccctgtggatggctcctggagcgagtggagcctgtgggaggagtgcaccaggagctgtggccggggcaaccagaccaggaccaggacctgcaacaaccccagcgtgcagcacggcggccggccctgtgagggcaatgctgtggagatcatcatgtgcaacatccggccctgccctgtgcatggagcctggagcgcctggcagccctggggcacctgcagcgagagctgtgggaagggcacccagacccgggcccggctgtgcaacaaccccccaccagcctttggaggcagctactgtgatggagctgagacccagatgcaggtgtgcaatgaaagaaactgccccatccacggcaagtgggccacctgggcctcctggagcgcctgcagcgtgtcctgtggcggcggggcccggcagaggacccggggctgcagcgaccctgtgccccagtatggaggcaggaaatgtgagggcagtgatgtgcagagcgacttctgcaacagcgacccctgccccacccacggcaactggagcccctggagcggctggggcacctgcagcaggacctgcaatggaggccagatgaggcgctaccgcacctgtgacaaccccccacccagcaatggaggccgggcctgtggcggccctgacagccagatccagcgctgcaacacagacatgtgccctgtggatggctcctggggctcctggcacagctggagccagtgcagcgccagctgtggcggcggggagaagaccaggaagaggctgtgtgaccaccctgtgcctgtgaagggcggccggccctgccctggggacaccacccaggtgacccgctgcaatgtgcaggcctgccctgggggcccccagagggcccggggcagcgtcatcggcaacatcaatgatgtggagtttggcatcgccttcctgaatgccaccatcacagacagccccaacagcgacacccgcatcatccgggccaagatcaccaacgtgcccaggagcctgggcagcgccatgaggaagatcgtgtccatcctgaaccccatctactggaccacagccaaggagattggagaggccgtgaatggcttcaccctgaccaatgctgtgttcaagcgggagacccaggtggagtttgccactggagagatcctgcagatgagccacatcgcccggggcctggacagtgatggcagcctgctgctggacatcgtggtgtctggctacgtgctgcagctgcagagccctgctgaggtgacagtgaaggactacacagaggactacatccagacaggccctggccagctgtatgcctacagcaccaggctcttcaccattgatggcatcagcatcccctacacctggaaccacacagtgttctatgaccaggcccagggccgcatgcccttcctggtggagaccctgcacgccagctctgtggagagtgactacaaccagatcgaggagaccctgggcttcaagatccacgccagcatcagcaaaggagacaggagcaaccagtgccccagcggcttcaccctggacagcgtgggccccttctgtgctgatgaagatgaatgtgccgccggcaacccctgcagccacagctgccacaatgccatgggcacctactactgcagctgccccaagggcctgaccatcgccgcagatggccgcacctgccaggacattgatgaatgtgccctgggccgccacacctgccacgccggccaggactgtgacaacaccatcggcagctaccgctgtgtggtgcgctgtggcagcggcttccggaggaccagtgatggcctgagctgccaggacatcaatgaatgccaggagagcagcccctgccaccagcgctgcttcaatgccatcggcagcttccactgcggctgtgagcccggctaccagctgaagggcaggaagtgcatggatgtgaatgaatgtcggcagaatgtgtgcaggccagaccagcactgcaagaacacccggggcggctacaagtgcatcgacctgtgccccaacggcatgaccaaggccgagaatggcacctgcattgatattgatgagtgcaaggatggcacccaccagtgccgctacaaccagatctgtgagaacacccggggcagctaccgctgtgtgtgcccccggggctaccgcagccagggcgtgggccggccctgcatggacattgatgaatgtgagaacacagatgcctgccagcacgagtgcaagaacaccttcggcagctaccagtgcatctgccccccaggctaccagctgacccacaacgggaagacctgccaggacattgatgagtgcctggagcagaatgtgcactgcggccccaacaggatgtgcttcaacatgaggggcagctaccagtgcatcgacaccccctgcccccccaactaccagagggaccctgtgtctggcttctgcctgaagaactgccccccaaatgacctggagtgtgccctgagcccctatgccctggagtacaagctggtgtccctgcccttcggcatcgccaccaaccaggacctgatccggctggtggcctacacccaggatggagtgatgcaccccaggaccaccttcctgatggtggatgaggagcagacagtgccctttgccctgagagatgagaacctgaagggcgtggtgtacaccacccggcccctgcgggaggccgagacctacaggatgagggtgcgggccagcagctacagcgccaacggcaccatcgagtaccagaccaccttcatcgtgtacatcgctgtgtctgcctacccctactag

SEQ ID NO: 299030 - DNA, 723 bp, Artificial Sequence
  derived and/or modified sequence
gccatcggcagcttccactgcggctgtgagcccggctaccagctgaagggcaggaagtgcatggatgtgaatgaatgtcggcagaatgtgtgcaggccagaccagcactgcaagaacacccggggcggctacaagtgcatcgacctgtgccccaacggcatgaccaaggccgagaatggcacctgcattgatattgatgagtgcaaggatggcacccaccagtgccgctacaaccagatctgtgagaacacccggggcagctaccgctgtgtgtgcccccggggctaccgcagccagggcgtgggccggccctgcatggacattgatgaatgtgagaacacagatgcctgccagcacgagtgcaagaacaccttcggcagctaccagtgcatctgccccccaggctaccagctgacccacaacgggaagacctgccaggacattgatgagtgcctggagcagaatgtgcactgcggccccaacaggatgtgcttcaacatgaggggcagctaccagtgcatcgacaccccctgcccccccaactaccagagggaccctgtgtctggcttctgcctgaagaactgccccccaaatgacctggagtgtgccctgagcccctatgccctggagtacaagctggtgtccctgcccttcggcatcgccaccaaccaggacctgatccggctggtggcctacacccaggatggagtgatgcacccctag

SEQ ID NO: 299031 - DNA, 16557 bp, Artificial Sequence
  derived and/or modified sequence
atgatcagctgggaggtggtgcacaccgtgttcctgttcgccctgctctactcctctcttgcccaggatgcttcccctcagagtgaaatccgggctgaggaaattcctgaaggggccagtaccttggcttttgtgttcgatgttaccggcagcatgtacgatgacttagttcaggtcatcgagggagctagcaaaatcctcgagacctcactgaagcggccaaagcgaccactgtttaacttcgctctggtgcccttccacgaccccgaaatcggacccgtaaccattacgacggatcccaaaaagtttcaatacgagctgcgcgaactttacgtgcagggaggaggcgactgcccggagatgtccattggagccattaagatcgctcttgaaatctccctgcctgggtctttcatttacgttttcacggatgctcgctcgaaagactacaggctaacccacgaagtgcttcagctcatccaacagaagcagtcacaggtcgtatttgttctgacaggagactgcgacgaccggacacacattgggtacaaagtatatgaggagatcgcctcgacatcctcaggtcaggtgttccacttggacaagaagcaggttaatgaggtcctgaagtgggtggaggaggctgtgcaggccagcaaagtgcacctcctgtctactgatcacttggaacaggccgtaaacacctggcggataccttttgatccctcccttaaggaagtgacagtgagcctatctggcccttctcccatgatagagatccgcaatccactgggcaagctcataaagaaaggtttcgggctgcacgaactactgaatatccacaatagcgcaaaagtcgtgaacgtcaaggagccagaggctggtatgtggacagtcaaaaccagctcttctggacgccattccgtccgaattacaggcttaagcacgatcgacttccgcgctggcttcagtcgcaaacctacacttgatttcaagaaaactgtttctagaccggtccaggggattcccacttatgtcctgcttaatacttctgggatctcaacgcccgctcggatagaccttcttgaactattaagcatatcgggctcctctttgaagaccatacctgtgaagtattatcctcaccgtaagccctacggcatatggaacatatccgactttgtccctccaaacgaagcattttttctgaaggttacaggatacgataaagacgattatctctttcaacgggtatcctctgtcagcttttctagtatagtgccagatgcccctaaagtgactatgcctgagaagactccagggtactatctccagcccggacaaattccctgttctgttgacagtttgctgccctttactctgagcttcgtgagaaatggcgtaactctcggagtggatcagtacctgaaagaatccgcctcggtgaatctggacattgctaaggtgaccctttctgatgaaggcttttatgaatgcatcgctgtgtccagcgcggggactggcagggctcagacttttttcgacgtgagcgagcctcctcccgtaattcaggtgcctaacaacgtgaccgtcacccccggggaaagggctgtactgacttgtctgatcatcagtgcagtggactacaatctgacatggcagagaaacgatcgagatgtccgcttggccgagcccgcccgaattagaactctagcaaacctgtctctggaacttaagagtgttaaatttaatgacgccggagaataccattgtatggtaagttccgagggaggctcttcagccgcatcagtgtttctgaccgtgcaggagcccccaaaggtgaccgttatgcctaaaaaccagagcttcacgggagggagcgaagttagtataatgtgctctgccacaggctaccccaaacctaaaattgcatggacagtgaatgacatgttcatcgtcggcagccataggtacagaatgacaagcgatgggactctattcatcaaaaatgccgcacccaaagacgcaggcatctacggttgcctcgcatcgaattcagcaggtaccgacaagcaaaacagcaccctgcgctacatcgaggcccctaagttgatggttgtacagtcagagctcctggtggccctcggggatatcactgtcatggagtgcaaaacctccgggattccccccccacaagtaaagtggttcaagggcgatctggagctgcgcccctcaacattcttaatcatagaccctctgctgggtcttctgaagatccaggagacacaggacctggacgcgggggactacacctgtgtagctatcaacgaagccggacgcgccacaggcaagatcacattagacgtggggtcaccacccgtctttatccaggaacctgctgatgtctctatggaaatagggtccaatgtcacactaccttgttacgtacagggctatccggagcccaccatcaagtggaggcggcttgacaacatgcctatatttagcaggccttttagtgtgtccagcatctcgcagctgaggacaggtgcgctgtttatcttgaacttatgggctagtgacaaagggacctacatttgtgaggcagaaaaccagtttgggaaaatacagtctgaaacgacagttactgtgaccggcctggtcgctccactgatcggtattagcccatccgtggctaacgtcattgaaggacagcaacttacacttccgtgtacattgctggccgggaaccccatcccagaaagacggtggattaagaatagcgcgatgttgttgcagaatccctatatcacagtcaggtccgatggaagcctgcatatcgaacgggtacaattacaagacggtggggagtacacctgtgtggccagtaatgtggccggcacaaataataagacgaccagcgtggttgtgcacgtgttacccacaatccaacatggccagcaaatcctgtctacgattgaagggataccagttacactcccttgtaaggcttccgggaaccctaaaccctctgtgatatggagcaagaagggtgagctcattagtacttccagtgcaaaatttagtgcaggtgctgacggttctctgtacgtggtgtctccagggggggaggagagcggagaatatgtctgcacggcaaccaacactgctgggtacgctaagcgcaaggtacagctcaccgtctacgtgagacctagagtgtttggcgatcagcgtgggctcagtcaggacaagccagtcgagatcagcgtcttggctggcgaggaggttaccctgccgtgcgaagtgaagtcactgccaccgcccatcattacatgggccaaagaaacccagttaatctcacccttctctccccggcatacctttctgccgtccggctcaatgaagatcacagaaactaggacctcggacagcggcatgtatctgtgcgtcgcgacaaatatagctggcaatgttacacaagcagtgaaactgaacgtgcacgtgccgccaaagattcagcgcggcccgaaacacctgaaagtgcaggttggacaaagggtcgatatcccctgtaacgcccagggcacccccctcccggtgattacctggtcaaaaggcggtagtaccatgttagtcgatggagaacatcatgtgtctaatcccgacggtaccctgtcaattgaccaagccacacccagtgacgccgggatctacacatgtgttgccaccaatattgccggcactgatgaaacagaaattacgctacacgtgcaggagccccccaccgtggaagatttggagcctccttataataccacctttcaggagcgcgtcgctaatcagcgcattgagtttccctgtccagccaaaggtacccctaaacccaccatcaagtggctccataacgggcgcgagcttaccggacgcgagcctggtatctctattcttgaagacggcacattgttagtaattgcgtccgtcaccccttacgataacggcgagtatatttgtgtggcagtaaatgaggccggtacaaccgagcgtaaatataaccttaaagtgcatgttccaccggtgatcaaggataaggagcaggttactaatgtatcagtgttgctaaatcaactgaccaatctgttctgtgaggttgaaggtacgccctcgcccataatcatgtggtacaaggacaatgttcaggtaaccgagagttcaacgatacagaccgtgaacaatggcaaaatccttaaattgttccgcgctactcctgaggatgcggggcgatatagctgcaaggctattaatattgcgggcacctcccaaaaatactttaacatcgatgtccttgtaccgccaacaatcattggcactaactttcccaatgaagtgtctgtggtactcaatagagacgtggctctggaatgccaggtgaaaggcacacccttccctgatattcactggttcaaggatggtaagcctttgttcttgggagaccccaatgtcgagctcctggaccgcgggcaggtgttgcacttgaaaaatgctagacgtaatgacaaagggcgctaccagtgcaccgtcagcaacgcggctggcaaacaagctaaagacattaagttaacaatctatattcctccttctattaagggtggcaacgttaccaccgatatctccgtgctgatcaatagcctgatcaaacttgaatgcgagacacggggcctgccaatgccagcaattacatggtataaggatggccagcccatcatgtccagctctcaagcgctgtatatagacaaaggacagtatctgcatatcccacgcgcccaggtcagtgatagcgcaacatacacttgtcacgtggccaatgttgctggaaccgcagagaagagtttccacgtggacgtgtacgtcccacccatgatcgagggtaatctcgctacgcccttaaataagcaggtggttatcgcccattccctgactctggaatgtaaggccgcgggaaatccgagtcctatcctgacctggttaaaagatggcgtgcccgttaaggctaacgataacatacgcatcgaggcgggcgggaagaaactggaaattatgtcggctcaggaaatcgataggggccagtacatttgtgtggccacttctgtggctggcgagaaagagatcaaatatgaggtggacgttcttgtgcctcctgctattgaaggtggagacgaaacatcttacttcattgtgatggttaacaacttactcgagctggactgtcacgtgactggatcaccccccccaaccatcatgtggctgaaagacggccagctgatcgatgagagggacgggttcaagattctcttgaatggccgtaagctggtgatagcccaggctcaagttagcaataccggattgtataggtgtatggcagctaataccgcaggcgatcacaagaaggaattcgaggtgacagttcacgtgccgccgaccatcaaaagtagtgggttgtccgaacgggtggtcgtgaagtacaagcccgtggctcttcagtgtatagctaatggcattcctaaccccagcataacgtggttgaaagatgaccaaccagtgaataccgcccaggggaatctgaaaattcagtcctcaggtcgggtactccagatcgccaagaccctccttgaggatgccgggcgatacacttgtgtggctaccaacgccgcaggagagacccagcaacacattcagttgcacgttcacgagcctcccagtctggaagatgccggcaagatgctcaatgaaaccgtgttggtgtctaaccccgttcagttggaatgcaaagccgctggaaatcccgtgcccgtgatcacttggtataaagataatcgtttgttatctggctcaacaagcatgacctttctgaaccggggacagataattgacattgaaagcgcccaaataagtgacgccggtatttacaagtgtgttgctatcaatagcgccggcgctaccgagcttttctacagtctgcaggttcatgtggccccatctatatcagggagcaataatatggtcgcagtagtggtgaacaacccagttcggctggagtgtgaagctcggggtatcccggcgcctagccttacctggctgaaagacgggtcccctgtgtcatctttctccaatggactacaggtcctgtctggcggtcgcatactcgcactcacaagcgctcagatcagtgataccggcagatacacctgtgtggccgtgaatgccgccggagaaaagcagagggatatagatttgcgagtgtacgtgccccctaatatcatgggtgaggaacaaaatgtgtctgtgctgatttctcaggcagtcgaactgctgtgccagagcgacgcaattccccctcctacactgacatggctgaaagacggacatcctctcctgaagaagcccggtctttccatttctgagaaccggagtgtcctgaaaattgaggatgcacaggtccaagataccggccgttacacttgcgaagcaaccaacgtggctggaaagaccgaaaagaactataatgtgaatatctgggtgcccccaaacatcggtggatccgacgagttgactcaattgaccgttattgagggaaacctaataagccttctctgcgagagttccggaattccccctccaaatctgatctggaagaagaagggatcacccgttctgaccgattctatgggtcgagtgcgaatcctgtcgggggggagacaattacagatcagtatcgccgagaagtcggatgcagctctgtactcttgcgtcgcctcaaacgtggctggcaccgcaaaaaaggagtacaacctgcaggtgtatatccgccccactataacaaattccggttctcacccgaccgagatcattgtgacacgggggaagtccattagtctggagtgtgaggtgcagggcatcccccccccaaccgtcacttggatgaaggacggtcacccactaatcaaggccaagggcgtggagatcctagatgagggacatatcctgcagcttaagaacattcatgtttctgacactggacgttatgtgtgcgtggccgttaatgtcgcggggatgaccgataagaagtacgatctctcagtacatgcccccccttctattattggaaaccacaggtcgccagaaaatatttcagtagtggagaagaattctgtgagcctcacctgtgaggcctcaggaatccccctgccttcgattacgtggttcaaggatggctggcccgtgagcctgtctaactccgtgcggattcttagcggcggaagaatgctgagacttatgcagacaacgatggaggacgccggtcaatatacctgtgtggtcaggaatgctgccggcgaagagagaaagatcttcgggcttagtgtccttgttccaccgcacatcgtgggcgagaataccctcgaggatgtgaaagtaaaggaaaagcagagcgtgaccctcacttgtgaagttaccggaaatcctgtgcctgaaattacatggcacaaggacggccagcctcttcaggaagacgaggcccaccatatcatatccggcggccgattcttacaaatcactaacgtgcaggtgcctcataccggtagatatacctgtctcgcatccagccccgccggacacaagagtcgctccttttcactgaacgtattcgttagtcctacgatagcaggcgtcgggagtgatggcaatccagaggatgtgacggtgattctgaattcccccactagcctggtgtgtgaagcctattcttatccccctgcaaccatcacatggttcaaggacgggactcctcttgagtccaataggaacattcggatccttccggggggaagaactctccagatcctcaacgcccaagaagataacgctggtcggtactcgtgtgtggccaccaacgaggcgggggagatgataaagcattacgaggtgaaagtgtatattcctcctatcatcaataaaggagatttatgggggcctggtctctctcccaaggaagtgaaaatcaaggtaaacaatacactgactcttgagtgtgaggcctacgctattccctccgcttccctgtcctggtataaggatggacagcctctcaaatctgacgaccacgtgaatatcgccgcgaacggacacacattacagattaaagaggctcagatcagcgataccggcaggtacacctgcgtggcatccaacatagcaggggaggacgagctcgatttcgacgtgaacatccaagtgccacccagcttccaaaaactctgggaaattggcaacatgctcgacacgggccggaacggagaggccaaagacgtgatcattaataatcctatttcactttattgtgagacaaacgcagcccctccacctaccctcacttggtacaaagatggccatccgctaactagcagcgataaggtgctgattctccccgggggtcgagtgctccaaattcctcgagctaaggttgaggacgccgggagatacacatgtgtggccgtgaacgaagccggtgaggattcgctccaatatgatgtcagagtgcttgtacctcccattatcaagggcgctaatagcgatttgcccgaagaggtaaccgtattagtgaataaaagtgccttgatcgaatgtttaagttcggggagccccgcccctagaaattcctggcaaaaggacggtcagccgctgctcgaggatgaccaccacaagtttctgtcaaatggacggatcttacagatcctgaacactcaaatcacggacatcggcaggtacgtctgcgtcgccgagaacaccgctggttctgccaaaaaatacttcaacttgaatgtgcacgtccctcctagtgtgatcggcccaaaaagcgaaaacctgacggtggtcgtcaacaatttcatcagcttgacttgcgaggtgtcaggattcccacctccagacctctcatggctcaagaatgaacagccaattaaactgaatactaatacacttatcgttccaggtggccgcaccttgcagattatccgtgccaaagtttccgatggcggggaatatacttgcatcgctatcaatcaggctggcgaaagcaaaaagaagttcagtttaactgtttacgtccctccctccattaaggaccatgacagtgaatcacttagtgtggtgaacgtgagggagggcactagtgtgtccctcgaatgtgagagcaacgccgtgcccccacccgtgatcacatggtataagaacgggaggatgataacagagagtacacatgtggagatcctcgccgatggccagatgctccatattaagaaagctgaggtgagtgatacaggtcagtatgtctgtcgagctatcaacgtcgcgggacgagacgataaaaacttccacctaaatgtgtatgtgccaccaagcatagagggaccagaacgtgaggtgatcgttgagacaatttccaaccccgttacgctgacctgcgacgccaccggtattccgccccccaccatagcttggcttaagaaccataagaggattgaaaacagtgactctctggaagtgaggatactgtctggtggttctaagctgcagattgcgcgcagccagcattcggactcaggaaattacacgtgtattgcctctaatatggagggaaaagcacagaagtactacttcctgtctatccaggttcctccctccgttgcaggagcagagataccaagcgacgtgagtgtcctgctgggggaaaacgtggagttggtgtgcaacgcaaatggcattcctacgcctcttatccagtggctcaaggacggtaagcccattgcttccggcgagactgaacggattcgcgtgagcgcgaacggatctacactgaacatatatggcgcgctgacctccgacacaggaaaatatacctgcgtggcaacaaaccctgcaggggaggaggacagaatcttcaaccttaatgtttatgttactcctacaattcggggcaataaggacgaagcggagaagttgatgaccttggtggacacgtctatcaatattgagtgtagagcaacgggcacacctcccccgcaaattaactggttaaagaatggcctgccgcttccactgtcctcacacatccggcttttagctgcagggcaagtaatccgtatcgtgcgtgcacaggtttccgatgtggcagtgtacacctgtgtggcctctaacagagccggagtggacaataaacactacaatctccaggtgttcgcgcctcctaatatggataactccatggggacggaagaaattaccgtcttaaagggctcttctacgagcatggcttgtataacagacggcaccccagcgccctctatggcctggctgcgtgacgggcagcctctgggattggacgcacacctcaccgtgagcacccacggaatggtgctgcagttgcttaaagctgaaaccgaggacagtggaaaatacacctgcattgcctcaaacgaagcaggtgaagtgagcaagcacttcatccttaaagttctggagcccccgcatattaacggatctgaagagcacgaagagattagtgtgatcgtgaataatccgttggagttaacgtgcatcgcatctgggattcccgcccctaagatgacctggatgaaagacggtcgccccctgcctcagaccgaccaggtgcaaacgttaggaggtggcgaggtcttacgcatatctaccgcacaggtggaagatacaggtaggtacacctgcctagcctcctctcccgcaggtgatgatgataaggaatatctggtacgggtgcacgttcctcccaatattgccgggactgatgagccgcgagacatcacagtgcttcggaatcggcaagtgacgctcgaatgcaagtccgacgcagttcctccaccagtgatcacctggctcaggaatggcgagaggctgcaagctaccccgagagtgaggatcctatcgggggggcggtatctacagattaacaacgcagatcttggcgacacagcaaactacacttgcgtcgcctccaacatcgccgggaagacaactcgagaattcatcttaacagtaaatgtgccccccaacatcaaaggcggcccccaaagtctggttatactcctaaacaagtcaactgtgctggagtgcatcgccgaaggcgtcccgaccccacggattacttggcgtaaggacggagccgttctggcaggaaaccacgccaggtactcaattttagagaacggcttccttcatatccagagcgcacacgtaacggacaccggtcgatacttgtgcatggccacaaatgcagctgggaccgataggcggagaatagacctccaagtacacgtgcccccaagtatcgcacctggacctacaaatatgacagtcatcgtgaatgtgcaaactaccttggcatgcgaggccacagggataccaaaaccgagtatcaactggcggaagaacggacatctgctcaacgtggaccagaatcagaattcctaccgcctgctgagttcagggagcctagttattataagtccatccgttgacgacacagcgacttacgaatgtactgtcaccaacggcgcgggcgatgacaagcggacggttgatctaacagttcaggtgcctcccagcatcgccgatgaaccaaccgacttcctggtgacaaaacatgcaccagccgttataacgtgtaccgcctcaggggttccatttccgtccatacactggaccaaaaacgggattcgactactcccccgcggtgacggctaccgcatcctgtcatccggcgcaatcgagattctcgccactcagctgaatcacgcgggccggtatacatgcgtcgcacgaaatgctgccggatcggcacaccgccatgtcacacttcacgtgcacgagcccccagtgatccaacctcagcccagtgagctacatgtgattctgaacaacccaatcttgctgccctgtgaggccaccggaacccctagtccgttcatcacctggcagaaggaaggtatcaacgtgaacacaagcggaagaaaccacgccgttctgccttccggagggctgcagatctcccgggcggtgcgtgaggacgctgggacgtatatgtgtgtagctcagaatccagccggcacagccctcggaaagattaagctgaacgtgcaggtcccccccgttatcagcccccatctcaaggagtacgtgattgctgtcgataaacctatcactctgtcctgtgaagctgacgggctgccacccccagacattacttggcacaaggacggtcgtgctatcgtggaaagtattcgccagagggtcctgtcatcgggaagcctgcagatcgcctttgtccagccaggagacgcaggccattacacatgcatggcagctaacgtcgccggcagcagttccactagtaccaagctcaccgtccacgtgcctccacgcatcagatctacagaaggccactacacggtcaacgaaaattcgcaagcaatattgccgtgcgtggctgatggcatccccacacccgcgataaattggaagaaagacaacgttttgctggcaaatctacttggcaaatataccgctgaaccctacggggagctgatactagaaaacgtggtactggaagatagtggcttttacacttgcgtggccaacaacgccgcaggggaggacacgcacactgtatccttgactgtccacgtgttgccaacgtttactgagctgcctggggatgtctccctgaataagggcgagcagctccggcttagctgcaaggccacgggcatacctcttcctaagctgacatggacatttaacaataatattatcccagcacattttgattccgtgaatgggcactccgaactcgtgattgagagggtcagtaaagaggatagtgggacttatgtctgtacagcggaaaattcggtaggctttgttaaggccatcggcttcgtttatgtcaaggaaccacctgtgttcaagggggactacccatctaattggattgagccactgggcggcaacgcaatactgaattgtgaggtcaagggtgaccccacccccacaattcagtggaacaggaaaggagtggatatcgagatctctcatagaatccgccagctgggcaacgggtcattggccatctacggcaccgtgaatgaagacgcaggcgactatacctgtgttgcaaccaacgaagctggcgtggtggagcgctctatgagcctcactttacagtctcctcccatcattaccctggagccagtagagactgtgattaatgcaggaggcaaaattatccttaactgtcaggctacaggggagccccagcccactattacgtggagccgtcaaggacatagcatctcttgggacgaccgggtgaatgtcctctccaataactctctctacatagcagacgcacagaaggaagatacaagtgagttcgaatgtgtggctaggaatctaatgggatccgtgctggtccgcgtgcccgttattgtccaggtacacgggggctttagtcaatggtccgcctggcgggcgtgctctgtgacctgcggcaaagggattcagaagcggtccaggctgtgcaaccagccactgccagcaaacggaggcaagccctgccaaggatcggatctcgaaatgcggaactgccagaataaaccatgtcctgtggacgggtcttggtcggagtggtccctgtgggaggagtgcacccgtagttgcgggcgaggcaatcagactcggaccagaacatgcaacaacccctcagttcagcacggcggtagaccatgtgagggtaacgcagtcgaaataatcatgtgcaatataaggccctgccctgttcacggagcttggtctgcctggcagccttggggaacttgctccgagtcttgcggaaaggggacccagacccgggcaagattgtgcaacaaccccccacccgcctttggcgggtcctattgtgacggcgctgagacgcagatgcaggtttgcaatgaacgaaattgtcccattcacggaaagtgggcgacctgggccagttggtcagcatgtagcgtctcatgcggcggaggggcaagacaacgcactaggggctgcagcgacccagttccacaatatggcggcaggaaatgcgaaggctcggatgtacagagtgacttctgcaacagtgatccttgtcctactcacggtaactggagtccatggtccgggtggggcacctgcagtcggacgtgcaatggagggcagatgagaaggtaccggacttgcgacaatccaccccctagcaatgggggacgtgcatgtggtggaccagatagccaaattcaaaggtgcaacaccgacatgtgtccagtggacggctcgtggggatcatggcactcatggagccagtgctcagcaagctgtggagggggtgagaaaaccaggaagcggctgtgtgaccaccccgtgccagtaaagggaggtaggccatgtcccggcgacaccacacaggtcacccgctgtaacgtacaagcatgccctggcggacctcagcgagctcgtggcagcgtcattggtaatattaacgatgtcgagttcgggatagcttttctaaacgcaactatcacagattcaccaaactctgacaccagaatcataagagctaagatcactaacgttcccagatccctaggaagcgctatgaggaagatagtgtccatcctgaatccgatttactggactactgccaaggagatcggcgaagcagtgaatggattcactctgacgaacgccgttttcaaacgggagacccaagtagaatttgcaactggcgagatcttacagatgtcacatatagcacgagggttggactccgatggttccctgctgttagatatagtggtgagcggatacgtgcttcagctgcagagtccagcggaggtcactgtgaaggactacactgaggactacatccagaccggaccagggcaattgtatgcatatagcacaagattattcactattgacgggattagcatcccttacacctggaatcatacagtgttctatgaccaagctcagggacggatgccgtttctggtggaaacactgcacgccagtagcgttgaatctgactataaccagatcgaagagaccctcggctttaaaattcacgccagcatctctaaaggcgaccggagcaaccagtgtccaagcggcttcactctggattccgtcggccccttttgcgctgatgaagacgaatgtgccgctggtaacccctgtagccactcatgtcataacgctatgggaacctactattgttcctgccccaaaggtctcacaatcgccgcggatggacgaacctgtcaggatatagacgaatgtgcactaggcagacatacatgtcacgctggccaagattgcgacaataccatcggcagttataggtgcgtggtgaggtgcggttcggggtttcgccgcacttcagatgggttgtcttgtcaggatataaacgagtgccaggagagttccccttgtcatcaacgctgctttaatgccatcggatccttccactgcgggtgtgagcctgggtatcagttgaagggacgtaaatgtatggacgttaatgagtgcagacagaatgtgtgtcggcccgaccaacactgtaaaaatacccgcggaggttacaagtgcattgacctgtgccctaatggcatgaccaaagccgagaatgggacatgtattgacatcgatgagtgtaaagacggaactcaccagtgtcgatacaaccaaatatgtgaaaatacgcgaggatcctaccgctgcgtttgtccacggggttaccgttcccagggtgtgggacggccttgtatggacatcgatgagtgcgagaatacagacgcttgtcagcacgaatgcaagaatacatttggttcctaccagtgcatatgcccccctggatatcagctcacccataacggtaagacgtgtcaagatattgacgagtgcctggaacagaacgtacactgcggaccaaacaggatgtgctttaatatgcgaggcagctatcagtgcattgacactccttgtccaccaaactatcaaagagacccagtctcgggcttttgtctgaaaaactgccctccaaacgacttagaatgtgctttgtctccctatgctctagagtataagttagtgagcctccctttcgggatcgccacaaaccaagacctgattaggttggtggcgtacacgcaagatggcgtaatgcacccccgcactacattcctgatggtggatgaggaacagactgtcccgtttgctctgcgggatgagaacctgaaaggggtcgtgtatactacccgccccctgagagaggccgagacttatagaatgcgcgtgcgggcatcgtcctattccgccaatggcaccattgagtatcagacgacctttattgtgtatattgcggtaagtgcttacccgtattag

SEQ ID NO: 299032 - DNA, 723 bp, Artificial Sequence
  derived and/or modified sequence
gccatcggcagcttccactgcggctgcgagcccggctaccagctgaagggacgaaagtgcatggatgtgaacgagtgtcgccagaacgtctgtcggcccgatcagcactgcaagaacaccagaggtgggtataagtgtattgacctctgccccaatggcatgacaaaggccgagaacggcacgtgtattgacatagacgagtgtaaagacgggacacaccagtgtcgttacaaccagatatgcgaaaatacccgggggtcataccgctgcgtgtgccctagggggtatcggagtcagggcgtggggagaccctgtatggatattgatgaatgcgaaaacacagatgcttgccagcatgagtgcaaaaatactttcgggagctaccagtgcatctgtcctccaggataccagctcacgcacaacggaaaaacctgtcaggatatcgacgaatgtctggagcagaacgttcactgcggccccaaccgaatgtgctttaatatgcgcgggagttaccagtgcatcgataccccctgcccacccaactatcaacgggacccagtgagcgggttttgcctgaagaactgtccacctaatgatctggaatgcgcacttagcccttatgccctcgaatataaactggtgtcactccctttcggcatcgccactaatcaggacctcatccgcctggtcgcatatactcaggacggagtgatgcacccatag

SEQ ID NO: 299033 - DNA, 16556 bp, Artificial Sequence
  derived and/or modified sequence
atgatttcctgggaagtcgtgcacaccgtttttctgttcgccctcctgtactcctctctggcccaggacgccagtccccaatccgagatcagggcagaagagataccagagggtgctagcacccttgcctttgttttcgacgtcacggggtccatgtacgatgatctggtccaagtaatagaaggtgcctccaagattcttgagacctcgctgaaacgccctaagcgtccactcttcaattttgccctagtacccttccacgatcctgagattggccctgtgactatcaccacagaccccaaaaagtttcaatacgagctgcgggagctctacgtacagggcggaggagattgtccagagatgtctatcggggctatcaaaattgcattggaaatctctctgcccggaagttttatttacgtattcacggacgcccgaagcaaagattacagactcactcatgaggtactacaactgatccaacagaaacagagccaggtggtgtttgtcctaaccggggattgcgacgaccggacgcatatcggatataaagtatatgaagaaatcgcgagcacttccagtggccaagtcttccacctggataagaagcaagttaatgaagtcctgaaatgggtggaggaggccgttcaagctagcaaggtgcatctcctttccacggaccatcttgagcaggccgtaaatacttggcggatcccatttgatccaagccttaaagaggtcacggtctctttatccggccctagcccaatgatcgaaataagaaatccgcttggcaagctaatcaaaaagggctttggactgcatgaactgcttaacatccacaattccgctaaggttgtgaacgttaaggaaccagaagcagggatgtggaccgtcaagactagctcttccgggaggcacagcgttcggatcactggtttatcaaccatcgatttccgggctggcttcagccgaaaacctactttagatttcaagaagacggtgtcacgcccagtgcaaggaattcccacatacgtgttactgaatacttctggcattagcacccctgccaggatagacttactggagctgctgagcatctcaggatcatctctgaaaactattcccgttaagtattatcctcatcggaagccctatggcatatggaacatcagcgacttcgttcctcctaacgaggccttcttcttgaaagtaaccggatatgataaggacgactacctgttccaaagggtctccagcgtaagttttagttccatcgtaccagacgcccctaaggtgacgatgccagaaaagactcctggctattatctgcagccagggcagatcccttgctccgtcgattctctccttccgttcacgctatctttcgtgcgaaatggcgtgaccctgggtgttgaccagtacctgaaagaaagcgccagtgtgaatctcgacatagcaaaggtcaccttgagcgacgagggattttatgagtgcatcgccgtctcctccgccggaaccggcagggcccagacgttctttgatgtgtccgagccccctccagtcatacaggtgcctaacaatgtgactgtgacaccaggcgagagggcagtcctgacatgtctcatcatttcagccgtggactacaacctcacgtggcagagaaacgatcgtgatgttaggctcgcggagccagcgagaatcagaaccctggctaacttgtctctggaactgaagtcagtgaagtttaatgatgcaggcgagtaccactgcatggtctcttccgaaggcggatcttctgctgcttccgtgtttctaacagtgcaggaaccgccaaaggttaccgtaatgcccaaaaatcagagtttcactggcggatctgaggtgagtatcatgtgtagtgcaaccggataccccaagcccaagattgcgtggaccgtgaatgacatgtttatcgtgggttctcaccggtacaggatgacttcagacggcaccctattcatcaagaatgccgctcctaaagatgcaggcatttatgggtgccttgcctcaaattcagcaggtaccgataaacagaattctacacttcgatatatagaagctccaaaactcatggtggtgcagagtgaacttctggtggcactgggagatattactgtgatggagtgcaagacatctggcatccctccgccacaggtcaagtggtttaagggcgatctggagctgcgacccagtacgttcttaatcatcgatcccttacttggtctcctgaaaatacaggagacacaggacctcgatgcgggtgattacacctgcgtggctatcaatgaagccggtagggcaactggaaaaataacattggatgtggggtcgccccctgtctttatacaggaaccagctgatgtgagtatggagataggaagcaatgttaccctcccctgttacgtgcaaggctaccccgaacctaccattaagtggcgcagactcgacaatatgcctatcttcagcaggccattttcagtcagttctatatcgcagctgcgaaccggggcactctttatattgaatctatgggcctcagataaaggcacttatatctgtgaggcagaaaaccagtttggaaagatccaatcagagacgacagtgaccgtcacgggcctggtggccccactgattgggatttcaccttctgtggccaacgtcatagagggccagcaactgactctgccctgtaccttgctggccggaaaccccatcccagagcgaaggtggatcaaaaatagtgcaatgttattacagaatccttacatcacagtgaggagcgatggatctttgcacatcgagcgggtgcagctgcaggatggcggagagtatacttgcgtcgcctccaatgttgccggaaccaataataagaccacctcggtggtggttcatgtcctcccaactatccagcacggccagcaaatcctgtctaccatcgaagggattccggtcacgctcccatgtaaggcctccggaaaccccaagccatcggttatctggagcaagaaaggcgagctgatcagcacatccagcgccaagttctcagcgggtgcagatgggagtttgtacgtggtgagtccaggaggtgaagagtcaggggaatacgtgtgcacagctaccaacacagcaggctatgctaaaaggaaagtacagctgactgtatacgttaggccccgtgtgtttggtgaccagaggggcttgtctcaagataaaccagtggaaatctccgtgctagccggagaagaagtcactctaccctgcgaagtgaagtcactgcccccacctataattacctgggccaaggaaacccagctcatttcacctttttccccgaggcatacctttctaccaagcggaagcatgaagataacagaaactcgtaccagtgatagcggaatgtatttatgcgtagctacgaacattgccggaaacgtaacccaggccgtcaaactgaatgtgcatgtgcccccaaagatccagcgaggacctaaacatctgaaagtgcaggtcggacagcgggtggacatcccatgcaatgcacagggcacacctctgccggttatcacctggtcaaagggagggtccacgatgctcgtcgacggggaacatcacgtgagtaaccccgacggaacactgagtattgaccaggctaccccctcagatgctggaatctatacttgcgtggccactaatattgccggtaccgacgaaacagagattaccctgcatgttcaggagcctccgaccgtggaggacctagagccaccctataacacaacattccaggagcgggtcgccaatcaaagaatcgaatttccgtgtcccgcaaaggggacgcccaaacctaccattaaatggttacataacggacgtgagctcacaggacgcgaaccgggaatatctattcttgaggatgggactctccttgtgatcgcctcggtgaccccttatgataatggagaatacatctgcgtggccgttaatgaagccggtacaaccgagagaaaatataatctcaaagtccatgtacctccggtgataaaggataaggaacaggtcactaacgtaagcgttcttcttaaccagctgaccaacctcttctgtgaagtcgagggaaccccatcaccaattataatgtggtacaaagataacgtacaggtgacagaatcgagcaccatccagaccgtcaataacggaaaaattctgaagctgtttagggctaccccagaggatgcaggtaggtatagttgcaaagcgataaacattgccggaacttcccagaaatacttcaatattgacgttctggtcccacccaccatcatcggtacaaatttcccgaacgaggtgtccgtagtgctgaaccgcgacgtggctctggagtgccaggtgaaagggaccccttttcctgacatccattggtttaaagatgggaagccactgtttctgggggatccaaatgtggaactgttagataggggtcaagtgctgcacttaaagaacgctaggaggaacgataaaggtagataccagtgcaccgtctccaacgcagcgggaaagcaagcgaaggatataaagctgactatctacattccacctagtattaagggagggaacgtgaccactgacatctccgtcctgataaactcccttatcaagttagagtgcgagacacggggattgcctatgccagccattacatggtacaaggacggacagcccatcatgagttcaagccaggcattatacattgataagggccagtatttacatatcccacgcgcacaggtgtcagacagcgcaacatacacttgccacgtcgctaacgttgcgggaacagccgagaaaagttttcacgtggatgtgtacgtgccccctatgatagagggaaatctagcaacccccttgaacaagcaggtcgtaatcgcacattctctgacattggagtgcaaggccgctggtaatccgtcaccaattttaacttggctgaaggacggagtgccagtgaaggctaatgacaacatacgcatcgaggccggtgggaaaaaactggagatcatgagtgcacaggaaatcgatcgcggacagtacatttgcgtggcaacctctgtcgcaggtgagaaagagatcaagtacgaagtggatgtgctagtgccacccgctattgaaggaggtgatgagaccagctactttattgtgatggtcaataaccttcttgagttggattgccacgttacaggcagccctccccctaccattatgtggctaaaagatgggcaacttattgatgagagggatgggtttaaaatcctgttaaatggcagaaagcttgtgatagcacaagcccaggtgtccaataccggtctctaccggtgcatggcggctaatactgccggagaccacaaaaaagaattcgaggtgacagtacatgtgcctcccacaattaaaagctcgggtctgagcgagagagtcgtcgttaagtacaagcctgtggctctgcagtgcattgccaatggcatccctaaccctagcataacctggttaaaagatgaccagcctgttaatacagcccagggcaatctcaagatccaatcatcaggcagagtgctccagatcgccaaaacactccttgaagatgcgggtcgatacacctgcgtggctaccaacgctgctggggagacgcagcagcatatccaactgcacgtgcacgagcctcctagtctggaagacgcaggcaagatgcttaatgaaacggtgctggtgtctaatccagtccagcttgaatgtaaggccgctgggaaccctgtgcccgtaattacatggtacaaggataaccgtctcttgtctgggtccacctccatgacatttctgaaccgcggacaaatcatcgatatcgaatctgcacagatttcagatgctggtatctacaagtgtgtggccataaattcggcaggagccaccgagctgttctacagcttgcaagtgcacgttgctccaagcatcagcggtagtaacaatatggtagcggtggtggtcaacaatcctgtccgccttgagtgcgaggcccgagggatccctgccccatccttgacttggctcaaagacggctctccggtcagcagtttctccaatggtttgcaagtcctgagcggaggaaggattcttgcgcttacaagtgctcagatatctgatacaggaaggtatacctgtgtagccgttaacgcggctggtgagaaacagcgcgatatcgatctccgcgtgtacgtgcctcccaacataatgggagaagagcagaacgtctctgtgctcatttcacaggcagtggaattgctttgccagtccgacgccattccgcctccgactctcacgtggctcaaagatggccaccctctcctcaaaaagccgggtctcagcatctctgaaaatcgcagcgtcctgaagattgaggacgcccaagtccaggacacagggagatacacatgtgaggcgaccaatgtggcgggaaagacggagaagaactacaatgtcaacatatgggttccccctaacataggtgggagtgacgaactcacccagctgacggttatcgagggcaatctcattagcttgttgtgcgaaagtagcggcatcccccctccgaaccttatctggaagaaaaaagggtcccccgtccttacggacagtatgggtcgggtgagaatcttgtccgggggaaggcagcttcaaatctccatcgccgaaaagtcagatgctgcgctgtacagctgtgtggcttcaaatgttgccggaacagccaagaaagaatacaacctccaagtgtacattagaccaaccatcacgaactccgggagtcacccaaccgagatcatcgtgaccaggggcaagtccatctcgttagagtgtgaggtgcagggcattccccctccaactgttacctggatgaaggacggacacccccttattaaagccaaaggggtggaaattctggacgagggccacattctgcagctcaagaacatccacgtttccgacactggcagatatgtctgcgtcgcagtcaacgtggccggtatgacagataagaagtacgacctcagtgtccatgccccaccatccataatcggtaaccacaggtctcctgagaatattagtgtggttgaaaaaaactctgtgtctctgacatgcgaggcgtcaggaatcccactgccctccatcacttggttcaaggacggctggcctgtgtccctgagtaacagcgtgcgcattctgagtggtggaagaatgcttcgcttaatgcagacgactatggaagacgccggacagtatacttgcgtcgtcagaaacgcagcgggagaggagaggaagatcttcggcctcagcgtcctggtacctccacacatcgttggggaaaacactctcgaagatgtgaaagtgaaggagaaacaaagcgtaactttgacttgtgaggttacaggaaaccctgtgccagaaatcacttggcacaaggacgggcaacccctccaggaggatgaggcacatcacatcattagtggcggaagatttcttcagatcacaaacgtgcaggtcccacacacaggacgctacacctgccttgctagctcacctgcaggacataaatccagatcattttctttaaacgtgttcgtgagccctacgattgctggagtgggcagcgatggcaacccagaggacgtgactgtgatcttaaactctcccacttcattggtgtgtgaagcttatagctaccctcccgcaacaataacttggttcaaggacggaacacctcttgagagcaatcggaacattcgaatcctgcccggaggacgcaccctacagattctcaatgcacaggaagataacgctggaagatattcatgtgttgctactaatgaagctggcgagatgatcaagcactacgaagtcaaagtttatatcccacccatcattaacaagggcgatttatggggccctgggctgagcccaaaagaagttaagatcaaagtgaataatactctgaccctcgagtgtgaagcatacgctattccttctgcctcactctcctggtacaaggatggccagcccctcaagtcagacgatcatgtgaacatcgccgctaacggccatacacttcagatcaaagaagcacaaatttccgatactggcaggtacacatgtgtggcctccaacatcgcgggtgaagacgagcttgattttgacgtaaatatacaggtgcctccgtcattccaaaaactgtgggagattggcaacatgttagacactgggcgtaacggcgaagcaaaggacgtcatcatcaataacccaatttctttatactgtgaaactaacgcggctcctccaccgactctgacatggtacaaagacggccatcctttaacctcctcagataaagtcctaatactgccgggaggcagggtcctgcagatcccacgagcgaaagttgaggatgccggacgctacacctgcgtggcagtaaatgaggctggtgaagactccctgcaatatgatgtcagggttcttgtcccacctataatcaagggcgctaactctgacctgccagaggaggtgaccgtcttggtgaataagtccgctttgattgaatgtttgtcgtctgggagcccagcaccccgaaatagctggcagaaagacgggcagcccctgctggaagacgaccaccacaagttcttaagcaatggtaggatactgcaaattctgaacacccagatcacagatattggcaggtatgtgtgcgttgccgagaatacggctggtagtgccaagaagtactttaatcttaatgttcacgttcccccttccgttatcgggcctaagagcgagaatctcacagtggtcgtgaacaacttcatttccttgacctgcgaagtgagcggattcccgccacccgacctttcttggctgaagaacgaacagcccataaaattgaatacgaacacccttatcgtcccaggaggacggactctccaaataatccgcgctaaggtgtcggacggaggggagtacacttgtatcgccattaaccaggcaggcgagagtaaaaagaaatttagtttaacagtgtacgttccgccatctattaaggaccacgattctgagagcctgtctgtcgtcaatgtgcgcgagggtacaagtgtctctctggagtgtgagtcgaacgcagtccctcctcctgtaataacatggtataagaatgggcgtatgattaccgagtctacacacgtcgaaattctagcagatggacagatgctgcacatcaaaaaagcggaggttagcgacacaggccagtacgtttgtcgggctattaatgtggctggacgggatgacaaaaattttcacctgaacgtctacgttccaccctcgatcgagggccctgaacgcgaggtgatcgtagagacgatttccaacccagtaaccctaacgtgcgacgcaacaggtatcccacctcctacaatagcatggctgaaaaatcacaagcgaattgaaaattctgacagtctcgaggtgcgaatcctgtccggcggttccaaactgcagatcgctcgctctcagcacagtgattcgggcaattacacctgcattgcctcaaacatggagggaaaggcccaaaaatactacttcctgtccattcaggtacccccatcagtcgccggagctgagatcccctcggacgtttctgtgctccttggagagaacgtggagctggtctgtaacgctaatgggatccccacccctcttatccaatggctaaaagatgggaaacctatcgcctcaggagaaactgaacggattcgtgtcagcgcgaacggctccaccctgaatatttatggagctctgactagtgacacgggtaagtacacctgcgtggctactaatcccgctggtgaagaggataggatctttaacttgaatgtgtacgttaccccaaccatccgtgggaacaaggacgaggccgagaaactcatgacgctggtggacaccagtatcaatattgagtgccgagcaacaggtacaccacccccacagattaactggttgaagaatggactgcccctgcctctgagttcacacatcaggctcctagctgcaggacaggtgatacgcatcgttagggcccaggtgtccgacgtcgcagtctacacctgcgtcgcctctaacagagccggtgttgacaacaagcactataatctccaagtgttcgccccacctaacatggataactccatgggaactgaagaaataactgtgcttaagggatcttcaacgtcgatggcctgcatcacggacgggacgccagccccatcgatggcctggctgcgggatggacaacccctcgggctggacgcccatctgacagtctccactcacgggatggtgcttcaactgctgaaagccgagacagaagactcgggtaagtacacgtgtatcgcctccaacgaggcaggcgaagtttctaagcatttcattctgaaggtcctggagccgcctcacataaacggctctgaggagcacgaagagatttctgttatcgttaataacccactcgaacttacctgtatcgcctcaggcatccctgcccctaaaatgacttggatgaaggatggtcgacctcttccccagaccgaccaagtgcagaccctcggcggaggggaggtcctgaggatatccaccgcccaggtggaagataccggacggtatacctgcttggcctctagcccagctggcgatgatgacaaggaatacttagtgagggttcacgtcccaccaaacatagccggtaccgacgagccaagagacattactgttctgagaaacagacaggtgaccttagaatgcaagagcgatgccgtgccgccacccgtcattacttggttacggaatggagagcgcctgcaagcgacacctcgagtgcggatcctgagcggaggtcgctatctgcagatcaataatgccgatctgggcgataccgcaaactacacatgcgtagcctccaatattgcaggaaagacaacacgagaatttatcctgacagttaacgttccacccaatattaagggtggtccacagtccctcgtgatattgcttaacaaatcgactgtgctggaatgcatcgccgagggggttccaacaccgaggattacctggcggaaggacggtgccgtgcttgccggtaaccacgcacgctactccatcctggaaaacgggtttttacatatccagtctgcacacgttaccgacacaggcagatatctgtgcatggccacaaatgcagccggaacagacaggaggagaatcgacctgcaggtacacgtgcctcctagcattgcaccaggcccaacaaacatgaccgtgatagtgaacgttcagaccaccctagcatgcgaggccactggaataccaaagccaagcattaactggaggaagaatggccaccttctcaatgtagaccaaaatcaaaatagttatagactgctgtccagtgggagcctggtcatcatcagccctagcgtggacgatacggcgacctacgagtgcactgtgaccaacggtgcgggtgatgacaagcgcacggtggatctaactgtgcaggtacccccatccatcgctgacgaacccacagactttctcgtgaccaaacatgctccagccgtgatcacctgtaccgcttccggagttcctttcccaagtattcactggacaaagaacggcatacggttactacccaggggggatggatacagaatcttgtcctccggagctatagaaattctggcaacccagctcaatcatgctggaagatatacctgcgtagctcgcaatgcagccggaagtgctcacaggcacgtgactctacacgtgcatgaaccccctgtgattcagcctcaaccgagcgagctgcacgtgattctgaataatccaattcttctgccatgcgaagctaccggaactccaagtccgtttatcacctggcagaaagaggggatcaatgtgaacaccagtggccgaaatcacgctgtgttaccctctggcggactgcagatcagcagggcagtccgtgaagatgctggaacatacatgtgcgttgcgcaaaatccagccggtactgcgcttggcaaaattaaattaaacgttcaagttcccccagtgatcagcccccatctaaaggaatacgtgattgcggttgacaaaccgatcaccctgtcctgtgaagcagacggcctgccaccacctgacattacttggcacaaagatggcagagctattgtggaatcgatcaggcagcgggtgctatcttccgggtctctccaaattgcatttgtccagcccggtgatgccggacattatacctgcatggcagccaatgtagccggatcatcgtcaacaagcacaaagctcactgtgcatgtgcctccccgtatacgctctactgagggccattataccgtgaatgagaatagccaagcaatcctcccgtgcgttgctgatggaatccccacccctgctatcaactggaagaaagacaacgtcctgttggctaacctcctgggaaagtacacggcagagccttacggcgagctgatccttgagaacgtggttctggaggattctggcttctacacctgtgtagccaacaacgccgcaggcgaggatactcacaccgttagcctgacggtccacgtcctgcccactttcactgagttgcccggagacgtatcattgaacaagggtgaacaactgcgtctttcctgcaaggccaccggcatccctctgcccaaacttacttggacttttaataataacatcattcccgcacacttcgactcagtcaacgggcactctgagctggttatagagagagtcagcaaagaggactccgggacgtatgtttgtacagccgaaaactctgtgggatttgtgaaggcaatcggtttcgtatatgtgaaagaaccccctgtgtttaagggagactatccctcaaattggattgagccacttggtgggaacgccatactcaattgtgaggttaagggggaccccacccccactattcagtggaacaggaagggtgttgacatagagattagccatagaatcaggcagctgggtaatggcagcctggcaatttatggtaccgtcaacgaggacgctggcgattatacttgcgtggcgacgaatgaggcaggcgtggtggaaaggagtatgagcttgaccctgcagtccccccctattataacacttgagcctgtggagaccgtgatcaatgccggaggtaaaatcatcctcaactgccaagcgacaggtgaacctcagcctactatcacttggtccaggcaggggcacagcatatcttgggacgacagagtgaacgtcttgtcaaacaatagcctgtacatagctgatgctcaaaaagaggacacatccgagtttgaatgcgtagctcgtaacctaatggggtccgtattagtgcgtgtacccgtcattgtacaagttcacggtggattcagccagtggtcagcctggcgagcgtgctccgtgacctgtgggaaaggcattcaaaagagatcacggctgtgcaatcagcctttgcccgctaatgggggaaagccctgtcaagggagcgaccttgagatgcggaactgccagaacaaaccttgccccgtggatggctcttggagcgagtggtccttatgggaagagtgcacccggagctgcggcagggggaaccagacacgcacccgtacatgtaacaaccccagcgttcagcacggtggccgaccctgcgaaggcaatgcggtggagattattatgtgtaacataaggccctgccctgtgcacggcgcatggagtgcttggcagccctgggggacttgctcagagtcatgcggaaagggtacgcaaaccagggctagactctgcaataatcctcccccagccttcggtggcagctactgtgacggtgctgagacccagatgcaggtgtgtaatgagcgcaactgcccaattcatgggaaatgggccacttgggcaagctggagcgcctgctctgtgtcatgcggcggtggcgctcggcagcgcacaaggggctgcagtgatcctgtcccccagtatggcggacgcaaatgcgaggggtctgatgtgcagagtgatttttgcaacagcgatccgtgtcccacacatgggaattggtcaccttggtctgggtgggggacttgcagccgtacgtgcaatgggggacagatgagaaggtaccgcacttgtgataaccctccacctagcaacggcggacgcgcatgtggcggaccagacagccagattcagagatgtaacactgacatgtgccccgtagacggctcatggggaagttggcactcctggtcccagtgttcagcttcatgcgggggtggggagaagaccaggaagaggctgtgtgatcaccctgtaccagttaaaggtgggcgaccatgtccaggagatactactcaggtgacaagatgcaacgtgcaggcctgtcccggtgggcctcagcgggctaggggaagtgtaattggaaatattaatgatgtggaatttggcatcgcttttttgaacgcaacaattactgacagtcctaatagcgacacaaggatcataagggctaagattacaaatgttccacggtcgctgggtagcgcaatgcgtaaaattgtctctattctcaaccctatctattggactacagcaaaggagatcggcgaagcggtgaatggtttcaccctgactaacgcagtgttcaagcgtgagacgcaagtggagttcgctactggcgaaatactgcaaatgtcccacattgctcggggactcgactccgacgggagtctgctgttggacattgtggtgtctggttacgtgcttcagttacagtcaccggctgaggttacagtaaaagactacactgaagattacatccagaccgggcctggccagctgtatgcctactccacccgccttttcaccatcgatggcatcagtataccatacacatggaaccacaccgtcttctatgatcaggcccagggaagaatgccatttttggttgagaccctgcacgctagctcagtggaatccgattacaaccagattgaagagactctggggttcaagatccatgccagcatcagtaaaggcgacagaagcaaccagtgcccttccggcttcactctggactctgtgggtcctttctgcgctgatgaggacgaatgcgccgcaggaaatccctgctcgcatagctgccataatgcaatgggaacctattactgctcctgtcccaaggggctgaccatcgctgcagatgggaggacctgtcaggacatagacgagtgtgccttgggcaggcatacatgccatgcagggcaggactgcgataataccataggatcgtatcgatgcgttgtgcgttgcggttcaggttttcgcaggacgtcggatggactttcttgccaggacatcaatgaatgccaggaatctagcccctgccatcagcggtgtttcaatgccatcggctcgtttcactgtggatgcgagccaggataccaattgaaaggacgaaaatgcatggacgtgaacgagtgtcgtcagaacgtctgtcgcccagatcagcactgtaagaatactagaggcggttacaaatgtatcgacctttgccccaacggcatgaccaaggctgaaaatgggacgtgtattgacatagatgagtgcaaagacggcacccatcagtgtaggtacaatcagatctgtgagaacacccgcggaagctaccggtgtgtgtgtccccgaggttatcggtcacagggagtgggcagaccctgtatggacatcgatgaatgcgagaacaccgacgcctgtcagcacgagtgtaaaaataccttcggcagctatcagtgtatatgtcctcctggctatcagttgacacacaacggaaagacctgtcaagatatcgatgagtgcttggaacagaatgttcattgcggcccaaaccggatgtgttttaacatgcgcggatcataccagtgcattgacaccccctgtccaccaaactaccagcgggatcctgtgagtggtttttgtctgaaaaattgtccgcctaatgacttggaatgcgcactgagtccttatgccctcgagtataagttagtttctctgccattcggcatagcaaccaaccaggacttgattagattagtcgcatatacacaggacggcgttatgcaccctcgcacaacttttctgatggtagatgaggaacaaactgttccattcgctcttcgcgatgagaacttaaagggcgttgtatacaccacccgacccctgagagaggccgagacatatagaatgcgcgtgcgagcctccagctactccgcgaatggtaccatcgagtatcaaacaactttcatcgtgtatatcgctgtatctgcctacccttacta

SEQ ID NO: 299034 - DNA, 723 bp, Artificial Sequence
  derived and/or modified sequence
gcaattggaagtttccattgtggatgtgagccaggatatcagctgaaaggtagaaagtgcatggacgtgaatgaatgtaggcaaaacgtttgccggccagaccagcactgcaagaacacacggggtggatacaagtgcattgatttgtgccctaacggcatgactaaggcagagaacggtacatgcattgatatcgacgagtgtaaagacggaacacaccagtgtcgatataaccagatctgcgaaaataccagggggtcctatcgttgtgtgtgtcccagaggttaccgctcacagggagtcggcagaccttgcatggacatcgatgagtgtgagaacacagacgcctgtcagcatgagtgcaagaacacattcggatcctatcagtgcatctgccccccagggtatcagttgacacacaatggtaagacatgccaggatatagatgagtgtctggagcagaacgtgcattgtggccctaatcggatgtgtttcaacatgcgcggaagctaccagtgtattgacactccctgcccccctaactaccagcgcgaccctgtctccgggttctgtctcaaaaattgtccacccaacgacttagagtgtgccctgtcgccatatgcactggaatataagcttgtcagccttccattcggcatagccacgaatcaggatctcattagactggtagcctacactcaggatggcgtcatgcacccttag

SEQ ID NO: 299035 - DNA, 16557 bp, Artificial Sequence
  derived and/or modified sequence
atgatcagctgggaggtggtgcacaccgtgttcctgttcgccctgctgtacagcagcctggcccaggacgccagcccccagagcgagatcagagccgaggagatccccgagggcgccagcaccctggccttcgtgttcgacgtgaccggcagcatgtacgacgacctggtgcaggtgatcgagggcgccagcaagatcctggagaccagcctgaagagacccaagagacccctgttcaacttcgccctggtgcccttccacgaccccgagatcggccccgtgaccatcaccaccgaccccaagaagttccagtacgagctgagagagctgtacgtgcagggcggcggcgactgccccgagatgagcatcggcgccatcaagatcgccctggagatcagcctgcccggcagcttcatctacgtgttcaccgacgccagaagcaaggactacagactgacccacgaggtgctgcagctgatccagcagaagcagagccaggtggtgttcgtgctgaccggcgactgcgacgacagaacccacatcggctacaaggtgtacgaggagatcgccagcaccagcagcggccaggtgttccacctggacaagaagcaggtgaacgaggtgctgaagtgggtggaggaggccgtgcaggccagcaaggtgcacctgctgagcaccgaccacctggagcaggccgtgaacacctggagaatccccttcgaccccagcctgaaggaggtgaccgtgagcctgagcggccccagccccatgatcgagatcagaaaccccctgggcaagctgatcaagaagggcttcggcctgcacgagctgctgaacatccacaacagcgccaaggtggtgaacgtgaaggagcccgaggccggcatgtggaccgtgaagaccagcagcagcggcagacacagcgtgagaatcaccggcctgagcaccatcgacttcagagccggcttcagcagaaagcccaccctggacttcaagaagaccgtgagcagacccgtgcagggcatccccacctacgtgctgctgaacaccagcggcatcagcacccccgccagaatcgacctgctggagctgctgagcatcagcggcagcagcctgaagaccatccccgtgaagtactacccccacagaaagccctacggcatctggaacatcagcgacttcgtgccccccaacgaggccttcttcctgaaggtgaccggctacgacaaggacgactacctgttccagagagtgagcagcgtgagcttcagcagcatcgtgcccgacgcccccaaggtgaccatgcccgagaagacccccggctactacctgcagcccggccagatcccctgcagcgtggacagcctgctgcccttcaccctgagcttcgtgagaaacggcgtgaccctgggcgtggaccagtacctgaaggagagcgccagcgtgaacctggacatcgccaaggtgaccctgagcgacgagggcttctacgagtgcatcgccgtgagcagcgccggcaccggcagagcccagaccttcttcgacgtgagcgagcccccccccgtgatccaggtgcccaacaacgtgaccgtgacccccggcgagagagccgtgctgacctgcctgatcatcagcgccgtggactacaacctgacctggcagagaaacgacagagacgtgagactggccgagcccgccagaatcagaaccctggccaacctgagcctggagctgaagagcgtgaagttcaacgacgccggcgagtaccactgcatggtgagcagcgagggcggcagcagcgccgccagcgtgttcctgaccgtgcaggagccccccaaggtgaccgtgatgcccaagaaccagagcttcaccggcggcagcgaggtgagcatcatgtgcagcgccaccggctaccccaagcccaagatcgcctggaccgtgaacgacatgttcatcgtgggcagccacagatacagaatgaccagcgacggcaccctgttcatcaagaacgccgcccccaaggacgccggcatctacggctgcctggccagcaacagcgccggcaccgacaagcagaacagcaccctgagatacatcgaggcccccaagctgatggtggtgcagagcgagctgctggtggccctgggcgacatcaccgtgatggagtgcaagaccagcggcatcccccccccccaggtgaagtggttcaagggcgacctggagctgagacccagcaccttcctgatcatcgaccccctgctgggcctgctgaagatccaggagacccaggacctggacgccggcgactacacctgcgtggccatcaacgaggccggcagagccaccggcaagatcaccctggacgtgggcagcccccccgtgttcatccaggagcccgccgacgtgagcatggagatcggcagcaacgtgaccctgccctgctacgtgcagggctaccccgagcccaccatcaagtggagaagactggacaacatgcccatcttcagcagacccttcagcgtgagcagcatcagccagctgagaaccggcgccctgttcatcctgaacctgtgggccagcgacaagggcacctacatctgcgaggccgagaaccagttcggcaagatccagagcgagaccaccgtgaccgtgaccggcctggtggcccccctgatcggcatcagccccagcgtggccaacgtgatcgagggccagcagctgaccctgccctgcaccctgctggccggcaaccccatccccgagagaagatggatcaagaacagcgccatgctgctgcagaacccctacatcaccgtgagaagcgacggcagcctgcacatcgagagagtgcagctgcaggacggcggcgagtacacctgcgtggccagcaacgtggccggcaccaacaacaagaccaccagcgtggtggtgcacgtgctgcccaccatccagcacggccagcagatcctgagcaccatcgagggcatccccgtgaccctgccctgcaaggccagcggcaaccccaagcccagcgtgatctggagcaagaagggcgagctgatcagcaccagcagcgccaagttcagcgccggcgccgacggcagcctgtacgtggtgagccccggcggcgaggagagcggcgagtacgtgtgcaccgccaccaacaccgccggctacgccaagagaaaggtgcagctgaccgtgtacgtgagacccagagtgttcggcgaccagagaggcctgagccaggacaagcccgtggagatcagcgtgctggccggcgaggaggtgaccctgccctgcgaggtgaagagcctgcccccccccatcatcacctgggccaaggagacccagctgatcagccccttcagccccagacacaccttcctgcccagcggcagcatgaagatcaccgagaccagaaccagcgacagcggcatgtacctgtgcgtggccaccaacatcgccggcaacgtgacccaggccgtgaagctgaacgtgcacgtgccccccaagatccagagaggccccaagcacctgaaggtgcaggtgggccagagagtggacatcccctgcaacgcccagggcacccccctgcccgtgatcacctggagcaagggcggcagcaccatgctggtggacggcgagcaccacgtgagcaaccccgacggcaccctgagcatcgaccaggccacccccagcgacgccggcatctacacctgcgtggccaccaacatcgccggcaccgacgagaccgagatcaccctgcacgtgcaggagccccccaccgtggaggacctggagcccccctacaacaccaccttccaggagagagtggccaaccagagaatcgagttcccctgccccgccaagggcacccccaagcccaccatcaagtggctgcacaacggcagagagctgaccggcagagagcccggcatcagcatcctggaggacggcaccctgctggtgatcgccagcgtgaccccctacgacaacggcgagtacatctgcgtggccgtgaacgaggccggcaccaccgagagaaagtacaacctgaaggtgcacgtgccccccgtgatcaaggacaaggagcaggtgaccaacgtgagcgtgctgctgaaccagctgaccaacctgttctgcgaggtggagggcacccccagccccatcatcatgtggtacaaggacaacgtgcaggtgaccgagagcagcaccatccagaccgtgaacaacggcaagatcctgaagctgttcagagccacccccgaggacgccggcagatacagctgcaaggccatcaacatcgccggcaccagccagaagtacttcaacatcgacgtgctggtgccccccaccatcatcggcaccaacttccccaacgaggtgagcgtggtgctgaacagagacgtggccctggagtgccaggtgaagggcacccccttccccgacatccactggttcaaggacggcaagcccctgttcctgggcgaccccaacgtggagctgctggacagaggccaggtgctgcacctgaagaacgccagaagaaacgacaagggcagataccagtgcaccgtgagcaacgccgccggcaagcaggccaaggacatcaagctgaccatctacatcccccccagcatcaagggcggcaacgtgaccaccgacatcagcgtgctgatcaacagcctgatcaagctggagtgcgagaccagaggcctgcccatgcccgccatcacctggtacaaggacggccagcccatcatgagcagcagccaggccctgtacatcgacaagggccagtacctgcacatccccagagcccaggtgagcgacagcgccacctacacctgccacgtggccaacgtggccggcaccgccgagaagagcttccacgtggacgtgtacgtgccccccatgatcgagggcaacctggccacccccctgaacaagcaggtggtgatcgcccacagcctgaccctggagtgcaaggccgccggcaaccccagccccatcctgacctggctgaaggacggcgtgcccgtgaaggccaacgacaacatcagaatcgaggccggcggcaagaagctggagatcatgagcgcccaggagatcgacagaggccagtacatctgcgtggccaccagcgtggccggcgagaaggagatcaagtacgaggtggacgtgctggtgccccccgccatcgagggcggcgacgagaccagctacttcatcgtgatggtgaacaacctgctggagctggactgccacgtgaccggcagccccccccccaccatcatgtggctgaaggacggccagctgatcgacgagagagacggcttcaagatcctgctgaacggcagaaagctggtgatcgcccaggcccaggtgagcaacaccggcctgtacagatgcatggccgccaacaccgccggcgaccacaagaaggagttcgaggtgaccgtgcacgtgccccccaccatcaagagcagcggcctgagcgagagagtggtggtgaagtacaagcccgtggccctgcagtgcatcgccaacggcatccccaaccccagcatcacctggctgaaggacgaccagcccgtgaacaccgcccagggcaacctgaagatccagagcagcggcagagtgctgcagatcgccaagaccctgctggaggacgccggcagatacacctgcgtggccaccaacgccgccggcgagacccagcagcacatccagctgcacgtgcacgagccccccagcctggaggacgccggcaagatgctgaacgagaccgtgctggtgagcaaccccgtgcagctggagtgcaaggccgccggcaaccccgtgcccgtgatcacctggtacaaggacaacagactgctgagcggcagcaccagcatgaccttcctgaacagaggccagatcatcgacatcgagagcgcccagatcagcgacgccggcatctacaagtgcgtggccatcaacagcgccggcgccaccgagctgttctacagcctgcaggtgcacgtggcccccagcatcagcggcagcaacaacatggtggccgtggtggtgaacaaccccgtgagactggagtgcgaggccagaggcatccccgcccccagcctgacctggctgaaggacggcagccccgtgagcagcttcagcaacggcctgcaggtgctgagcggcggcagaatcctggccctgaccagcgcccagatcagcgacaccggcagatacacctgcgtggccgtgaacgccgccggcgagaagcagagagacatcgacctgagagtgtacgtgccccccaacatcatgggcgaggagcagaacgtgagcgtgctgatcagccaggccgtggagctgctgtgccagagcgacgccatccccccccccaccctgacctggctgaaggacggccaccccctgctgaagaagcccggcctgagcatcagcgagaacagaagcgtgctgaagatcgaggacgcccaggtgcaggacaccggcagatacacctgcgaggccaccaacgtggccggcaagaccgagaagaactacaacgtgaacatctgggtgccccccaacatcggcggcagcgacgagctgacccagctgaccgtgatcgagggcaacctgatcagcctgctgtgcgagagcagcggcatccccccccccaacctgatctggaagaagaagggcagccccgtgctgaccgacagcatgggcagagtgagaatcctgagcggcggcagacagctgcagatcagcatcgccgagaagagcgacgccgccctgtacagctgcgtggccagcaacgtggccggcaccgccaagaaggagtacaacctgcaggtgtacatcagacccaccatcaccaacagcggcagccaccccaccgagatcatcgtgaccagaggcaagagcatcagcctggagtgcgaggtgcagggcatccccccccccaccgtgacctggatgaaggacggccaccccctgatcaaggccaagggcgtggagatcctggacgagggccacatcctgcagctgaagaacatccacgtgagcgacaccggcagatacgtgtgcgtggccgtgaacgtggccggcatgaccgacaagaagtacgacctgagcgtgcacgccccccccagcatcatcggcaaccacagaagccccgagaacatcagcgtggtggagaagaacagcgtgagcctgacctgcgaggccagcggcatccccctgcccagcatcacctggttcaaggacggctggcccgtgagcctgagcaacagcgtgagaatcctgagcggcggcagaatgctgagactgatgcagaccaccatggaggacgccggccagtacacctgcgtggtgagaaacgccgccggcgaggagagaaagatcttcggcctgagcgtgctggtgcccccccacatcgtgggcgagaacaccctggaggacgtgaaggtgaaggagaagcagagcgtgaccctgacctgcgaggtgaccggcaaccccgtgcccgagatcacctggcacaaggacggccagcccctgcaggaggacgaggcccaccacatcatcagcggcggcagattcctgcagatcaccaacgtgcaggtgccccacaccggcagatacacctgcctggccagcagccccgccggccacaagagcagaagcttcagcctgaacgtgttcgtgagccccaccatcgccggcgtgggcagcgacggcaaccccgaggacgtgaccgtgatcctgaacagccccaccagcctggtgtgcgaggcctacagctacccccccgccaccatcacctggttcaaggacggcacccccctggagagcaacagaaacatcagaatcctgcccggcggcagaaccctgcagatcctgaacgcccaggaggacaacgccggcagatacagctgcgtggccaccaacgaggccggcgagatgatcaagcactacgaggtgaaggtgtacatcccccccatcatcaacaagggcgacctgtggggccccggcctgagccccaaggaggtgaagatcaaggtgaacaacaccctgaccctggagtgcgaggcctacgccatccccagcgccagcctgagctggtacaaggacggccagcccctgaagagcgacgaccacgtgaacatcgccgccaacggccacaccctgcagatcaaggaggcccagatcagcgacaccggcagatacacctgcgtggccagcaacatcgccggcgaggacgagctggacttcgacgtgaacatccaggtgccccccagcttccagaagctgtgggagatcggcaacatgctggacaccggcagaaacggcgaggccaaggacgtgatcatcaacaaccccatcagcctgtactgcgagaccaacgccgcccccccccccaccctgacctggtacaaggacggccaccccctgaccagcagcgacaaggtgctgatcctgcccggcggcagagtgctgcagatccccagagccaaggtggaggacgccggcagatacacctgcgtggccgtgaacgaggccggcgaggacagcctgcagtacgacgtgagagtgctggtgccccccatcatcaagggcgccaacagcgacctgcccgaggaggtgaccgtgctggtgaacaagagcgccctgatcgagtgcctgagcagcggcagccccgcccccagaaacagctggcagaaggacggccagcccctgctggaggacgaccaccacaagttcctgagcaacggcagaatcctgcagatcctgaacacccagatcaccgacatcggcagatacgtgtgcgtggccgagaacaccgccggcagcgccaagaagtacttcaacctgaacgtgcacgtgccccccagcgtgatcggccccaagagcgagaacctgaccgtggtggtgaacaacttcatcagcctgacctgcgaggtgagcggcttccccccccccgacctgagctggctgaagaacgagcagcccatcaagctgaacaccaacaccctgatcgtgcccggcggcagaaccctgcagatcatcagagccaaggtgagcgacggcggcgagtacacctgcatcgccatcaaccaggccggcgagagcaagaagaagttcagcctgaccgtgtacgtgccccccagcatcaaggaccacgacagcgagagcctgagcgtggtgaacgtgagagagggcaccagcgtgagcctggagtgcgagagcaacgccgtgcccccccccgtgatcacctggtacaagaacggcagaatgatcaccgagagcacccacgtggagatcctggccgacggccagatgctgcacatcaagaaggccgaggtgagcgacaccggccagtacgtgtgcagagccatcaacgtggccggcagagacgacaagaacttccacctgaacgtgtacgtgccccccagcatcgagggccccgagagagaggtgatcgtggagaccatcagcaaccccgtgaccctgacctgcgacgccaccggcatccccccccccaccatcgcctggctgaagaaccacaagagaatcgagaacagcgacagcctggaggtgagaatcctgagcggcggcagcaagctgcagatcgccagaagccagcacagcgacagcggcaactacacctgcatcgccagcaacatggagggcaaggcccagaagtactacttcctgagcatccaggtgccccccagcgtggccggcgccgagatccccagcgacgtgagcgtgctgctgggcgagaacgtggagctggtgtgcaacgccaacggcatccccacccccctgatccagtggctgaaggacggcaagcccatcgccagcggcgagaccgagagaatcagagtgagcgccaacggcagcaccctgaacatctacggcgccctgaccagcgacaccggcaagtacacctgcgtggccaccaaccccgccggcgaggaggacagaatcttcaacctgaacgtgtacgtgacccccaccatcagaggcaacaaggacgaggccgagaagctgatgaccctggtggacaccagcatcaacatcgagtgcagagccaccggcaccccccccccccagatcaactggctgaagaacggcctgcccctgcccctgagcagccacatcagactgctggccgccggccaggtgatcagaatcgtgagagcccaggtgagcgacgtggccgtgtacacctgcgtggccagcaacagagccggcgtggacaacaagcactacaacctgcaggtgttcgccccccccaacatggacaacagcatgggcaccgaggagatcaccgtgctgaagggcagcagcaccagcatggcctgcatcaccgacggcacccccgcccccagcatggcctggctgagagacggccagcccctgggcctggacgcccacctgaccgtgagcacccacggcatggtgctgcagctgctgaaggccgagaccgaggacagcggcaagtacacctgcatcgccagcaacgaggccggcgaggtgagcaagcacttcatcctgaaggtgctggagcccccccacatcaacggcagcgaggagcacgaggagatcagcgtgatcgtgaacaaccccctggagctgacctgcatcgccagcggcatccccgcccccaagatgacctggatgaaggacggcagacccctgccccagaccgaccaggtgcagaccctgggcggcggcgaggtgctgagaatcagcaccgcccaggtggaggacaccggcagatacacctgcctggccagcagccccgccggcgacgacgacaaggagtacctggtgagagtgcacgtgccccccaacatcgccggcaccgacgagcccagagacatcaccgtgctgagaaacagacaggtgaccctggagtgcaagagcgacgccgtgcccccccccgtgatcacctggctgagaaacggcgagagactgcaggccacccccagagtgagaatcctgagcggcggcagatacctgcagatcaacaacgccgacctgggcgacaccgccaactacacctgcgtggccagcaacatcgccggcaagaccaccagagagttcatcctgaccgtgaacgtgccccccaacatcaagggcggcccccagagcctggtgatcctgctgaacaagagcaccgtgctggagtgcatcgccgagggcgtgcccacccccagaatcacctggagaaaggacggcgccgtgctggccggcaaccacgccagatacagcatcctggagaacggcttcctgcacatccagagcgcccacgtgaccgacaccggcagatacctgtgcatggccaccaacgccgccggcaccgacagaagaagaatcgacctgcaggtgcacgtgccccccagcatcgcccccggccccaccaacatgaccgtgatcgtgaacgtgcagaccaccctggcctgcgaggccaccggcatccccaagcccagcatcaactggagaaagaacggccacctgctgaacgtggaccagaaccagaacagctacagactgctgagcagcggcagcctggtgatcatcagccccagcgtggacgacaccgccacctacgagtgcaccgtgaccaacggcgccggcgacgacaagagaaccgtggacctgaccgtgcaggtgccccccagcatcgccgacgagcccaccgacttcctggtgaccaagcacgcccccgccgtgatcacctgcaccgccagcggcgtgcccttccccagcatccactggaccaagaacggcatcagactgctgcccagaggcgacggctacagaatcctgagcagcggcgccatcgagatcctggccacccagctgaaccacgccggcagatacacctgcgtggccagaaacgccgccggcagcgcccacagacacgtgaccctgcacgtgcacgagccccccgtgatccagccccagcccagcgagctgcacgtgatcctgaacaaccccatcctgctgccctgcgaggccaccggcacccccagccccttcatcacctggcagaaggagggcatcaacgtgaacaccagcggcagaaaccacgccgtgctgcccagcggcggcctgcagatcagcagagccgtgagagaggacgccggcacctacatgtgcgtggcccagaaccccgccggcaccgccctgggcaagatcaagctgaacgtgcaggtgccccccgtgatcagcccccacctgaaggagtacgtgatcgccgtggacaagcccatcaccctgagctgcgaggccgacggcctgcccccccccgacatcacctggcacaaggacggcagagccatcgtggagagcatcagacagagagtgctgagcagcggcagcctgcagatcgccttcgtgcagcccggcgacgccggccactacacctgcatggccgccaacgtggccggcagcagcagcaccagcaccaagctgaccgtgcacgtgccccccagaatcagaagcaccgagggccactacaccgtgaacgagaacagccaggccatcctgccctgcgtggccgacggcatccccacccccgccatcaactggaagaaggacaacgtgctgctggccaacctgctgggcaagtacaccgccgagccctacggcgagctgatcctggagaacgtggtgctggaggacagcggcttctacacctgcgtggccaacaacgccgccggcgaggacacccacaccgtgagcctgaccgtgcacgtgctgcccaccttcaccgagctgcccggcgacgtgagcctgaacaagggcgagcagctgagactgagctgcaaggccaccggcatccccctgcccaagctgacctggaccttcaacaacaacatcatccccgcccacttcgacagcgtgaacggccacagcgagctggtgatcgagagagtgagcaaggaggacagcggcacctacgtgtgcaccgccgagaacagcgtgggcttcgtgaaggccatcggcttcgtgtacgtgaaggagccccccgtgttcaagggcgactaccccagcaactggatcgagcccctgggcggcaacgccatcctgaactgcgaggtgaagggcgaccccacccccaccatccagtggaacagaaagggcgtggacatcgagatcagccacagaatcagacagctgggcaacggcagcctggccatctacggcaccgtgaacgaggacgccggcgactacacctgcgtggccaccaacgaggccggcgtggtggagagaagcatgagcctgaccctgcagagcccccccatcatcaccctggagcccgtggagaccgtgatcaacgccggcggcaagatcatcctgaactgccaggccaccggcgagccccagcccaccatcacctggagcagacagggccacagcatcagctgggacgacagagtgaacgtgctgagcaacaacagcctgtacatcgccgacgcccagaaggaggacaccagcgagttcgagtgcgtggccagaaacctgatgggcagcgtgctggtgagagtgcccgtgatcgtgcaggtgcacggcggcttcagccagtggagcgcctggagagcctgcagcgtgacctgcggcaagggcatccagaagagaagcagactgtgcaaccagcccctgcccgccaacggcggcaagccctgccagggcagcgacctggagatgagaaactgccagaacaagccctgccccgtggacggcagctggagcgagtggagcctgtgggaggagtgcaccagaagctgcggcagaggcaaccagaccagaaccagaacctgcaacaaccccagcgtgcagcacggcggcagaccctgcgagggcaacgccgtggagatcatcatgtgcaacatcagaccctgccccgtgcacggcgcctggagcgcctggcagccctggggcacctgcagcgagagctgcggcaagggcacccagaccagagccagactgtgcaacaaccccccccccgccttcggcggcagctactgcgacggcgccgagacccagatgcaggtgtgcaacgagagaaactgccccatccacggcaagtgggccacctgggccagctggagcgcctgcagcgtgagctgcggcggcggcgccagacagagaaccagaggctgcagcgaccccgtgccccagtacggcggcagaaagtgcgagggcagcgacgtgcagagcgacttctgcaacagcgacccctgccccacccacggcaactggagcccctggagcggctggggcacctgcagcagaacctgcaacggcggccagatgagaagatacagaacctgcgacaaccccccccccagcaacggcggcagagcctgcggcggccccgacagccagatccagagatgcaacaccgacatgtgccccgtggacggcagctggggcagctggcacagctggagccagtgcagcgccagctgcggcggcggcgagaagaccagaaagagactgtgcgaccaccccgtgcccgtgaagggcggcagaccctgccccggcgacaccacccaggtgaccagatgcaacgtgcaggcctgccccggcggcccccagagagccagaggcagcgtgatcggcaacatcaacgacgtggagttcggcatcgccttcctgaacgccaccatcaccgacagccccaacagcgacaccagaatcatcagagccaagatcaccaacgtgcccagaagcctgggcagcgccatgagaaagatcgtgagcatcctgaaccccatctactggaccaccgccaaggagatcggcgaggccgtgaacggcttcaccctgaccaacgccgtgttcaagagagagacccaggtggagttcgccaccggcgagatcctgcagatgagccacatcgccagaggcctggacagcgacggcagcctgctgctggacatcgtggtgagcggctacgtgctgcagctgcagagccccgccgaggtgaccgtgaaggactacaccgaggactacatccagaccggccccggccagctgtacgcctacagcaccagactgttcaccatcgacggcatcagcatcccctacacctggaaccacaccgtgttctacgaccaggcccagggcagaatgcccttcctggtggagaccctgcacgccagcagcgtggagagcgactacaaccagatcgaggagaccctgggcttcaagatccacgccagcatcagcaagggcgacagaagcaaccagtgccccagcggcttcaccctggacagcgtgggccccttctgcgccgacgaggacgagtgcgccgccggcaacccctgcagccacagctgccacaacgccatgggcacctactactgcagctgccccaagggcctgaccatcgccgccgacggcagaacctgccaggacatcgacgagtgcgccctgggcagacacacctgccacgccggccaggactgcgacaacaccatcggcagctacagatgcgtggtgagatgcggcagcggcttcagaagaaccagcgacggcctgagctgccaggacatcaacgagtgccaggagagcagcccctgccaccagagatgcttcaacgccatcggcagcttccactgcggctgcgagcccggctaccagctgaagggcagaaagtgcatggacgtgaacgagtgcagacagaacgtgtgcagacccgaccagcactgcaagaacaccagaggcggctacaagtgcatcgacctgtgccccaacggcatgaccaaggccgagaacggcacctgcatcgacatcgacgagtgcaaggacggcacccaccagtgcagatacaaccagatctgcgagaacaccagaggcagctacagatgcgtgtgccccagaggctacagaagccagggcgtgggcagaccctgcatggacatcgacgagtgcgagaacaccgacgcctgccagcacgagtgcaagaacaccttcggcagctaccagtgcatctgcccccccggctaccagctgacccacaacggcaagacctgccaggacatcgacgagtgcctggagcagaacgtgcactgcggccccaacagaatgtgcttcaacatgagaggcagctaccagtgcatcgacaccccctgcccccccaactaccagagagaccccgtgagcggcttctgcctgaagaactgcccccccaacgacctggagtgcgccctgagcccctacgccctggagtacaagctggtgagcctgcccttcggcatcgccaccaaccaggacctgatcagactggtggcctacacccaggacggcgtgatgcaccccagaaccaccttcctgatggtggacgaggagcagaccgtgcccttcgccctgagagacgagaacctgaagggcgtggtgtacaccaccagacccctgagagaggccgagacctacagaatgagagtgagagccagcagctacagcgccaacggcaccatcgagtaccagaccaccttcatcgtgtacatcgccgtgagcgcctacccctactag

SEQ ID NO: 299036 - DNA, 723 bp, Artificial Sequence
  derived and/or modified sequence
gccatcggcagcttccactgcggctgcgagcccggctaccagctgaagggcagaaagtgcatggacgtgaacgagtgcagacagaacgtgtgcagacccgaccagcactgcaagaacaccagaggcggctacaagtgcatcgacctgtgccccaacggcatgaccaaggccgagaacggcacctgcatcgacatcgacgagtgcaaggacggcacccaccagtgcagatacaaccagatctgcgagaacaccagaggcagctacagatgcgtgtgccccagaggctacagaagccagggcgtgggcagaccctgcatggacatcgacgagtgcgagaacaccgacgcctgccagcacgagtgcaagaacaccttcggcagctaccagtgcatctgcccccccggctaccagctgacccacaacggcaagacctgccaggacatcgacgagtgcctggagcagaacgtgcactgcggccccaacagaatgtgcttcaacatgagaggcagctaccagtgcatcgacaccccctgcccccccaactaccagagagaccccgtgagcggcttctgcctgaagaactgcccccccaacgacctggagtgcgccctgagcccctacgccctggagtacaagctggtgagcctgcccttcggcatcgccaccaaccaggacctgatcagactggtggcctacacccaggacggcgtgatgcacccctag

SEQ ID NO: 299037 - DNA, 129 bp, Artificial Sequence
  derived and/or modified sequence
atgggagtgagacatcccccatgttcgcataggctcttggcagtctgtgctctagtttccctggccaccgccgcactgcttgcaaatactccatgtggaccatacacccacgactgccccgtgaagcgg

SEQ ID NO: 299038 - protein, 198 aa, Artificial Sequence
  derived and/or modified sequence
MYNALCKTLQRDCLVLQSFKIMDYSLLMSIHNIDHAQREPLSSETQYSVDTRRPAPQKALYSTAMESIQGEARRGGTMETDDHMGGIPARNSKGERLLLYIGIIDILQSYRFVKKLEHSWKALVHDGDTVSVHRPGFYAERFQRFMCNTVFKKIPLQPWKSLKLQSQSSPIKRKASEDLEQDSAISVIPRCQPLPQQC

SEQ ID NO: 299039 - protein, 86 aa, Artificial Sequence
  derived and/or modified sequence
MASEVLEARQDSYISLVPYASGMPIKKIGHRSVDSSGETTYKKTTSSALKGAIQLGITHTVGSLSTKPERDVLMQDFYVVESIFFP

SEQ ID NO: 299040 - DNA, 597 bp, Artificial Sequence
  derived and/or modified sequence
atgtacaacgctttatgtaaaaccctgcagagagactgtctcgtgttacagtcttttaagattatggactatagtctgctcatgtcaatacataacattgaccacgcacagcgggaaccgctcagtagtgagacccaatactccgtcgacacccggcgtcccgctccccagaaagcattgtactcaaccgccatggagagcatccagggcgaggctagacggggaggtaccatggagacggatgaccatatggggggcattcccgcacgtaactcaaagggggagaggttactgctatatatcggtatcatagatatactgcagagttaccggttcgttaaaaagttggagcattcctggaaggcactggtccatgacggtgatacagtctccgtgcatcgacctgggttttatgctgaaaggttccagagatttatgtgcaacaccgtgttcaaaaagattccactgcagccttggaagtctctaaagctccagagccagtcttctcctatcaagcgaaaggcttcagaagatctggaacaagactcagctatctccgttattcccagatgccagcccctcccccaacagtgttag

SEQ ID NO: 299041 - DNA, 261 bp, Artificial Sequence
  derived and/or modified sequence
atggcatctgaagttttggaagcccgccaggactcatacatttccttggtaccttatgccagcggcatgcccatcaaaaaaatcggacaccgttcagttgattccagtggggagaccacttataaaaagacaacttctagcgcactcaaaggagccattcaactgggaattacacacactgtggggagcctcagcaccaagccggagcgagatgttctgatgcaggacttctatgtggttgagagtatctttttcccatag

SEQ ID NO: 299042 - DNA, 597 bp, Artificial Sequence
  derived and/or modified sequence
atgtacaatgccctgtgcaagaccctgcagagggactgcctggtgctgcagagcttcaagatcatggactacagcctgctgatgagcatccacaacatcgaccacgcccagcgggagcccctgagcagcgagacccagtacagcgtggacacccggcggcctgccccccagaaggccctgtacagcacagccatggagagcatccagggcgaggccaggagaggaggcaccatggagacagatgaccacatgggcggcatcccagccaggaacagcaaaggagagcggctgctgctgtacatcggcatcatcgacatcctgcagagctacagatttgtgaagaagctggagcacagctggaaggccctggtgcatgatggagacacagtgtctgtgcacaggcctggcttctatgcagagcgcttccagcgcttcatgtgcaacacagtgttcaagaagatccccctgcagccctggaagagcctgaagctgcagagccagagcagccccatcaagaggaaggccagcgaggacctggagcaggacagcgccatcagcgtcatcccccgctgccagcccctgccccagcagtgctag

SEQ ID NO: 299043 - DNA, 261 bp, Artificial Sequence
  derived and/or modified sequence
atggccagcgaggtgctggaggcccggcaggacagctacatcagcctggtgccctatgccagcggcatgcccatcaagaagattggccacaggtctgtggacagcagcggggagaccacctacaagaagaccaccagcagcgccctgaagggggccatccagctgggcatcacccacacagtgggcagcctgagcaccaagccagagagagatgtgctgatgcaggacttctacgtggtggagagcatcttcttcccctag

SEQ ID NO: 299044 - DNA, 597 bp, Artificial Sequence
  derived and/or modified sequence
atgtacaacgccctgtgcaagaccctgcagcgggactgcctggtgctacagtccttcaagattatggactacagcctgctaatgagtatccacaatattgatcacgcccaacgtgagccgctgagctctgagacgcagtacagtgtggacacccgtaggcccgcccctcagaaggctctctacagcacggcaatggagagtatccagggtgaggctcggagaggtggaaccatggaaactgatgaccacatgggcggaatcccggccagaaattctaaaggagaacggctgttgctatacattggaatcatcgacatcctccaatcttatcgcttcgttaagaaactggaacattcttggaaggcccttgtgcatgacggagacaccgtctctgttcacagacccggattttacgccgagcgtttccagagattcatgtgcaacacagtctttaagaagatccctcttcagccttggaaaagtctgaagctccagagccagtcctcacctataaagcgcaaagcaagtgaggacttggagcaagacagtgctatctccgtgatcccccggtgccaacctctcccccaacagtgctag

SEQ ID NO: 299045 - DNA, 261 bp, Artificial Sequence
  derived and/or modified sequence
atggccagcgaggtgctggaggcccggcaggacagctacatcagcctggtaccttacgcctccggaatgccaatcaaaaaaatcggacaccgatccgttgactctagtggagagacgacttataagaagaccaccagtagcgcactgaagggtgctattcagctcgggattacccatactgtcgggtctcttagtacaaagccagaaagggacgtacttatgcaggatttctatgttgttgaatcgatatttttcccctag

SEQ ID NO: 299046 - DNA, 1252 bp, Artificial Sequence
  derived and/or modified sequence
ggatgctgacatgtacaacgctctctgtaagaccctgcagcgtgactgtttggtgctgcagagcttcaagataatggattacagcctcttgatgtcaatccataatatagatcatgcacaacgagagcccttaagcagtgaaacacagtactcagttgatactcgaagaccggccccccaaaaggctctgtattccacagccatggaatccatccagggagaggctcgacggggtggtaccatggagactgatgaccatatgggtggcatccctgcccggaatagtaaaggggaaaggcttctgctttatattggcatcattgacattctacagtcttacaggtttgttaagaagttggagcactcttggaaagccctggtacatgacggagacactgtctcagtgcatcgcccaggcttctacgctgaacggttccagcgcttcatgtgcaacacagtatttaagaagattcccttacaaccttggaaaagcttgaagttgcagagtcagagttcacccattaagcgcaaagcctcagaagacctggaacaagattctgccatctctgtgatcccaagatgtcagcccttgccccagcaatgctgaattttcttctacttggtcatcaaaaaaggagtgtaatagaagtgaggggagctgctcctccatcttcttcctgaagaagaaccttctctccttcctcttcctcatgaatgggccttagtgcctcagagagttgaggaccgcagcatcccctccactccagagttgggtggtatggattttcaactggccaaccctttgcctccactattgaatttttttcagacccccattcttcatgctggaaatgggattgctggacttggcagctttctttcccctcgtctttgactaggaaccggactcttaatttcctcaggacagactagctggcacattatccctaccttagttctttctctctgactcctggaagaatactcctgtaatctctgtaaaggtttttgggggataagggtgtttaaccacctcccagctttcttcttctttttttttttctgaaaaaaggaaaaagcacacagcacacaatttcaagccattttcagatcagaactccagaagtgttgacaagatgcctattcgtagagttccctcagaagagccatggtgtttatgaagagaagagtagtgattgctctgccagaagcagctcctctttaaactcctcctctcttgatgaatttctta

SEQ ID NO: 299047 - DNA, 353 bp, Artificial Sequence
  derived and/or modified sequence
aagagagaatctcttatatgtgctgatacaggtttcaactttctgtgctgtggggtcagtggtaagagagcagcatctggaatcaagagacccatggcatctgaggtcttggaagctagacaggattcttacatctcattggtgccttatgcctctggcatgcccatcaagaaaataggccatagaagtgttgattcctcaggagagacaacatataaaaagacaacctcatcagccttgaaaggtgccatccagttaggcattacccacactgtggggagcctgagtaccaaaccagagcgtgatgtcctcatgcaagatttctacgtggttgagagtatcttctttcccag

SEQ ID NO: 299048 - DNA, 597 bp, Artificial Sequence
  derived and/or modified sequence
atgtataacgccctgtgtaaaactctccagagggactgcttagtgttacagtcttttaagattatggattattctttgctgatgtccattcacaacattgaccatgcacagcgggagcctctgagcagcgaaactcagtactcggttgacactaggagacctgctccccagaaagccctctactccaccgccatggaaagcattcaaggcgaggcacgaagggggggaactatggagactgacgaccatatgggcggtatcccagccaggaatagcaaaggggaaagactgctcctctatattggaattatcgatatactgcagtcataccgttttgtgaaaaaactagagcacagttggaaagccctcgtgcacgatggtgataccgtgtctgtccatcgcccaggattttacgccgaacggttccagcgattcatgtgtaacactgtgttcaaaaagattccactccagccctggaagtcgttaaaactccagtctcagagttctcccatcaagcgcaaggcaagcgaggacctggagcaggattcagctataagcgtcatacctaggtgccagcccctgcctcagcagtgctag

SEQ ID NO: 299049 - DNA, 261 bp, Artificial Sequence
  derived and/or modified sequence
atggcgagtgaagtgctggaggcaagacaggactcttacatctccctcgtgccttacgcatctggaatgcccataaagaagataggtcaccgctctgtggatagcagcggcgagaccacttacaagaagacaacgtcgtctgccttgaaaggcgctattcagctgggcatcactcatacggtagggtccttaagcaccaagcccgagcgggatgtgctgatgcaggacttttatgtggtggagtccatcttctttccctag

SEQ ID NO: 299050 - DNA, 597 bp, Artificial Sequence
  derived and/or modified sequence
atgtacaacgccctgtgcaagaccctgcagagagactgcctggtgctgcagagcttcaagatcatggactacagcctgctgatgagcatccacaacatcgaccacgcccagagagagcccctgagcagcgagacccagtacagcgtggacaccagaagacccgccccccagaaggccctgtacagcaccgccatggagagcatccagggcgaggccagaagaggcggcaccatggagaccgacgaccacatgggcggcatccccgccagaaacagcaagggcgagagactgctgctgtacatcggcatcatcgacatcctgcagagctacagattcgtgaagaagctggagcacagctggaaggccctggtgcacgacggcgacaccgtgagcgtgcacagacccggcttctacgccgagagattccagagattcatgtgcaacaccgtgttcaagaagatccccctgcagccctggaagagcctgaagctgcagagccagagcagccccatcaagagaaaggccagcgaggacctggagcaggacagcgccatcagcgtgatccccagatgccagcccctgccccagcagtgctag

SEQ ID NO: 299051 - DNA, 261 bp, Artificial Sequence
  derived and/or modified sequence
atggccagcgaggtgctggaggccagacaggacagctacatcagcctggtgccctacgccagcggcatgcccatcaagaagatcggccacagaagcgtggacagcagcggcgagaccacctacaagaagaccaccagcagcgccctgaagggcgccatccagctgggcatcacccacaccgtgggcagcctgagcaccaagcccgagagagacgtgctgatgcaggacttctacgtggtggagagcatcttcttcccctag

SEQ ID NO: 299052 - protein, 264 aa, Artificial Sequence
  derived and/or modified sequence
MKLGCVLMAWALYLSLGVLWVAQMLLAASFETLQCEGPVCTEESSCHTEDDLTDAREAGFQVKAYTFSEPFHLIVSYDWLILQGPAKPVFEGDLLVLRCQAWQDWPLTQVTFYRDGSALGPPGPNREFSITVVQKADSGHYHCSGIFQSPGPGIPETASVVAITVQGASSSAAPPTLNPAPQKSAAPGTAPEEAPGPLPPPPTPSSEDPGFSSPLGMPDPHLYHQMGLLLKHMQDVRVLLGHLLMELRELSGHRKPGTTKATAE

SEQ ID NO: 299053 - DNA, 795 bp, Artificial Sequence
  derived and/or modified sequence
atgaaactgggatgcgttctgatggcatgggctctgtatctttctttgggcgtcctttgggttgcacagatgcttctggccgcatccttcgaaacgttgcagtgcgaggggcctgtgtgtaccgaggagtccagttgtcatacagaagatgaccttactgatgcacgggaggccggatttcaggtgaaagcttacactttctccgaaccgtttcatttaatagtctcgtacgactggttaattctgcaaggccctgctaagcctgtgtttgaaggagatctcctggtgctacggtgccaagcctggcaggactggccacttacccaggtgaccttctacagggatggaagcgcgctcgggccaccaggaccaaatagggagttctcgatcaccgtagtccagaaagccgactcagggcactatcactgcagcgggattttccagtctccgggacctggtattccagaaacagcctccgtagtagccattacagtgcagggtgcttcgagctccgccgcacctcctactctgaaccccgcaccccagaagtctgcagcaccgggtaccgctcccgaagaagcccctggccctttgccccctcctccaactcctagctccgaagatcctgggttttccagccccttaggtatgcccgacccccacctgtaccaccaaatgggactgctgcttaaacacatgcaggatgtcagggtgctcttaggacacctgttgatggaacttcgcgaattgtctgggcatagaaagcctggcacaacgaaggcgaccgccgaatag

SEQ ID NO: 299054 - DNA, 795 bp, Artificial Sequence
  derived and/or modified sequence
atgaaactaggttgcgttcttatggcctgggccctctacttatcccttggtgtactgtgggtggctcagatgttgctggccgcgagtttcgaaacgctgcagtgcgaaggccctgtctgtacagaagaaagctcatgtcacaccgaagacgatcttacggacgctagggaggccgggttccaggtgaaggcatataccttcagtgaaccttttcacttaatcgtctcttacgactggttgatcctgcagggccccgcgaaaccagttttcgagggcgatcttctagtgttgagatgtcaggcttggcaagactggcctctcacccaggtcaccttttatcgagatggaagcgcactaggtcctcctgggcccaaccgcgaattttcgatcactgtggttcagaaagcagacagtggtcactatcactgcagtggcatttttcaaagccctggacccggcatccctgagacagcctcagtggtagcaatcacagtgcagggagcctcatcttccgccgccccccctaccctcaatccagccccccagaagtcagcagctcccggcacagccccagaggaggcccctggaccattgccacctccgcccaccccttcctccgaggaccccggcttctcctctccgctaggcatgccagatcctcatctttaccatcaaatgggcctattgcttaaacatatgcaggatgtccgagtcctacttggccacttactcatggagctaagggaactgtctggtcaccgcaagccgggaacaacaaaagccactgctgaatag

SEQ ID NO: 299055 - DNA, 795 bp, Artificial Sequence
  derived and/or modified sequence
atgaagttaggatgcgttctgatggcatgggcattgtatctctcattgggtgtgctttgggtggcccagatgcttctagcggcaagcttcgagactctgcagtgcgaaggccctgtgtgtactgaagagtcaagctgtcataccgaggacgacctgaccgacgcacgagaagctggtttccaggtgaaagcctataccttttctgaaccatttcacctcatagtttcgtacgactggttaatcctgcagggacctgcgaagcctgtctttgaaggcgacttgcttgttctgagatgtcaggcttggcaagactggccactaacccaggtcacattttaccgggacggctccgccttaggaccccccggaccgaaccgcgagttctccattactgtcgtacagaaagccgatagcggccactatcactgcagtgggatcttccaatcaccaggccctggcatacctgagacggcatctgtggttgctattactgttcagggcgcttcatcctctgccgctccacctacgttaaatcccgcacctcagaagtccgccgccccgggaacagcaccagaggaggctcccggtcctcttccaccaccgcccaccccttcctccgaggaccccggcttctcctctccgctaggcatgccagatcctcatctttaccatcaaatgggcctattgcttaaacatatgcaggatgtccgagtcctacttggccacttactcatggagctaagggaactgtctggtcaccgcaagccgggaacaacaaaagccactgctgaatag

SEQ ID NO: 299056 - DNA, 795 bp, Artificial Sequence
  derived and/or modified sequence
atgaagctgggctgcgtgctgatggcctgggccctgtacctgagcctgggcgtgctgtgggtggcccagatgctgctggccgccagcttcgagaccctgcagtgcgagggccccgtgtgcaccgaggagagcagctgccacaccgaggacgacctgaccgacgccagagaggccggcttccaggtgaaggcctacaccttcagcgagcccttccacctgatcgtgagctacgactggctgatcctgcagggccccgccaagcccgtgttcgagggcgacctgctggtgctgagatgccaggcctggcaggactggcccctgacccaggtgaccttctacagagacggcagcgccctgggcccccccggccccaacagagagttcagcatcaccgtggtgcagaaggccgacagcggccactaccactgcagcggcatcttccagagccccggccccggcatccccgagaccgccagcgtggtggccatcaccgtgcagggcgccagcagcagcgccgccccccccaccctgaaccccgccccccagaagagcgccgcccccggcaccgcccccgaggaggcccccggccccctgccccccccccccacccccagcagcgaggaccccggcttcagcagccccctgggcatgcccgacccccacctgtaccaccagatgggcctgctgctgaagcacatgcaggacgtgagagtgctgctgggccacctgctgatggagctgagagagctgagcggccacagaaagcccggcaccaccaaggccaccgccgagtag

SEQ ID NO: 299057 - DNA, 795 bp, Artificial Sequence
  derived and/or modified sequence
atgaaactggggtgtgtattaatggcctgggctttgtatctgtcactgggtgtgctgtgggtggctcaaatgctacttgcagcatcctttgagacactgcaatgtgaaggtccagtgtgtacagaagagtcctcttgccacacagaggacgacctgacagatgcacgcgaagctggctttcaagttaaagcttacactttttccgagccattccatctgattgtgagttacgattggttaattctgcagggacctgcaaagcccgtctttgagggtgacctgctggtgctcaggtgtcaagcttggcaggactggcctctgacccaggttacgttctatcgcgacggatcagcgctcggtccccccggccccaatagggaatttagtataacagttgtgcagaaagccgattcaggacactatcattgtagcggtattttccagagtccaggccccggcatcccagaaaccgcttcggtcgtagcaataacagtccaaggggcatcctcatctgctgcgccgcccacgctgaaccccgccccacagaagagcgccgcccctggaactgctccagaggaggcccccggtccactccccccacccccgaccccctcgtccgaagaccccggcttcagtagccctctggggatgccagatcctcacctgtaccaccagatgggattgctgctgaaacatatgcaggatgtgagggtgctgcttggtcacctgcttatggagttaagagaattatccggacatcggaagccgggcaccacaaaagctactgcggaatag

SEQ ID NO: 299058 - DNA, 888 bp, Artificial Sequence
  derived and/or modified sequence
ggagacctaaacacagtcaccatgaagctgggctgtgtcctcatggcctgggccctctacctttcccttggtgtgctctgggtggcccagatgctactggctgccagttttgagacgctgcagtgtgagggacctgtctgcactgaggagagcagctgccacacggaggatgacttgactgatgcaagggaagctggcttccaggtcaaggcctacactttcagtgaacccttccacctgattgtgtcctatgactggctgatcctccaaggtccagccaagccagtttttgaaggggacctgctggttctgcgctgccaggcctggcaagactggccactgactcaggtgaccttctaccgagatggctcagctctgggtccccccgggcctaacagggaattctccatcaccgtggtacaaaaggcagacagcgggcactaccactgcagtggcatcttccagagccctggtcctgggatcccagaaacagcatctgttgtggctatcacagtccaaggtgcttccagctctgctgcacctcccacattgaatccagctcctcagaaatcagctgctccaggaactgctcctgaggaggcccctgggcctctgcctccgccgccaaccccatcttctgaggatccaggcttttcttctcctctggggatgccagatcctcatctgtatcaccagatgggccttcttctcaaacacatgcaggatgtgagagtcctcctcggtcacctgctcatggagttgagggaattatctggccaccggaagcctgggaccacaaaggctactgctgaatagaagtaaacagttcatccatgatctcacttaaccaccccaataaatctgattctttattttctcttcctgtcc

SEQ ID NO: 299059 - DNA, 795 bp, Artificial Sequence
  derived and/or modified sequence
atgaagctgggctgtgtgctgatggcctgggccctgtacctgagcctgggcgtgctgtgggtggcccagatgctgctggccgccagctttgagaccctgcagtgtgagggccctgtgtgcacagaggagagcagctgccacacagaagatgacctgacagatgcccgggaggccggcttccaggtgaaggcctacaccttcagcgagcccttccacctgattgtgtcctatgactggctgatcctgcagggccctgccaagcctgtgtttgaaggagacctgctggtgctgcgctgccaggcctggcaggactggcccctgacccaggtgaccttctacagagatggcagcgccctgggccccccaggccccaaccgggagttcagcatcaccgtggtgcagaaggctgacagcggccactaccactgcagcggcatcttccagagccctggccctggcatccctgagacagcctctgtggtggccatcaccgtgcagggcgccagcagcagcgctgccccacccaccctgaacccagccccccagaagtctgctgcccctggaacagcccctgaggaggcccctggccccctgcccccaccacccacccccagcagtgaagatcctggcttcagcagccccctgggcatgccagacccccacctgtaccaccagatgggcctgctgctgaagcacatgcaggatgtgcgggtgctgctgggccacctgctgatggagctgcgggagctgagcggccacaggaagccaggcaccaccaaggccacagctgagtag

SEQ ID NO: 299060 - DNA, 795 bp, Artificial Sequence
  derived and/or modified sequence
atgaagctgggctgcgtgctgatggcctgggccctgtacctgagcctgggcgtcctttgggtggcgcagatgctcttggccgctagctttgaaacactgcagtgcgagggcccagtgtgcactgaggaaagttcctgccataccgaggatgacttgacagatgccagggaagctgggttccaggtcaaggcatacactttttccgaacccttccacctcatagtgagttacgactggctgatcctgcagggacccgcaaagccagtgtttgagggggacctcttggtgctgcgctgccaggcatggcaagattggccactaacccaggtaactttctaccgggatggcagcgctttagggccgcccggccctaatcgggagttttccatcaccgtggtgcaaaaggccgattccggccattaccattgttctgggatctttcagtctcctggtccaggaattcctgagacagcttctgttgtggccataacagttcagggtgcctccagctccgcggcccccccgaccttaaaccccgctccacaaaaatctgccgcaccaggaaccgctccagaagaggctccagggcccctccccccaccccccaccccgtctagcgaagatccgggtttctccagccctttgggaatgccagatccgcacttgtatcaccagatggggctgctgctaaagcatatgcaggatgtcagagtgttgttgggacatctgctgatggaattacgggagctctcaggccatagaaagccagggacaactaaggccacagccgaatag

SEQ ID NO: 299061 - RNA, 795 nt, Artificial Sequence
  derived and/or modified sequence
augaaacuagguugcguucuuauggccugggcccucuacuuaucccuugguguacuguggguggcucagauguugcuggccgcgaguuucgaaacgcugcagugcgaaggcccugucuguacagaagaaagcucaugucacaccgaagacgaucuuacggacgcuagggaggccggguuccaggugaaggcauauaccuucagugaaccuuuucacuuaaucgucucuuacgacugguugauccugcagggccccgcgaaaccaguuuucgagggcgaucuucuaguguugagaugucaggcuuggcaagacuggccucucacccaggucaccuuuuaucgagauggaagcgcacuagguccuccugggcccaaccgcgaauuuucgaucacugugguucagaaagcagacaguggucacuaucacugcaguggcauuuuucaaagcccuggacccggcaucccugagacagccucagugguagcaaucacagugcagggagccucaucuuccgccgcccccccuacccucaauccagccccccagaagucagcagcucccggcacagccccagaggaggccccuggaccauugccaccuccgcccaccccuuccuccgaggaccccggcuucuccucuccgcuaggcaugccagauccucaucuuuaccaucaaaugggccuauugcuuaaacauaugcaggauguccgaguccuacuuggccacuuacucauggagcuaagggaacugucuggucaccgcaagccgggaacaacaaaagccacugcugaauag

SEQ ID NO: 299062 - RNA, 795 nt, Artificial Sequence
  derived and/or modified sequence
augaaguuaggaugcguucugauggcaugggcauuguaucucucauugggugugcuuuggguggcccagaugcuucuagcggcaagcuucgagacucugcagugcgaaggcccuguguguacugaagagucaagcugucauaccgaggacgaccugaccgacgcacgagaagcugguuuccaggugaaagccuauaccuuuucugaaccauuucaccucauaguuucguacgacugguuaauccugcagggaccugcgaagccugucuuugaaggcgacuugcuuguucugagaugucaggcuuggcaagacuggccacuaacccaggucacauuuuaccgggacggcuccgccuuaggaccccccggaccgaaccgcgaguucuccauuacugucguacagaaagccgauagcggccacuaucacugcagugggaucuuccaaucaccaggcccuggcauaccugagacggcaucugugguugcuauuacuguucagggcgcuucauccucugccgcuccaccuacguuaaaucccgcaccucagaaguccgccgccccgggaacagcaccagaggaggcucccgguccucuuccaccaccgcccaccccuuccuccgaggaccccggcuucuccucuccgcuaggcaugccagauccucaucuuuaccaucaaaugggccuauugcuuaaacauaugcaggauguccgaguccuacuuggccacuuacucauggagcuaagggaacugucuggucaccgcaagccgggaacaacaaaagccacugcugaauag

SEQ ID NO: 299063 - DNA, 471 bp, Artificial Sequence
  derived and/or modified sequence
ctgctccagcgatgcaagtggcatgaggagaacgatatactcttctgcgcactcgccgtttgtaagaaaatcgcctactgcattagtaacagtcttgctacacttttcgggatacagctgaccgaggcccacgtgccacttcaggactacgaggcgagcaattctgtgacacccaaaatggttgttctggatgccggacgatatcaaaaattacgcgtgggatctagtggcttctcacactttaatagctcgaatgaggagcaaagaagtaacacaccaattggtgactacccgtcccgggccaagatctccggtcagaatagctccgtgagagggaggggcatcactcggctcttggagtccatcagtaactcatcctcaaatatacacaagttttccaactgcgatacatctctcagtccgtatatgtctcaaaaagacggttataagtccttcagttctctgtcatag

SEQ ID NO: 299064 - DNA, 471 bp, Artificial Sequence
  derived and/or modified sequence
ctgctgcagcgctgcaagtggcatgaggagaatgacatcctcttctgtgccctggccgtgtgcaagaagatcgcctactgcatcagcaacagcctggccaccctgtttggcatccagctgacagaggcccacgtgcccctgcaggactatgaggccagcaacagcgtgacccccaagatggtggtgctggatgctggccgctaccagaagctgcgggtgggcagcagcggcttcagccacttcaacagcagcaatgaggagcagaggagcaacacccccatcggggactaccccagccgggccaagatcagcggccagaacagctctgtgcggggccggggcatcacccggctgctggagagcatcagcaacagcagcagcaacatccacaagttcagcaactgtgacaccagcctgagcccctacatgagccagaaggatggctacaagagcttcagcagcctgtcctag

SEQ ID NO: 299065 - DNA, 793 bp, Artificial Sequence
  derived and/or modified sequence
ctacttcagaggtgcaagtggcatgaagaaaatgatattctcttctgtgctttagctgtttgcaagaagattgcgtactgcatcagtaattctctggccactctctttggaatccagctcacagaggctcatgtaccactacaagattatgaggccagcaatagtgtgacacccaaaatggttgtattggatgcagggcgttaccagaagctaagggttgggagttcaggattctctcatttcaactcttctaatgaggaacaaagatcaaacacacccattggtgactacccatctagggcaaaaatttctggccaaaacagcagcgttcggggaagaggaattacccgcttactagagagcatttccaattcttccagcaatatccacaaattctccaactgtgacacttcactctcaccttacatgtcccaaaaagatggatacaaatctttctcttccttatcttaatgatggtactcttttcaatttctgaaaacagtaacaggcccaacttccttcttactacagtcatattaaacagatcacatcaatgacaaatgtcactactataaaaactacttaatttgtaaggaaattgtttcatagatttaaaaaaattgtggttggagagcatcttggcatttgtgctttttttcttgagggattgttctgcttcctggctgtatgatgggtatatcattaaagtttggagtcctatatgaacaaaactgacatttttagagttgtacttttgggaatgttatagattgatcattctttctcctgataa

SEQ ID NO: 299066 - DNA, 471 bp, Artificial Sequence
  derived and/or modified sequence
ctgctgcagcggtgcaagtggcacgaggagaacgacatcctgttctgcgctctcgcagtgtgcaaaaaaatcgcctactgtattagtaacagcctggccaccttattcgggatccagctgacggaggctcatgtcccgctgcaggattacgaggcctctaacagcgtcacgccaaagatggtggtgctcgatgcggggcggtatcagaaattaagggtcggatctagtggattcagccatttcaatagtagtaacgaggaacaacggtccaacaccccgatcggggattatccctctagagccaagatcagtggacagaactcctctgtaagaggcagaggcatcactagactccttgagtccatttccaacagcagtagcaacatacataaattctctaactgtgatacgtccctgtctccctacatgagccagaaggacggttataaatctttttctagtctgtcttag

SEQ ID NO: 299067 - DNA, 471 bp, Artificial Sequence
  derived and/or modified sequence
ctgctgcaaaggtgcaagtggcatgaagaaaatgatattctgttttgtgcactggcggtgtgcaagaagatcgcatactgcatatctaactcgctcgctacactgttcggcatccagctcaccgaggcccacgttccactgcaagattatgaggcatcaaatagcgtgacaccaaaaatggtcgtgctcgatgctgggaggtatcagaaactcagggtgggctcatcagggttctctcactttaatagcagcaatgaagagcagaggtcaaacacacccattggcgactatccgtcccgggctaaaataagtggtcagaatagcagtgtgcgcggaaggggaattactcgcctgttagagtccattagtaattcttcgtccaacatacacaaattcagcaattgcgacacgagtttatcaccttacatgagtcagaaggacggttacaagtccttctctagcctatcctag

SEQ ID NO: 299068 - DNA, 471 bp, Artificial Sequence
  derived and/or modified sequence
ctgctgcagagatgcaagtggcacgaggagaacgacatcctgttctgcgccctggccgtgtgcaagaagatcgcctactgcatcagcaacagcctggccaccctgttcggcatccagctgaccgaggcccacgtgcccctgcaggactacgaggccagcaacagcgtgacccccaagatggtggtgctggacgccggcagataccagaagctgagagtgggcagcagcggcttcagccacttcaacagcagcaacgaggagcagagaagcaacacccccatcggcgactaccccagcagagccaagatcagcggccagaacagcagcgtgagaggcagaggcatcaccagactgctggagagcatcagcaacagcagcagcaacatccacaagttcagcaactgcgacaccagcctgagcccctacatgagccagaaggacggctacaagagcttcagcagcctgagctag

SEQ ID NO: 299069 - protein, 1095 aa, Artificial Sequence
  derived and/or modified sequence
MNITHAYSQGHQKLNLDTVSYNMLGVDSDGCWWAPPGMGLQATGGGAHNAPCAKGHLGDYQLGNSSHPAVNMHLGMSLLETDGDGGFMACAPLWSRACGSSVFSSGICARVDASFQPQGSLAPTAQRCPTYMDVVIVLDGSNSIYPWSEVQTFLRRLVGKLFIDPEQIQVGLVQYGESPVHEWSLGDFRTKEEVVRAAKNLSRREGRETKTAQAIMVACTEGFSQSHGGRPEAARLLVVVTDGESHDGEELPAALKACEAGRVTRYGIAVLGHYLRRQRDPSSFLREIRTIASDPDERFFFNVTDEAALTDIVDALGDRIFGLEGSHAENESSFGLEMSQIGFSTHRLKDGILFGMVGAYDWGGSVLWLEGGHRLFPPRMALEDEFPPALQNHAAYLGYSVSSMLLRGGRRLFLSGAPRFRHRGKVIAFQLKKDGAVRVAQSLQGEQIGSYFGSELCPLDTDRDGTTDVLLVAAPMFLGPQNKETGRVYVYLVGQQSLLTLQGTLQPEPPQDARFGFAMGALPDLNQDGFADVAVGAPLEDGHQGALYLYHGTQSGVRPHPAQRIAAASMPHALSYFGRSVDGRLDLDGDDLVDVAVGAQGAAILLSSRPIVHLTPSLEVTPQAISVVQRDCRRRGQEAVCLTAALCFQVTSRTPGRWDHQFYMRFTASLDEWTAGARAAFDGSGQRLSPRRLRLSVGNVTCEQLHFHVLDTSDYLRPVALTVTFALDNTTKPGPVLNEGSPTSIQKLVPFSKDCGPDNECVTDLVLQVNMDIRGSRKAPFVVRGGRRKVLVSTTLENRKENAYNTSLSLIFSRNLHLASLTPQRESPIKVECAAPSAHARLCSVGHPVFQTGAKVTFLLEFEFSCSSLLSQVFVKLTASSDSLERNGTLQDNTAQTSAYIQYEPHLLFSSESTLHRYEVHPYGTLPVGPGPEFKTTLRVQNLGCYVVSGLIISALLPAVAHGGNYFLSLSQVITNNASCIVQNLTEPPGPPVHPEELQHTNRLAKFKSLTVVSTFELGTEEGSVLQLTEASRWSESLLEVVQTRPILISLWILIGSVLGGLLLLALLVFCLWKLGFFAHKKIPEEEKREEKLEQ

SEQ ID NO: 299070 - DNA, 3288 bp, Artificial Sequence
  derived and/or modified sequence
atgaacatcacccacgcctacagccagggccaccagaagctgaacctggacaccgtgagctacaacatgctgggcgtggacagcgacggctgctggtgggccccccccggcatgggcctgcaggccaccggcggcggcgcccacaacgccccctgcgccaagggccacctgggcgactaccagctgggcaacagcagccaccccgccgtgaacatgcacctgggcatgagcctgctggagaccgacggcgacggcggcttcatggcctgcgcccccctgtggagcagagcctgcggcagcagcgtgttcagcagcggcatctgcgccagagtggacgccagcttccagccccagggcagcctggcccccaccgcccagagatgccccacctacatggacgtggtgatcgtgctggacggcagcaacagcatctacccctggagcgaggtgcagaccttcctgagaagactggtgggcaagctgttcatcgaccccgagcagatccaggtgggcctggtgcagtacggcgagagccccgtgcacgagtggagcctgggcgacttcagaaccaaggaggaggtggtgagagccgccaagaacctgagcagaagagagggcagagagaccaagaccgcccaggccatcatggtggcctgcaccgagggcttcagccagagccacggcggcagacccgaggccgccagactgctggtggtggtgaccgacggcgagagccacgacggcgaggagctgcccgccgccctgaaggcctgcgaggccggcagagtgaccagatacggcatcgccgtgctgggccactacctgagaagacagagagaccccagcagcttcctgagagagatcagaaccatcgccagcgaccccgacgagagattcttcttcaacgtgaccgacgaggccgccctgaccgacatcgtggacgccctgggcgacagaatcttcggcctggagggcagccacgccgagaacgagagcagcttcggcctggagatgagccagatcggcttcagcacccacagactgaaggacggcatcctgttcggcatggtgggcgcctacgactggggcggcagcgtgctgtggctggagggcggccacagactgttcccccccagaatggccctggaggacgagttcccccccgccctgcagaaccacgccgcctacctgggctacagcgtgagcagcatgctgctgagaggcggcagaagactgttcctgagcggcgcccccagattcagacacagaggcaaggtgatcgccttccagctgaagaaggacggcgccgtgagagtggcccagagcctgcagggcgagcagatcggcagctacttcggcagcgagctgtgccccctggacaccgacagagacggcaccaccgacgtgctgctggtggccgcccccatgttcctgggcccccagaacaaggagaccggcagagtgtacgtgtacctggtgggccagcagagcctgctgaccctgcagggcaccctgcagcccgagcccccccaggacgccagattcggcttcgccatgggcgccctgcccgacctgaaccaggacggcttcgccgacgtggccgtgggcgcccccctggaggacggccaccagggcgccctgtacctgtaccacggcacccagagcggcgtgagaccccaccccgcccagagaatcgccgccgccagcatgccccacgccctgagctacttcggcagaagcgtggacggcagactggacctggacggcgacgacctggtggacgtggccgtgggcgcccagggcgccgccatcctgctgagcagcagacccatcgtgcacctgacccccagcctggaggtgaccccccaggccatcagcgtggtgcagagagactgcagaagaagaggccaggaggccgtgtgcctgaccgccgccctgtgcttccaggtgaccagcagaacccccggcagatgggaccaccagttctacatgagattcaccgccagcctggacgagtggaccgccggcgccagagccgccttcgacggcagcggccagagactgagccccagaagactgagactgagcgtgggcaacgtgacctgcgagcagctgcacttccacgtgctggacaccagcgactacctgagacccgtggccctgaccgtgaccttcgccctggacaacaccaccaagcccggccccgtgctgaacgagggcagccccaccagcatccagaagctggtgcccttcagcaaggactgcggccccgacaacgagtgcgtgaccgacctggtgctgcaggtgaacatggacatcagaggcagcagaaaggcccccttcgtggtgagaggcggcagaagaaaggtgctggtgagcaccaccctggagaacagaaaggagaacgcctacaacaccagcctgagcctgatcttcagcagaaacctgcacctggccagcctgaccccccagagagagagccccatcaaggtggagtgcgccgcccccagcgcccacgccagactgtgcagcgtgggccaccccgtgttccagaccggcgccaaggtgaccttcctgctggagttcgagttcagctgcagcagcctgctgagccaggtgttcgtgaagctgaccgccagcagcgacagcctggagagaaacggcaccctgcaggacaacaccgcccagaccagcgcctacatccagtacgagccccacctgctgttcagcagcgagagcaccctgcacagatacgaggtgcacccctacggcaccctgcccgtgggccccggccccgagttcaagaccaccctgagagtgcagaacctgggctgctacgtggtgagcggcctgatcatcagcgccctgctgcccgccgtggcccacggcggcaactacttcctgagcctgagccaggtgatcaccaacaacgccagctgcatcgtgcagaacctgaccgagccccccggcccccccgtgcaccccgaggagctgcagcacaccaacagactggccaagttcaagagcctgaccgtggtgagcaccttcgagctgggcaccgaggagggcagcgtgctgcagctgaccgaggccagcagatggagcgagagcctgctggaggtggtgcagaccagacccatcctgatcagcctgtggatcctgatcggcagcgtgctgggcggcctgctgctgctggccctgctggtgttctgcctgtggaagctgggcttcttcgcccacaagaagatccccgaggaggagaagagagaggagaagctggagcagtag

SEQ ID NO: 299071 - DNA, 3288 bp, Artificial Sequence
  derived and/or modified sequence
atgaatattacacacgcttatagccagggtcaccaaaaactcaatctagatactgtcagttacaatatgcttggcgttgattctgacgggtgttggtgggccccacctgggatgggactgcaagccacaggcgggggcgctcacaacgcaccatgtgcaaagggccacctcggggattatcagctgggcaactcgtcgcatcctgccgttaacatgcacctgggtatgtctctcttagagaccgacggggatggaggttttatggcgtgtgctccactgtggtcaagggcctgtggatcctccgtgtttagctccggcatttgcgcaagggtggatgccagcttccagccgcaggggagcctcgcgcctacggcccaacgctgccccacctacatggatgtggttattgtgctggacggcagtaatagcatttacccttggtcggaagtgcagaccttcttacgaaggcttgtgggaaaactgtttattgatcctgagcagattcaggttggtctggtccagtacggggagtcccctgtccatgagtggtccctgggggattttcgaacaaaagaagaggtggtcagagccgcaaaaaatttatcgagacgcgaggggagggagacaaaaaccgctcaagccattatggttgcttgcacagaaggcttctcgcagagtcacggtggcaggccagaggctgcccggttgctggtggtggtaaccgacggggaatcccatgatggtgaagagctccctgccgctctcaaagcctgcgaggctggacgggtgacaaggtacggtattgcagtcctggggcactacctgaggaggcagcgagatccctccagcttcctgagagaaatccgcaccatcgcctctgatccagacgaaagatttttttttaacgtaaccgatgaagctgcattaacagatatcgtggatgcgctgggagaccgcattttcggcttggaaggcagccacgctgagaatgagtcgagctttggactcgagatgtcccagattggattctctactcatcgcttgaaggacgggatcctcttcgggatggtcggagcatatgactggggaggttcagtattgtggctcgaagggggccacaggctcttcccgccccgaatggctttggaggacgagtttccaccagccctgcagaaccacgctgcatacttgggctatagcgtgagctcaatgctgctgcgaggggggcgaaggctgttcttgtctggcgcgcccaggttccgacaccgaggaaaggtgattgcctttcagttaaagaaggacggcgccgtccgagtcgcccaaagcctccagggcgaacaaatcgggtcatactttggctctgaactgtgtcccctggataccgatagggacgggaccactgacgtccttctcgtcgctgccccaatgtttctaggtccccagaacaaggaaacggggagagtctatgtgtacttggttggccaacagtctctgctgaccctgcagggcaccttacagccagagccaccgcaggacgccagattcgggttcgccatgggagctctgcccgatttgaaccaggacggatttgcagacgtggccgtcggagccccactggaggatgggcaccagggggctctatacctctaccacgggacccagagcggagtgcgtccacatcctgcccagagaattgctgctgctagcatgcctcatgctctatcctacttcggccggtctgtagatggacgcctggacctagacggcgatgatctggtggacgtcgctgtgggtgcccaaggtgcagccatcttgctgtcatctcggcccatagttcacctcaccccttcactggaagtgactccccaggccatctccgtggtgcaacgtgattgtcgccgcaggggacaagaggccgtctgcctgaccgcagctttatgctttcaagtcacctcacgcaccccggggcgatgggaccaccagttttatatgaggttcaccgcaagcctcgacgagtggacagcgggagccagggcggcattcgacggcagtgggcagcggctgagtccccggcgtctgcgtctgtccgtgggaaacgtgacttgtgagcagttgcatttccacgtccttgacaccagcgactatctgaggcctgttgctctcacagtcacattcgctctagacaacacaactaagccgggacccgtgctcaacgagggctctcctactagcatccaaaaactggtgcccttttcgaaggactgcggccctgataacgaatgtgtgaccgacctggtgctgcaggttaacatggatatacggggctcccggaaggccccattcgtagtgcggggggggcggcgcaaagtcctcgtatccaccacacttgaaaacaggaaggagaatgcttataacacatcacttagccttatcttctctcgcaatttgcacctggcttccctcacccctcagagggagtcccctattaaagtggagtgcgccgctccaagcgctcacgccaggctttgttcagttggtcatcccgtctttcagactggggccaaggtgaccttccttctcgagtttgagtttagctgcagttcactcctctctcaggtatttgtgaaactgactgccagctccgactctctcgagagaaacggaacactgcaagataatacagcccagacttccgcttacattcaatatgaaccacacctgttgttcagttctgagtcaaccctgcatcggtacgaggtgcatccctatggcacattaccggtgggtccgggcccagaatttaagacaacactgagagttcagaatctgggatgctacgtggtctctgggttaataatctccgccctactccctgcggtcgcccacggcggtaattactttctgagcctgtctcaagtcataacaaataatgctagctgcatcgtgcagaatctgaccgaacctcccggccctcccgtgcacccggaggagctgcagcataccaatcgtctggcgaaattcaagagcctcacagtcgtgtcaactttcgaactgggaacggaagaaggcagcgtccttcagcttaccgaggcttcaagatggagtgagtccctgctcgaggtggttcagaccaggccaatcctcatttccttgtggattctgatcggtagcgttcttggcggcctgttacttttagcgttgttagttttctgcctgtggaagcttggatttttcgctcataagaagataccagaagaggagaagcgagaggagaagctcgagcagtag

SEQ ID NO: 299072 - DNA, 5029 bp, Artificial Sequence
  derived and/or modified sequence
gggaaagtgaagaaaacagaaaaggagagggacagaggccagaggacttctcatactggacagaaaccgatcaggcatggaactccccttcgtcactcacctgttcttgcccctggtgttcctgacaggtctctgctccccctttaacctggatgaacatcacccacgcctattcccagggccaccagaagctgaatttggatacagtgtcttacaacatgttgggggtggacagcgatggatgctggtgggcgccccctgggatgggccttcaggcgaccggagggggggcccacaatgccccatgtgccaagggccacttaggtgactaccaactgggaaattcatctcatcctgctgtgaatatgcacctggggatgtctctgttagagacagatggtgatgggggattcatggcctgtgcccctctctggtctcgtgcttgtggcagctctgtcttcagttctgggatatgtgcccgtgtggatgcttcattccagcctcagggaagcctggcacccactgcccaacgctgcccaacatacatggatgttgtcattgtcttggatggctccaacagcatctacccctggtctgaagttcagaccttcctacgaagactggtagggaaactgtttattgacccagaacagatacaggtgggactggtacagtatggggagagccctgtacatgagtggtccctgggagatttccgaacgaaggaagaagtggtgagagcagcaaagaacctcagtcggcgggagggacgagaaacaaagactgcccaagcaataatggtggcctgcacagaagggttcagtcagtcccatgggggccgacccgaggctgccaggctactggtggttgtcactgatggagagtcccatgatggagaggagcttcctgcagcactaaaggcctgtgaggctggaagagtgacacgctatgggattgcagtccttggtcactacctccggcggcagcgagatcccagctctttcctgagagaaattagaactattgccagtgatccagatgagcgattctttttcaatgtcacagatgaggctgctctgactgacattgtggatgcactaggagatcggatttttggccttgaagggtcccatgcagaaaacgaaagctcctttgggctggaaatgtctcagattggtttctccactcatcggctaaaggatgggattctttttgggatggtgggggcctatgactggggaggctctgtgctatggcttgaaggaggccaccgccttttccccccacgaatggcactggaagacgagttcccccctgcattgcagaaccatgcagcctacctgggttactctgtttcttccatgcttttgcggggtggacgccgcctgtttctctctggggctcctcgatttagacatcgaggaaaagtcatcgccttccagcttaagaaagatggggctgtgagggttgcccagagcctccagggggagcagattggttcatactttggcagtgagctctgcccattggatacagatagggatggaacaactgatgtcttacttgtggctgcccccatgttcctgggaccccagaacaaggaaacaggacgtgtttatgtgtatctggtaggccagcagtccttgctgaccctccaaggaacacttcagccagaacccccccaggatgctcggtttggctttgccatgggagctcttcctgatctgaaccaagatggttttgctgatgtggctgtgggggcgcctctggaagatgggcaccagggagcactgtacctgtaccatggaacccagagtggagtcaggccccatcctgcccagaggattgctgctgcctccatgccacatgccctcagctactttggccgaagtgtggatggtcggctagatctggatggagatgatctggtcgatgtggctgtgggtgcccagggggcagccatcctgctcagctcccggcccattgtccatctgaccccatcactggaggtgaccccacaggccatcagtgtggttcagagggactgtaggcggcgaggccaagaggcagtctgtctgactgcagccctttgcttccaagtgacctcccgtactcctggtcgctgggatcaccaattctacatgaggttcaccgcatcactggatgaatggactgctggggcacgtgcagcatttgatggctctggccagaggttgtcccctcggaggctccggctcagtgtggggaatgtcacttgtgagcagctacacttccatgtgctggatacatcagattacctccggccagtggccttgactgtgacctttgccttggacaatactacaaagccagggcctgtgctgaatgagggctcacccacctctatacaaaagctggtccccttctcaaaggattgtggccctgacaatgaatgtgtcacagacctggtgcttcaagtgaatatggacatcagaggctccaggaaggccccatttgtggttcgaggtggccggcggaaagtgctggtatctacaactctggagaacagaaaggaaaatgcttacaatacgagcctgagtctcatcttctctagaaacctccacctggccagtctcactcctcagagagagagcccaataaaggtggaatgtgccgccccttctgctcatgcccggctctgcagtgtggggcatcctgtcttccagactggagccaaggtgacctttctgctagagtttgagtttagctgctcctctctcctgagccaggtcttcgtgaagctgactgccagcagtgacagcctggagagaaatgggacccttcaagataacacagcccagacctcagcctacatccaatatgagccccacctcctgttctctagtgagtctaccctgcaccgctatgaggttcacccatatgggaccctcccagtgggtcctggcccagaattcaaaaccactctcagggttcagaacctaggctgctatgtggtcagtggcctcatcatctcagccctccttccagctgtggcccatgggggcaattacttcctatcactgtctcaagtcatcactaacaatgcaagctgcatagtgcagaacctgactgaacccccaggcccacctgtgcatccagaggagcttcaacacacaaacagactggccaagttcaagtccctgacggtggtcagcacctttgagctgggaaccgaagagggcagtgtcctacagctgactgaagcctcccgttggagtgagagcctcttggaggtggttcagacccggcctatcctcatctccctgtggatcctcataggcagtgtcctgggagggttgctcctgcttgctctccttgtcttctgcctgtggaagcttggcttctttgcccataagaaaatccctgaggaagaaaaaagagaagagaagttggagcaatgaatgtagaataagggtctagaaagtcctccctggcagcttcttcaagagacttgcataaaagcagaggtttgggggctcagatgggacaagaagccgcctctggactatctccccagaccagcagcctgacttgacttttgagtcctagggatgctgctggctagagatgaggctttacctcagacaagaagagctggcaccaaaactagccatgctcccaccctctgcttccctcctcctcgtgatcctggttccatagccaacactggggcttttgtttggggtccttttatccccaggaatcaataatttttttgcctaggtgcctgactcctttcagattccctctttatcttccctcacagtttggaaaggatgagggttatcttcctcgattcttccaccctctcactttcctgcctgttccccactccacaggagggagctgacgttggcttgaaaggagtaaagtcaacatctgctgctttcctgtggactctggtgattcatagagccggatggggagagtcaacaggaaaaaaggagggaggaggaaaagccacaagagacattctgtacaattccaaggaacagagaagcctttagacaggcaactgccatcccccctgaaacctgagacctgtagtgcactcgaccgccctcaggtgttggtgaaacagagctgcccccaggctcgctgggcataggcttcctgattccaagccttttctgggagcaaagccagggcctggtgcctgattttctgaagccaggagccctcaggtggctggagctggaatagcagggaggactgggtgtacctaggcagtattttctctacttctctcaagtcttatactcactcttgagccctccttggggcctgcttagaaagcagacaggagagagagtactgctacttgatgatgggaaatgctttcactttaccagctttgggaagcagcagccccatgggatctaaaagtgtggagtctgcattaagaaacctacatgggtggcatggggctctggggagcaagcccttacttgctcagcactggttatgtagcacaaatagctcctaggaaaatgtttctggggcaaccctagaaccctggtcatattttgcagggtttctctggtggaatcagtttgccagcccttgcttgatgcttactggaaatctccaggttaatttctatctctgatccctccccaacccactccatatttgggtcatggacagtaaaggcagttggattctcatagacaactgggtaacttatatttctttgtaatcaagacttgagatatcgaagtcagttattggtctccagagtgcagctctgggagccttttgaagaatcagcactcattaagagctgagaagagagaagacctgattgggtggttgactagcagtcacagaacctgtcctcccaggctgttcctgaggcctgaccacagtatttattttggcatgtctctggccttctgcagaggcccaccctcatgggcattgtctctgtttcccagtggggtggacagtatatcagatggtcagaacaaataaagttcagtgtcaaatg

SEQ ID NO: 299073 - DNA, 3288 bp, Artificial Sequence
  derived and/or modified sequence
atgaacatcacccacgcctacagccagggccaccagaagctgaacctggacacagtgtcctacaacatgctgggcgtggacagtgatggctgctggtgggcccctcctggcatgggcctgcaggccactggaggaggagcccacaatgccccctgtgccaagggccacctgggggactaccagctgggcaacagcagccaccctgctgtgaacatgcacctgggcatgagcctgctggagacagatggagatggcggcttcatggcctgtgcccccctgtggagccgggcctgtggcagctctgtgttcagcagcggcatctgtgcccgggtggatgccagcttccagccccagggcagcctggcccccacagcccagcgctgccccacctacatggatgtggtgattgtgctggatggcagcaacagcatctacccctggagcgaggtgcagaccttcctgcggcggctggtgggcaagctgttcattgatcctgagcagatccaggtgggcctggtgcagtatggagagagccctgtgcatgagtggagcctgggggacttccgcaccaaggaggaggtggtgcgggccgccaagaacctgagcagaagagagggccgggagaccaagacagcccaggccatcatggtggcctgcacagagggcttcagccagagccatggaggccggcctgaggccgcccggctgctggtggtggtgacagatggagagagccatgatggagaggagctgcctgctgccctgaaggcctgtgaggccggccgggtgaccaggtatggaattgctgtgctgggccactacctgcggcggcagagggaccccagcagcttcctgcgggagatccgcaccatcgccagtgaccctgatgagcgcttcttcttcaacgtgacagatgaagctgccctgacagacatcgtggatgccctgggggaccgcatcttcggcctggagggcagccatgctgaaaatgaaagcagctttggcctggagatgagccagatcggcttcagcacccaccggctgaaggatggcatcctgtttggcatggtgggcgcctatgactggggcggctctgtgctgtggctggagggcggccacaggctcttcccccccaggatggccctggaggatgagttccccccagccctgcagaaccacgccgcctacctgggctacagcgtgtcctccatgctgctgcggggcggccggcggctcttcctgagcggggccccccgcttccgccaccggggcaaggtgattgccttccagctgaagaaggatggagctgtgcgggtggcccagagcctgcagggcgagcagatcggcagctacttcggcagcgagctgtgccccctggacacagacagagatggcaccacagatgtgctgctggtggccgcccccatgttcctgggcccccagaacaaggagaccggccgggtgtatgtgtacctggtgggccagcagagcctgctgaccctgcagggcaccctgcagcctgagcccccccaggatgccaggtttggatttgccatgggcgccctgcctgacctgaaccaggacggctttgctgatgtggccgtgggcgcccccctggaggatggccaccagggcgccctgtacctgtaccacggcacccagagcggcgtgcggccccacccagcccagagaattgctgctgcctccatgccccacgccctgagctacttcggccgctctgtggatggccgcctggacctggatggagatgacctggtggatgtggccgtgggcgcccagggcgccgccatcctgctgagcagccggcccatcgtgcacctgacccccagcctggaggtgaccccccaggccatctctgtggtgcagagggactgcagaagaagaggccaggaggccgtgtgcctgacagctgccctgtgcttccaggtgaccagcaggaccccaggccgctgggaccaccagttctacatgaggttcaccgccagcctggatgagtggacagctggggcccgggccgcctttgatggcagcggccagaggctgagcccccggcggctgcggctgtctgtgggcaatgtgacctgtgagcagctgcacttccacgtgctggacaccagtgactacctgcggcctgtggccctgactgtgacctttgccctggacaacaccaccaagccaggccctgtgctgaatgaaggcagccccaccagcatccagaagctggtgcccttcagcaaggactgtggccctgacaatgaatgtgtgacagacctggtgctgcaggtgaacatggacatccggggcagcaggaaggccccctttgtggtgcggggcggccgcaggaaggtgctggtgtccaccaccctggagaacagaaaagaaaatgcctacaacaccagcctgagcctcatcttcagcaggaacctgcacctggccagcctgaccccccagcgggagagccccatcaaggtggagtgtgccgcccccagcgcccacgcccggctgtgcagcgtgggccaccctgtgttccagacaggagccaaggtgaccttcctgctggagtttgagttcagctgcagcagcctgctgagccaggtgtttgtgaagctgacagccagcagtgacagcctggagagaaatggcaccctgcaggacaacacagcccagaccagcgcctacatccagtatgagccccacctgctcttcagcagcgagagcaccctgcacagatatgaggtgcacccctacggcaccctgcctgtgggccctggccctgagttcaagaccaccctgcgggtgcagaacctgggctgctacgtggtgtctggcctcatcatcagcgccctgctgcctgctgtggcccacggcggcaactacttcctgagcctgagccaggtgatcaccaacaatgccagctgcatcgtgcagaacctgacagagcccccaggcccccctgtgcaccctgaggagctgcagcacaccaaccggctggccaagttcaagagcctgactgtggtgtccacctttgagctgggcacagaggagggctctgtgctgcagctgacagaggccagccgctggagcgagagcctgctggaggtggtgcagacccggcccatcctgatcagcctgtggatcctgattggctctgtgctgggcggcctgctgctgctggccctgctggtgttctgcctgtggaagctgggcttctttgcccacaagaagatccctgaggaggagaagcgggaggagaagctggagcagtag

SEQ ID NO: 299074 - DNA, 3288 bp, Artificial Sequence
  derived and/or modified sequence
atgaacatcacccacgcctacagccagggccaccagaagctgaacctggacactgtgagctacaacatgctgggtgtggattcggatggatgctggtgggctccccctggcatgggcctgcaggccacgggtgggggggcacacaacgccccttgtgccaagggtcatttaggtgattatcagctaggcaactcctcccaccccgccgtgaatatgcatctcggcatgagtctgttggaaaccgacggagacggagggtttatggcgtgcgctcccctctggagccgcgcctgtggatcctctgtcttttcctccggcatctgtgctagggtggacgctagctttcaacctcaagggtccctcgcacctacagctcagcgctgccccacgtatatggacgtagttatagtcttggatggatccaatagtatctatccttggtcagaagtgcagacattccttcggaggctggtgggaaagctttttattgatccagaacaaatccaggtgggtctggtacaatacggagaatcaccggtgcacgagtggtctcttggcgacttccggacaaaagaggaggtcgtccgcgccgccaagaacctctcgagacgcgagggcagggagactaaaaccgcccaggcaattatggtggcttgcaccgagggcttcagccaatctcacggaggaaggcctgaggccgctcggctccttgtagtcgtgactgacggcgagtcccatgacggtgaagaactacctgccgctcttaaggcttgtgaagccggtcgagttacccggtacggcattgcggtattaggccactacctccggaggcagcgggatccttcatctttcttgagggagatccggacgattgcatcggatcccgatgagaggtttttcttcaacgtgactgacgaggctgccctaactgacatcgtagatgccctgggcgatcggatattcgggctggaaggcagtcacgctgaaaatgaatcgagctttggcctcgaaatgtctcagataggctttagtacgcatcgtcttaaagacggtattctgttcggcatggtgggggcttatgattggggtgggagcgtcttgtggcttgaaggaggtcataggctctttccgcctcgtatggccctggaggacgagtttcctccagccctccagaatcatgctgcttatctgggatactcagtctcctcaatgctgctacgcggcggaaggcgcctcttccttagtggcgcacctcgtttcaggcatcgcgggaaagtgattgcctttcagctgaaaaaagacggtgccgtgcgcgttgctcagagcctacagggagagcagataggatcctactttggtagtgagctgtgccctttggacactgatcgtgatggcacaactgatgtgttgttggttgcggcaccaatgtttttgggcccccagaataaagaaacaggtagggtgtatgtttatcttgtggggcagcagtctttgctcacgttgcaaggaaccctgcagcctgagccgccccaggatgctcgctttggctttgcaatgggggcgctaccggacctgaaccaggatgggtttgccgacgttgctgtcggcgctccactggaggatggccaccagggtgcactatatttgtatcatggaacacagagcggcgtgaggccacatcctgctcaacgtatcgctgccgccagtatgcctcatgccctctcgtatttcggccgatctgttgacggtcgcctggatctggacggcgacgaccttgttgatgtggctgtcggagcccaaggagccgccattctcctgagctcccgccctatcgtccatcttaccccatcccttgaggttacaccgcaggccatctccgtggtccagagggactgccggagaagaggacaggaagcggtgtgcctcacagccgccttgtgctttcaggtcacctcccggactccaggaaggtgggaccatcagttctatatgagattcacggcctccctcgatgagtggacagcaggcgcacgagcggccttcgacggctcagggcagaggctgagccctagacggctgaggctgagcgttggcaacgtgacatgcgaacagctccatttccatgtactcgacacaagcgactatttgaggcctgtggcacttacagtcacatttgccctagataacacaaccaagccgggccccgtgctcaacgagggctcaccaacctccatccagaagctggtgccattctccaaagactgtgggccagataacgaatgtgtgactgacctggtgctgcaagtgaacatggacatcagaggctctaggaaagccccgttcgtggtcagagggggcagaaggaaagttttggtgtctacaactttagagaacagaaaggagaacgcttataacacatcactgtctttgatcttcagccgcaatcttcacctggccagcctgaccccccagcgcgagagtcccattaaggtcgaatgcgctgcacctagcgcccatgcccgactgtgttctgttggccatccggtgttccagacaggcgctaaagtgactttcctgctcgaattcgagttcagttgctcatcactcctgagtcaggtgttcgtcaaactgactgcatcttccgattcactggagcggaacggaactctgcaggataacaccgcccagacatccgcatacatccagtacgagccacacttactgttttcatccgaatctacactgcaccgctatgaagtgcacccatacggcactctgcctgttggaccggggcctgaattcaagacgacactgagggtccaaaatctggggtgttacgtggtgagtggcttgatcatttcagcactactgcccgcagtggcacatggcggcaactattttttatcactctctcaagttataactaacaacgcctcctgtatcgtgcagaatctcaccgaacctccagggccccccgtacacccagaagaactccagcacacaaacagactggctaagttcaagtctctgacagttgtgtctacatttgagcttggaactgaggaggggtcagtgctccagttgacggaggccagtaggtggagcgaaagtttactcgaggttgtgcaaacacggcctatactgatctcactctggattctgataggcagtgtgctcggagggctccttttgttggccttattggtcttctgtctctggaaactcggatttttcgcacacaaaaaaattcctgaagaggagaagcgcgaagagaagctggagcagtag

SEQ ID NO: 299075 - DNA, 3288 bp, Artificial Sequence
  derived and/or modified sequence
atgaacatcacccacgcttattcccaggggcatcagaaactgaatctggacactgtcagttataacatgctaggtgtggacagcgacggctgttggtgggcgccacctgggatgggactacaggctacaggtggcggagcccacaatgctccatgtgctaagggacacctgggtgactatcagctggggaactcaagtcatcctgctgttaacatgcatttagggatgtctctcctggagaccgatggggatggaggcttcatggcatgtgcaccgctttggagcagggcctgcgggagcagcgtcttcagtagtggtatctgtgcacgggtggacgcatccttccaaccccaggggtccctggctcctactgcccagcggtgtcccacctacatggacgtggttattgttctcgatggatccaattctatatacccttggagtgaagtccagacattcctgcgcagactggttgggaagctcttcatcgaccctgagcaaattcaagtcggactggttcagtatggagaaagtcccgtgcatgagtggagcctgggagatttccgcacgaaggaggaggtggttagagccgcaaagaacttatccagaagggaggggcgtgagacgaagactgctcaggctatcatggtggcatgcacagaaggtttctcccagtcccatgggggacggccagaggctgctcggctcctcgtggtcgtaacagacggagagtcccatgacggcgaggagctgcccgctgccctcaaggcttgtgaggccggtagggttactcgctatggcatcgccgtgctggggcactatctacgccgtcagcgggatccatcctctttcttgagggagattcgcactattgcaagcgatccggatgaacgattcttcttcaacgtgacagacgaggcagccttgactgacattgtggatgcccttggggataggattttcggcctcgagggttcccacgctgagaatgagagtagtttcggcctagagatgtcacaaattggcttcagtacacatagactcaaggacggaatcctgtttgggatggtaggcgcatacgattggggcggatcagtgctctggctggaaggcggtcatcgattattccccccacgcatggctctcgaggacgagtttcccccagctctgcagaatcacgcggcatatctgggatacagcgtgtcaagtatgttgttaagggggggacgccgactttttctgagtggcgctcccagatttaggcaccgaggcaaggtgattgcgtttcagttaaagaaggacggggcagtgagggtggcacaaagcttgcagggcgagcaaatcggctcatatttcggaagcgagttgtgtcctctggacacagaccgggatggcactacagatgtgctgctggtagccgctccaatgtttctggggccacagaataaggaaactggacgtgtctatgtgtacctggtaggccagcaatcacttcttacactccagggtacgttacaacccgagccaccccaggacgcccgtttcggctttgccatgggcgcactacctgacctgaaccaagatggcttcgcggacgttgccgtgggcgctcctttggaggacggacaccagggcgcactttatctataccatggaacccagtctggcgtccgcccacacccagcccagcggattgcagcggcaagcatgccacatgccttgtcatatttcggtcgctctgtcgacgggagattggatctcgatggagacgacctcgtggatgttgccgttggtgctcagggcgctgctatcctgctgtcttctcggcctattgtgcatctcacaccatcgctcgaagtaacaccacaggcaatcagtgttgtgcaacgtgactgcagacgccgaggtcaggaggcggtgtgtctgacagcagcactgtgctttcaggtgacatcacggactcccggaagatgggaccaccagttttacatgcggttcacagccagccttgatgagtggacagccggagccagggccgcatttgacggttctggccagcggctctcgcctaggcggctgagactatccgttggcaatgtgacctgcgagcagctccatttccacgtgctcgacacatcggactaccttaggcccgttgcactgacagttacatttgctctcgacaacaccaccaaacccggaccagtcctgaacgagggctctcctacgtccattcagaaactggtaccattcagtaaggactgcgggccagataacgagtgcgtgacggacctcgttctgcaggtgaacatggacatccggggatctaggaaagcaccttttgtggtgcgcggtggaagacgcaaggtccttgttagcactaccctggagaacagaaaagagaatgcttataatacaagcctgagcctcatattttctaggaatttgcaccttgcttctctgacacctcagagagagtcacccataaaagtggaatgcgccgctcccagtgctcacgcccgtctttgtagcgttgggcacccagtgttccagacaggagccaaagtcacttttctactagagttcgaatttagctgttcgtccctgctgtctcaggtctttgttaaactgactgcatcttccgactccctggaaaggaacgggaccttgcaggataatacagcgcagacgagtgcctatatccagtatgaaccacatttactcttttcttcagaaagcacgctgcatagatacgaggtgcacccatacggcacccttccggtcggcccaggacctgagtttaaaaccactcttcgtgtgcagaacctggggtgctacgtcgtcagcggcctgatcatctctgcactgctgccagcagtggcgcatggcggtaactatttcctctcactctcccaggtgattactaacaatgccagctgcatagtccagaaccttacggaacctcctggaccgccagtgcaccccgaagaactgcagcacactaataggttagccaaattcaaatctctgacggtggtgtccacttttgaattggggacagaggagggaagtgtactgcagctgactgaagcatcgagatggtccgagagtctgcttgaggttgtccagacccgtcccatcctgatttctctttggatactcataggctccgtcctcggtggcctactattactggccctgctggtcttttgcttgtggaaattaggctttttcgcccacaagaaaatccctgaggaggagaagagggaagaaaaactagaacagtag

SEQ ID NO: 299076 - protein, 198 aa, Artificial Sequence
  derived and/or modified sequence
MWNTLTRSLSDHPVGKDPQAMRTGQRQNKGMRTRLGCLSHKSDSCSDFTAILPDKPNRALKRLSTEEATRWADSFDVLLSHKYGVAAFRAFLKTEFSEENLEFWLACEEFKKTRSTAKLVSKAHRIFEEFVDVQAPREVNIDFQTREATRKNLQEPSLTCFDQAQGKVHSLMEKDSYPRFLRSKMYLDLLSQSQRRLS

SEQ ID NO: 299077 - DNA, 597 bp, Artificial Sequence
  derived and/or modified sequence
atgtggaacaccctgaccagaagcctgagcgaccaccccgtgggcaaggacccccaggccatgagaaccggccagagacagaacaagggcatgagaaccagactgggctgcctgagccacaagagcgacagctgcagcgacttcaccgccatcctgcccgacaagcccaacagagccctgaagagactgagcaccgaggaggccaccagatgggccgacagcttcgacgtgctgctgagccacaagtacggcgtggccgccttcagagccttcctgaagaccgagttcagcgaggagaacctggagttctggctggcctgcgaggagttcaagaagaccagaagcaccgccaagctggtgagcaaggcccacagaatcttcgaggagttcgtggacgtgcaggcccccagagaggtgaacatcgacttccagaccagagaggccaccagaaagaacctgcaggagcccagcctgacctgcttcgaccaggcccagggcaaggtgcacagcctgatggagaaggacagctaccccagattcctgagaagcaagatgtacctggacctgctgagccagagccagagaagactgagctag

SEQ ID NO: 299078 - DNA, 597 bp, Artificial Sequence
  derived and/or modified sequence
atgtggaacaccctgactaggtccctctcagaccatcccgtggggaaagacccacaggcgatgcggaccggccaacgtcaaaacaaaggcatgcgcaccaggcttggatgcctcagtcataaatccgatagctgctctgattttaccgctattctgccagataaacccaacagagcgttaaaaagattgagcacagaggaggcaactcgatgggccgatagcttcgacgtgctcctatcccacaaatacggggtggccgcattccgcgccttcctaaaaaccgaattttccgaagaaaatctggagttttggctggcttgcgaggaatttaaaaagactcgctcaacagccaagctcgtgtccaaggcccacaggatatttgaggagtttgtggacgttcaggctcctagggaggtcaacattgatttccaaactcgggaggccacgcggaaaaacttacaggagccctcacttacgtgtttcgaccaagcacaggggaaggtccactccctgatggagaaagattcctacccacgctttcttcggagcaaaatgtaccttgatttgcttagccaaagccagagacgcctatcctag

SEQ ID NO: 299079 - DNA, 597 bp, Artificial Sequence
  derived and/or modified sequence
atgtggaacaccctgaccaggagcctgagtgaccaccctgtgggcaaggacccccaggccatgaggacaggccagaggcagaacaagggcatgaggacccggctgggctgcctgagccacaagagtgacagctgcagcgacttcaccgccatcctgcctgacaagcccaacagagccctgaagaggctgagcacagaggaggccacccgctgggccgacagctttgatgtgctgctgagccacaagtatggagtggccgccttccgggccttcctgaagacagagttcagcgaggagaacctggagttctggctggcctgtgaggagttcaagaagaccaggagcacagccaagctggtgtccaaggcccaccgcatctttgaggagtttgtggatgtgcaggccccccgggaggtgaacatcgacttccagacccgggaggccaccaggaagaacctgcaggagcccagcctgacctgctttgaccaggcccagggcaaggtgcacagcctgatggagaaggacagctacccccgcttcctgcggagcaagatgtacctggacctgctgagccagagccagaggcggctgtcctag

SEQ ID NO: 299080 - DNA, 597 bp, Artificial Sequence
  derived and/or modified sequence
atgtggaacaccctgacccggagcctgagcgaccaccccgtgggcaaggacccccaggccatgcggactgggcaacgtcagaacaaagggatgcgcactaggcttgggtgtctgagtcataaatcagatagttgctctgactttacagccatcctcccagataagcccaatagggcactgaagagactgtccacagaggaggcgacacgctgggctgattcatttgacgtcctcctgtcacataaatacggggtggcagcgtttagggccttcctgaagactgagtttagcgaagaaaatctcgaattttggttagcgtgtgaggagtttaagaaaacacgctctaccgcaaagctcgtgtcaaaagctcacagaatattcgaggagttcgtggacgtccaagcccctcgagaggttaatatcgacttccagactagggaggccactagaaagaacctgcaggagccctcactgacctgcttcgatcaggctcagggcaaggttcacagtctcatggagaaggattcctatcctcgttttctgcgcagcaaaatgtacctcgatctgctatctcagtcccagcgacgattaagctag

SEQ ID NO: 299081 - DNA, 597 bp, Artificial Sequence
  derived and/or modified sequence
atgtggaacacactgactcggtcactcagcgaccacccagttggaaaggacccgcaggcgatgaggactgggcaaaggcaaaacaagggaatgcgcacacgactgggctgcctgagtcataagtcggattcttgctcggattttactgctatactgcctgacaagccaaaccgcgcactcaagcggttatccactgaggaggcaacacggtgggcagactctttcgatgtcttgctcagtcataagtatggcgtggccgcattcagagctttcttaaaaactgaattctcagaagagaaccttgaattttggctggcatgtgaagaattcaaaaaaactcggtctacggccaaactggtcagcaaagctcatcgcatctttgaagagttcgtagatgtgcaggcgcctcgcgaagtgaacatcgattttcagacacgggaagctacaaggaagaatctccaagagccaagtctgacctgttttgatcaggcacagggcaaagtacactccctgatggagaaggatagctaccctagattcctgcgtagcaagatgtatctagacctgctctctcagagtcagcggcgtctgtcgtag

SEQ ID NO: 299082 - DNA, 765 bp, Artificial Sequence
  derived and/or modified sequence
gttcagggaccacgcttggagaaccactacactagggcaagcaggaagagagtcctccttctggaactgaagcaggcagtgtgaagacccatgtggaacaccttaacccgaagcctctctgaccatccagttggcaaagaccctcaggccatgaggactggccaaagacagaacaaagggatgaggactcgactgggatgcctgtctcacaagtcagactcgtgtagtgatttcacagctattcttccagacaaacccaaccgcgctctcaagagattatcgacagaagaagctacgaggtgggcagattcctttgatgtgcttctctctcataagtatggggtggctgcattccgtgccttcttgaagacggagttcagtgaggagaacctggaattctggttggcctgtgaggagttcaagaagaccaggtcaactgcaaaactggtctctaaggcccataggatctttgaggagtttgtggatgtgcaggctccacgggaggtaaacattgacttccagacccgagaagccacgaggaagaacctgcaggagccatccctgacttgctttgaccaagcccaaggaaaagtacacagcctcatggagaaagactcttaccccaggttcctgaggtccaaaatgtacttagatctgctgtcccaaagccagaggaggctcagttagacctcagaagggaactcctggaaatcaccggctttcccctccacttgctgccaagatcatattctaatgtgaaatgtc

SEQ ID NO: 299083 - DNA, 843 bp, Artificial Sequence
  derived and/or modified sequence
gggaggtgtgttgtgcatgcctgtgtgtgtatatgtgtgtgtgtgcccctatgtgttcatgcacacatgcccttcactcgccgaggatttgactgctaaaagaaagatctactttttccccagaacaccttaacccgaagcctctctgaccatccagttggcaaagaccctcaggccatgaggactggccaaagacagtgagaggacgtgcaagggtaaattcctgagccccgcagtcttatttcctgccctgacgtccctgcataccagcccaagggttaaccgtaagctgatgcctgtatggcggccttactgatgccacgcaggaacaaagggatgaggactcgactgggatgcctgtctcacaagtcagactcgtgtagtgatttcacagctattcttccagacaaacccaaccgcgctctcaagagattatcgacagaagaagctacgaggtgggcagattcctttgatgtgcttctctctcataagtatggggtggctgcattccgtgccttcttgaagacggagttcagtgaggagaacctggaattctggttggcctgtgaggagttcaagaagaccaggtcaactgcaaaactggtctctaaggcccataggatctttgaggagtttgtggatgtgcaggctccacgggaggtaaacattgacttccagacccgagaagccacgaggaagaacctgcaggagccatccctgacttgctttgaccaagcccaaggaaaagtacacagcctcatggagaaagactcttaccccaggttcctgaggtccaaaatgtacttagatctgctgtcccaaagccagaggaggctcagttag

SEQ ID NO: 299084 - DNA, 859 bp, Artificial Sequence
  derived and/or modified sequence
ggaccacgcttggagaaccactacactagggcaagcaggaagagagtcctccttctggaactgaagcaggcagtgtgaagacccatgtggaacaccttaacccgaagcctctctgaccatccagttggcaaagaccctcaggccatgaggactggccaaagacagtgagaggacgtgcaagggtaaattcctgagccccgcagtcttatttcctgccctgacgtccctgcataccagcccaagggttaaccgtaagctgatgcctgtatggcggccttactgatgccacgcaggaacaaagggatgaggactcgactgggatgcctgtctcacaagtcagactcgtgtagtgatttcacagctattcttccagacaaacccaaccgcgctctcaagagattatcgacagaagaagctacgaggtgggcagattcctttgatgtgcttctctctcataagtatggggtggctgcattccgtgccttcttgaagacggagttcagtgaggagaacctggaattctggttggcctgtgaggagttcaagaagaccaggtcaactgcaaaactggtctctaaggcccataggatctttgaggagtttgtggatgtgcaggctccacgggaggtaaacattgacttccagacccgagaagccacgaggaagaacctgcaggagccatccctgacttgctttgaccaagcccaaggaaaagtacacagcctcatggagaaagactcttaccccaggttcctgaggtccaaaatgtacttagatctgctgtcccaaagccagaggaggctcagttagacctcagaagggaactcctggaaatcaccggctttcccctccacttgct

SEQ ID NO: 299085 - DNA, 1432 bp, Artificial Sequence
  derived and/or modified sequence
gcttcagtatttactggatgtgacaagcagagagaagagctttcagtggggccgcttgctgcctggctcaagtggtgggagaacaccttaacccgaagcctctctgaccatccagttggcaaagaccctcaggccatgaggactggccaaagacagtgagaggacgtgcaagggtaaattcctgagccccgcagtcttatttcctgccctgacgtccctgcataccagcccaagggttaaccgtaagctgatgcctgtatggcggccttactgatgccacgcaggaacaaagggatgaggactcgactgggatgcctgtctcacaagtcagactcgtgtagtgatttcacagctattcttccagacaaacccaaccgcgctctcaagagattatcgacagaagaagctacgaggtgggcagattcctttgatgtgcttctctctcataagtatggggtggctgcattccgtgccttcttgaagacggagttcagtgaggagaacctggaattctggttggcctgtgaggagttcaagaagaccaggtcaactgcaaaactggtctctaaggcccataggatctttgaggagtttgtggatgtgcaggctccacgggaggtaaacattgacttccagacccgagaagccacgaggaagaacctgcaggagccatccctgacttgctttgaccaagcccaaggaaaagtacacagcctcatggagaaagactcttaccccaggttcctgaggtccaaaatgtacttagatctgctgtcccaaagccagaggaggctcagttagacctcagaagggaactcctggaaatcaccggctttcccctccacttgctgccaagatcatattctaatgtgaaatgtcataggtgttcaaaagcggtggcattgggggtgggaggctgggggtgaggagggaatgaagggccattccaaagtatgacccagctgccggagcttggactctattccatttacccatgtttgtgttttggttagtggtagcgccttgccgctgtcacccttttctgggtcagcaacttgcccttcatataatgccttgggtcacctctgctgagagggcagatttgctgtgctaggctaatctgtaaataatgcaaatgcaattcccaccacctccacaccctcctcggttaggattcctgactctccacttgttgtaaatccctgggaggaatagctgaaagacttgggctcaactctgtgatttgtagtggccagctctgctcactgggatctcacagcttaggagagaggtttctgtggaattccaggtttctagttctgtcattgacaggtgacctctcagagaaggagtgaaatccatggagttgtttgtttcttccatttccattggaccagtgtgaaaaactgtgattacttcccatcttggccta

SEQ ID NO: 299086 - DNA, 563 bp, Artificial Sequence
  derived and/or modified sequence
ctttacgctccccactcccggtgcagcagccaaccttcagccagcagcggggctcattagaagagggtcccctggacacttgatttttagctcactggtgactggaaagagttaatacctattctttgctgccccccgcacagcctctgggtgcagagggaggcagctgtgggctgtggggacttctccctgagctgcagccagaggagcttcagaacaccttaacccgaagcctctctgaccatccagttggcaaagaccctcaggccatgaggactggccaaagacagtgagaggacgtgcaagggtaaattcctgagccccgcagtcttatttcctgccctgacgtccctgcataccagcccaagggttaaccgtaagctgatgcctgtatggcggccttactgatgccacgcaggaacaaagggatgaggactcgactgggatgcctgtctcacaagtcagactcgtgtagtgatttcacagctattcttccagacaaacccaaccgcgctctcaagagattatcgacagaagaagctacgaggtgggcagattccttt

SEQ ID NO: 299087 - DNA, 132 bp, Artificial Sequence
  derived and/or modified sequence
cgcctgaggtctcgcccgcaggccggtggcgcggggtcagctgctgcctgcggtccaggacagggtcggttccgccgcgcagcgcccaggcccagctcgtccagagtctgcggacagcgcacgtccaggtaa

SEQ ID NO: 299088 - DNA, 441 bp, Artificial Sequence
  derived and/or modified sequence
atgctgagaagactgctggagagaccctgcaccctggccctgctggtgggcagccagctggccgtgatgatgtacctgagcctgggcggcttcagaagcctgagcgccctgttcggcagagaccagggccccaccttcgactacagccaccccagagacgtgtacagcaacctgagccacctgcccggcgcccccggcggcccccccgccccccagggcctgccctactgccccgagagaagccccctgctggtgggccccgtgagcgtgagcttcagccccgtgcccagcctggccgagatcgtggagagaaaccccagagtggagcccggcggcagatacagaccccccgccgccctgccccccgcccccctgctggccgcccccgccgcctgcctgtggcacctgtgccacccccccggctggaagtggaacatctag

SEQ ID NO: 299089 - DNA, 684 bp, Artificial Sequence
  derived and/or modified sequence
atgctgagaagactgctggagagaccctgcaccctggccctgctggtgggcagccagctggccgtgatgatgtacctgagcctgggcggcttcagaagcctgagcgccctgttcggcagagaccagggccccaccttcgactacagccaccccagagacgtgtacagcaacctgagccacctgcccggcgcccccggcggcccccccgccccccagggcctgccctactgccccgagagaagccccctgctggtgggccccgtgagcgtgagcttcagccccgtgcccagcctggccgagatcgtggagagaaaccccagagtggagcccggcggcagatacagacccgccggctgcgagcccagaagcagaaccgccatcatcgtgccccacagagccagagagcaccacctgagactgctgctgtaccacctgcaccccttcctgcagagacagcagctggcctacggcatctacgtgatccaccaggccggcaacggcaccttcaacagagccaagctgctgaacgtgggcgtgagagaggccctgagagacgaggagtgggactgcctgttcctgcacgacgtggacctgctgcccgagaacgaccacaacctgtacgtgtgcgaccccagaggccccagacacgtggccgtggccatgaacaagttcggctacagatag

SEQ ID NO: 299090 - DNA, 441 bp, Artificial Sequence
  derived and/or modified sequence
atgctgaggaggcttcttgagcgcccgtgcacactcgccctgctagtgggcagccaattagcagttatgatgtatctctccctgggtggttttagatcactctctgcgctgttcgggcgtgaccaggggccgacattcgattactcgcacccacgcgacgtctacagtaacctgtcccacctcccaggcgcccctggagggcctccagccccacaagggttaccctattgtcccgagcggtctcctctccttgttggccctgtgtctgtttccttttctcccgttcccagtctcgcggaaattgtagaacgtaatccgagagtcgagcctggaggaagataccgccctccagccgcgctccctcctgcccccctgctcgcggctccagctgcctgcctgtggcacctgtgtcatccaccaggctggaaatggaacatctag

SEQ ID NO: 299091 - DNA, 684 bp, Artificial Sequence
  derived and/or modified sequence
atgctgcgtaggttgttagagcggccctgcacgctggcactattggtaggctcacagcttgcagtgatgatgtacctgagcctcgggggcttcaggtcattaagcgctctgttcgggagagatcagggtccaacgttcgactacagtcacccgcgtgacgtgtactctaacctgtcacatctgccaggcgcccccggcggtcctcctgcaccccaaggcctgccctattgccccgagcggtccccactgctggtgggaccagtgtctgtctccttctctcctgttccttccctggccgagattgttgagcgcaacccaagggtagaaccaggcgggagataccgtccagcggggtgtgagcctaggagcaggacagcaatcatcgtgccgcaccgggccagagaacatcacctgcgtcttctgctgtaccatctgcaccccttccttcagaggcagcagttagcctatggcatctacgtcatacatcaggcaggcaatgggaccttcaatcgggcgaaactgctaaacgtgggtgtgagggaggccttgagagatgaggagtgggactgcttgtttttacatgatgtcgacctcctgcctgagaacgaccataatctgtacgtgtgcgacccgcggggcccaaggcatgtggccgtcgccatgaacaagttcggctaccgatag

SEQ ID NO: 299092 - DNA, 441 bp, Artificial Sequence
  derived and/or modified sequence
atgctgcggcggctgctggagcggccctgcaccctggccctgctggtgggcagccagctggccgtgatgatgtacctgagcctgggcggcttccgcagcctgagcgccctgtttggccgggaccagggccccacctttgactacagccaccccagagatgtgtacagcaacctgagccacctgcccggggcccctgggggccccccagccccccagggcctgccctactgcccagagaggagccccctgctggtgggccctgtgtctgtgtccttcagccctgtgcccagcctggccgagatcgtggagaggaacccccgggtggagcccggcggccgctaccggcccccagctgccctgcccccagcccccctgctggccgccccagctgcctgcctgtggcacctgtgccaccccccaggctggaagtggaacatctag

SEQ ID NO: 299093 - DNA, 684 bp, Artificial Sequence
  derived and/or modified sequence
atgctgcggcggctgctggagcggccctgcaccctggccctgctggtgggcagccagctggccgtgatgatgtacctgagcctgggcggcttccgcagcctgagcgccctgtttggccgggaccagggccccacctttgactacagccaccccagagatgtgtacagcaacctgagccacctgcccggggcccctgggggccccccagccccccagggcctgccctactgcccagagaggagccccctgctggtgggccctgtgtctgtgtccttcagccctgtgcccagcctggccgagatcgtggagaggaacccccgggtggagcccggcggccgctacagacctgctggctgtgagcccaggagcaggacagccatcatcgtgccccaccgggcccgggagcaccacctgcggctgctgctgtaccacctgcaccccttcctgcagaggcagcagctggcctacggcatctacgtgatccaccaggccggaaatggcaccttcaacagagccaagctgctgaatgtgggcgtgcgggaggccctgagagatgaggagtgggactgcctcttcctgcatgatgtggacctgctgcctgaaaatgaccacaacctgtatgtgtgtgacccccggggccccaggcatgtggccgtggccatgaacaagtttggctacagatag

SEQ ID NO: 299094 - DNA, 441 bp, Artificial Sequence
  derived and/or modified sequence
atgctgcggcggctgctggagcggccctgcaccctggccctgctggtcggctctcaactggccgtgatgatgtatctgagcctggggggcttccgcagcctgtcggctctattcgggagagatcaggggccaacattcgactacagccatcccagagatgtgtattccaacctgagccatttacctggtgcccccggaggcccacccgcaccccagggtctaccctattgccctgaaagaagcccacttcttgtggggcctgtgagcgtgagtttttctccggtaccttccctggcggagatcgtggagaggaatccgagggtggagcccgggggacgttacagacctccagccgctctgccccccgcgccactcctcgccgcaccggccgcctgcttatggcatttgtgccacccccctggatggaagtggaatatatag

SEQ ID NO: 299095 - DNA, 684 bp, Artificial Sequence
  derived and/or modified sequence
atgctgcggcggctgctggagcggccctgcaccctggccctgctggtagggtcacagctggctgtgatgatgtatctgagcctgggtgggttcaggagcctgagtgcccttttcggaagggatcagggcccaactttcgactactctcacccccgggacgtatactcaaatctgtcgcacctcccaggagcgcccggcggccccccggcgccccagggcctaccatactgtccagaacgatcgcccctcctcgtgggtcccgtgagtgtgtcgttctcgcctgttcccagtctcgctgaaatcgttgagaggaaccctagggtggagccaggcgggcgatacagaccggcaggctgcgagccccgttctaggaccgcgattatcgttccccatagggcaagagagcaccatctccgcttgttgctctatcacttgcaccctttcctgcagcggcagcaattagcctatggaatctacgtaatacatcaggctggcaatggaacatttaatagggccaagttactaaacgtgggagtaagggaagccctgagagacgaggaatgggactgtctttttctgcatgacgttgacctgttgcctgagaacgaccataacctgtacgtgtgtgatccgcgagggccgcgccacgtcgccgtggcaatgaataagtttggttaccgctag

SEQ ID NO: 299096 - DNA, 441 bp, Artificial Sequence
  derived and/or modified sequence
atgttgaggaggctcctggagcggccatgcactctcgcgttactagtgggctcacagctggcagttatgatgtatctgagcctcggtgggtttaggtccctgagcgcactgttcggacgcgaccagggcccaacctttgattactcacatcccagagacgtgtactctaacctgtctcaccttcccggtgccccaggcggtccccctgcccctcagggactgccctattgccccgaacgctcccctctgctcgttggacccgtgtcagtctccttctctcccgtgccttctttggccgagatcgtggagagaaatccaagagtggaaccaggcggtagataccgcccacctgctgctctgcccccagcacctttattggccgctcctgctgcatgcctctggcatctgtgtcaccctcccggttggaaatggaacatttag

SEQ ID NO: 299097 - DNA, 684 bp, Artificial Sequence
  derived and/or modified sequence
atgttacgtcgattgctggagagaccctgcacgctggctctgctggtaggctcacaactggccgtcatgatgtacctgtccttaggtggatttaggagtctgtcagctttgttcggtagggatcagggcccaacattcgactatagccacccaagagatgtgtacagcaatctctctcatctccctggcgctccgggaggtcccccagctcctcagggcctgccttactgcccagagcgaagccccctgctagtgggcccagtgagcgtgtccttctctcctgtgccttctctggctgagatagtggaacgaaatcccagagtagagcccggtggcaggtatagacccgctggctgcgaacctcggtcccggactgccatcattgtcccgcacagggcaagagaacatcatctgaggctgctgttgtatcacctccacccattcctgcagagacagcagttggcttatggtatctacgtgattcatcaggccggaaatgggacgttcaaccgtgcaaaactgctgaatgtcggagtaagagaagccctgcgcgacgaggaatgggattgtctgttcttacacgatgtagatctgctccccgagaatgatcacaacttgtacgtttgcgaccctagggggccaaggcacgtggcggtcgcaatgaacaagtttggatataggtag

SEQ ID NO: 299098 - protein, 339 aa, Artificial Sequence
  derived and/or modified sequence
MAQHHLWILLLCLQTWPEAAGKDSEIFTVNGILGESVTFPVNIQEPRQVKIIAWTSKTSVAYVTPGDSETAPVVTVTHRNYYERIHALGPNYNLVISDLRMEDAGDYKADINTQADPYTTTKRYNLQIYRRLGKPKITQSLMASVNSTCNVTLTCSVEKEEKNVTYNWSPLGEEGNVLQIFQTPEDQELTYTCTAQNPVSNNSDSISARQLCADIAMGFRTHHTGLLSVLAMFFLLVLILSSVFLFRLFKRRQGSCLNTFTKNPYAASKKTIYTYIMASRNTQPAESRIYDEILQSKVLPSKEEPVNTVYSEVQFADKMGKASTQDSKPPGTSSYEIVI

SEQ ID NO: 299099 - DNA, 1020 bp, Artificial Sequence
  derived and/or modified sequence
atggcccagcaccacctgtggatcctgctgctgtgcctgcagacctggcccgaggccgccggcaaggacagcgagatcttcaccgtgaacggcatcctgggcgagagcgtgaccttccccgtgaacatccaggagcccagacaggtgaagatcatcgcctggaccagcaagaccagcgtggcctacgtgacccccggcgacagcgagaccgcccccgtggtgaccgtgacccacagaaactactacgagagaatccacgccctgggccccaactacaacctggtgatcagcgacctgagaatggaggacgccggcgactacaaggccgacatcaacacccaggccgacccctacaccaccaccaagagatacaacctgcagatctacagaagactgggcaagcccaagatcacccagagcctgatggccagcgtgaacagcacctgcaacgtgaccctgacctgcagcgtggagaaggaggagaagaacgtgacctacaactggagccccctgggcgaggagggcaacgtgctgcagatcttccagacccccgaggaccaggagctgacctacacctgcaccgcccagaaccccgtgagcaacaacagcgacagcatcagcgccagacagctgtgcgccgacatcgccatgggcttcagaacccaccacaccggcctgctgagcgtgctggccatgttcttcctgctggtgctgatcctgagcagcgtgttcctgttcagactgttcaagagaagacagggcagctgcctgaacaccttcaccaagaacccctacgccgccagcaagaagaccatctacacctacatcatggccagcagaaacacccagcccgccgagagcagaatctacgacgagatcctgcagagcaaggtgctgcccagcaaggaggagcccgtgaacaccgtgtacagcgaggtgcagttcgccgacaagatgggcaaggccagcacccaggacagcaagccccccggcaccagcagctacgagatcgtgatctag

SEQ ID NO: 299100 - DNA, 1020 bp, Artificial Sequence
  derived and/or modified sequence
atggcgcagcaccacctttggatcctgctcttgtgcctccagacctggcccgaggccgcagggaaggactctgaaattttcacagtaaatggcattctcggtgagtccgtgaccttccccgttaatattcaagagccacgtcaggtgaaaattatcgcatggaccagcaaaacatccgtggcttacgtcaccccaggcgactccgagaccgcacccgtggtgacggtgactcataggaactattacgagcgaatccatgccttaggcccaaactacaatttggtgatttccgatctacggatggaggacgctggagactataaagcagacatcaatacccaagctgatccatacacaaccaccaagcgatacaacctgcagatctatcgccgcctgggcaagccaaagattacccagagcctcatggccagcgttaattctacttgtaatgtgacattgacctgttcagttgagaaggaggagaagaatgtgacctacaattggagtccactcggtgaagagggcaatgtgctgcagatttttcagacgcccgaggatcaggaactgacttacacctgcaccgcccagaatcccgtgtccaataacagcgacagtatttcggcgcgacagctgtgcgccgacatcgccatgggctttaggacacaccatacaggcctgcttagtgtgttggctatgttttttctgctggtcctgattctgtccagcgtgttcctgtttagacttttcaagaggcggcaggggagctgcctgaatacgtttacgaagaacccctacgctgcaagcaagaaaacaatctatacatacataatggccagtaggaacacccagccagccgagagccgcatctatgatgaaatattgcagagtaaggtattgccgagcaaagaagaacccgtgaataccgtgtattctgaagtacagttcgcggacaagatggggaaggccagtacacaggacagcaaacccccaggaacgagctcatacgaaatcgtgatctag

SEQ ID NO: 299101 - DNA, 1020 bp, Artificial Sequence
  derived and/or modified sequence
atggcccagcaccacctgtggatcctgctgctgtgcctgcagacctggccagaggccgccggcaaggacagcgagatcttcaccgtgaatggcatcctgggggagagcgtgaccttccctgtgaacatccaggagccccggcaggtgaagatcatcgcctggaccagcaagacctctgtggcctacgtgacccctggggacagcgagacagcccctgtggtgacagtgacccacaggaactactatgaaagaatccacgccctgggccccaactacaacctggtgatcagtgacctgaggatggaggatgctggggactacaaggctgacatcaacacccaggccgacccctacaccaccaccaagcgctacaacctgcagatctaccgccgcctgggcaagcccaagatcacccagagcctgatggcctctgtgaacagcacctgcaatgtgaccctgacctgcagcgtggagaaggaggagaagaatgtgacctacaactggagccccctgggggaggagggcaatgtgctgcagatcttccagaccccagaggaccaggagctgacctacacctgcacagcccagaaccctgtgagcaacaacagcgacagcatcagcgcccggcagctgtgtgccgacatcgccatgggcttccgcacccaccacacaggcctgctgtctgtgctggccatgttcttcctgctggtgctgatcctgagcagcgtcttcctgttccgcctcttcaagaggcggcagggcagctgcctgaacaccttcaccaagaacccctatgctgccagcaagaagaccatctacacctacatcatggccagcaggaacacccagcctgctgagagccgcatctatgatgagatcctgcagagcaaggtgctgcccagcaaggaggagcctgtgaacacagtgtacagcgaggtgcagtttgctgacaagatgggcaaggccagcacccaggacagcaagcccccaggcaccagcagctatgaaattgtcatctag

SEQ ID NO: 299102 - DNA, 1020 bp, Artificial Sequence
  derived and/or modified sequence
atggcccagcaccacctgtggatcctgctgctgtgcctgcagacctggccggaagcagccggcaaggattctgaaatttttaccgttaatggtattctaggcgagtcagtgacattccccgtcaatatccaagagccgagacaggtcaaaatcatcgcctggacatctaaaactagcgtagcttacgtgacacccggcgacagcgaaactgctcccgttgtgacagttacacatcgaaactactacgagcgtatacacgctcttggccccaattataacttggtcattagcgaccttcgaatggaagacgccggggattataaagcagacatcaacacccaggctgacccctacaccacaactaaacgatacaatctgcagatatatagacgccttgggaagccgaaaatcacacagtcgctgatggctagtgttaactctacatgcaacgtcaccctgacctgctccgtagaaaaagaggaaaagaacgtcacctataactggtccccattaggagaagaggggaatgttctgcagatcttccaaacaccggaggaccaggagctgacttatacctgcacagcacaaaatcccgtctctaataacagtgacagtatttccgcccgacagctgtgcgccgatattgcaatgggtttcaggacccaccacactggcctcctcagtgtgctggccatgttcttcctcctcgtgcttattttgtcctccgtgtttttattcagattgtttaaacggagacaagggtcgtgcttgaatactttcactaagaatccatacgcagcttcaaagaagaccatttacacatacatcatggcatctcgaaacacgcagcccgccgagtcaagaatatacgacgaaattctgcaaagtaaagtgttaccttccaaggaagaacctgtcaacaccgtgtattcagaggtgcaattcgccgataaaatgggcaaggctagtacccaggatagcaaaccacccggcacatcatcttacgaaattgtcatctag

SEQ ID NO: 299103 - DNA, 1020 bp, Artificial Sequence
  derived and/or modified sequence
atggcccagcatcacctgtggattctcctcctatgcctgcagacctggcctgaggccgctggtaaagactccgaaatcttcaccgtgaatggaatactcggggagtccgtcacatttcccgtcaacatccaggagcccagacaggtgaagattatagcctggacttctaaaacgtcagtagcctatgtcaccccaggagatagtgaaactgccccagtagtgacagtcacgcatagaaattactatgagcgaatacatgcactaggtcctaattataatcttgtgatatctgacctgcgtatggaagatgccggtgactataaagccgatataaacacccaagcagatccttacacaactaccaaacgctataacctgcagatttacagaaggctggggaagccaaaaatcactcagtcgctcatggcctccgtgaatagtacttgtaacgtgacgctgacgtgttcagtagagaaggaggagaaaaatgtgacctataattggagcccactcggggaggaagggaacgtgctgcagattttccagacccccgaggaccaggagctgacatacacttgtactgcccaaaatcctgtcagtaacaatagcgactctatatccgccaggcaattgtgcgctgacatcgccatggggtttagaacgcatcacactggtcttctatccgtgcttgccatgttttttctgttagtgctgattctctcatcagtgttcctttttcggctcttcaaacggaggcagggttcatgtctgaacacctttacaaagaatccatacgccgctagcaaaaagactatatacacttacatcatggctagccggaacactcagcccgcagagtctcggatctacgatgagatattgcagtctaaggtgctcccaagcaaagaggaaccagtgaatactgtgtactcagaggtgcaatttgccgacaaaatgggaaaagccagcactcaagacagtaagccgcctggaaccagttcctacgagattgtgatctag

SEQ ID NO: 299104 - DNA, 1098 bp, Artificial Sequence
  derived and/or modified sequence
ctcaagtgaaactgactctgctagaacagtgccgtgcttttccacagaaggttagaccctgaaagagatggctcagcaccacctatggatcttgctcctttgcctgcaaacctggccggaagcagctggaaaagactcagaaatcttcacagtgaatgggattctgggagagtcagtcactttccctgtaaatatccaagaaccacggcaagttaaaatcattgcttggacttctaaaacatctgttgcttatgtaacaccaggagactcagaaacagcacccgtagttactgtgacccacagaaattattatgaacggatacatgccttaggtccgaactacaatctggtcattagcgatctgaggatggaagacgcaggagactacaaagcagacataaatacacaggctgatccctacaccaccaccaagcgctacaacctgcaaatctatcgtcggcttgggaaaccaaaaattacacagagtttaatggcatctgtgaacagcacctgtaatgtcacactgacatgctctgtagagaaagaagaaaagaatgtgacatacaattggagtcccctgggagaagagggtaatgtccttcaaatcttccagactcctgaggaccaagagctgacttacacgtgtacagcccagaaccctgtcagcaacaattctgactccatctctgcccggcagctctgtgcagacatcgcaatgggcttccgtactcaccacaccgggttgctgagcgtgctggctatgttctttctgcttgttctcattctgtcttcagtgtttttgttccgtttgttcaagagaagacaaggttcctgcttgaacaccttcactaagaacccttatgctgcctcaaagaaaaccatatacacatatatcatggcttcaaggaacacccagccagcagagtccagaatctatgatgaaatcctgcagtccaaggtgcttccctccaaggaagagccagtgaacacagtttattccgaagtgcagtttgctgataagatggggaaagccagcacacaggacagtaaacctcctgggacttcaagctatgaaattgtgatctaggctgctgggct

SEQ ID NO: 299105 - DNA, 396 bp, Artificial Sequence
  derived and/or modified sequence
atgacccgcctctattatcgggacgcgtcagcctgcgtgataatgtttgatgttacaaacgcaaccacattctctaattcgcaaagatggaaacaggatctggactcaaaactcaccttgccaaacggtgaacccgtcccctgtctgttgctggcaaacaaatgtgacctgagtccctgggcagtgtcacgagatcagattgaccggttctccaaggaaaatggctttactgggtggacagaaacctcagtgaaggaaaacaaaaatatcaatgaggccatgcgcgtgttaattgagaaaatgatgcgcaactctaccgaggacatcatgagcttatccacacagggcgattatataaacctgcagacgaagagttcatcctggtcatgctgctag

SEQ ID NO: 299106 - DNA, 396 bp, Artificial Sequence
  derived and/or modified sequence
atgacccggctgtactacagagatgccagcgcctgcgtcatcatgtttgatgtgaccaatgccaccaccttcagcaacagccagcgctggaagcaggacctggacagcaagctgaccctgcccaacggggagcctgtgccctgcctgctgctggccaacaagtgtgacctgagcccctgggccgtgtcccgggaccagattgaccgcttcagcaaagaaaatggcttcaccggctggacagagacctctgtgaaggagaacaagaacatcaatgaggccatgagggtgctgattgagaagatgatgaggaacagcacagaggacatcatgagcctgagcacccagggcgactacatcaacctgcagaccaagagcagctcctggagctgctgctag

SEQ ID NO: 299107 - DNA, 396 bp, Artificial Sequence
  derived and/or modified sequence
atgacccggctgtactaccgggacgccagcgcctgcgtgatcatgttcgatgtgacaaatgctacgactttcagcaactcccagcgatggaagcaggatctggactccaagctgactctccctaacggggagcccgtcccatgtttacttttagcaaacaaatgcgatctaagtccctgggccgtgagccgtgaccagattgatcggttcagcaaggaaaacgggtttacgggttggaccgagactagcgtcaaggaaaacaaaaacataaacgaagccatgcgagttctgattgagaagatgatgagaaactctacagaagacattatgtcattgtctacacagggcgactacatcaacctgcagacaaagtcgtccagttggagttgctgctag

SEQ ID NO: 299108 - DNA, 396 bp, Artificial Sequence
  derived and/or modified sequence
atgactcgtttgtactacagggatgccagcgcctgcgtaataatgttcgatgtaaccaatgcaactaccttctccaacagtcagcgctggaaacaggatcttgactcaaaacttaccctaccgaacggggagccagtcccttgtcttctgctagccaataaatgtgacctcagcccatgggccgtctctcgggaccaaatcgaccggttcagcaaggaaaacggattcacagggtggaccgaaacctccgttaaggaaaataaaaatatcaatgaggccatgagggtcttgatcgagaaaatgatgcgtaactcgacagaggatatcatgtccctctctacccagggagactacataaatttgcagacaaagtcaagctcgtggtcctgctgctag

SEQ ID NO: 299109 - DNA, 396 bp, Artificial Sequence
  derived and/or modified sequence
atgaccagactgtactacagagacgccagcgcctgcgtgatcatgttcgacgtgaccaacgccaccaccttcagcaacagccagagatggaagcaggacctggacagcaagctgaccctgcccaacggcgagcccgtgccctgcctgctgctggccaacaagtgcgacctgagcccctgggccgtgagcagagaccagatcgacagattcagcaaggagaacggcttcaccggctggaccgagaccagcgtgaaggagaacaagaacatcaacgaggccatgagagtgctgatcgagaagatgatgagaaacagcaccgaggacatcatgagcctgagcacccagggcgactacatcaacctgcagaccaagagcagcagctggagctgctgctag

SEQ ID NO: 299110 - protein, 1874 aa, Artificial Sequence
  derived and/or modified sequence
MLGSSVKSVQPEVELSSGGGDEGADEPRGAGRKAAAADGRGMLPKRAKAPGGGGGMAKASAAELKVFKSGSVDSRVPGGPPASNLRKQKSLTNLSFLTDSEKKLQLYEPEWSDDMAKAPKGLGKVGSKGREAPLMSKTLSKSEHSLFQAKGSPAGGAKTPLAPLAPNLGKPSRIPRGPYAEVKPLSKAPEAAVSEDGKSDDELLSSKAKAQKSSGPVPSAKGQEERAFLKVDPELVVTVLGDLEQLLFSQMLDPESQRKRTVQNVLDLRQNLEETMSSLRGSQVTHSSLEMTCYDSDDANPRSVSSLSNRSSPLSWRYGQSSPRLQAGDAPSVGGSCRSEGTPAWYMHGERAHYSHTMPMRSPSKLSHISRLELVESLDSDEVDLKSGYMSDSDLMGKTMTEDDDITTGWDESSSISSGLSDASDNLSSEEFNASSSLNSLPSTPTASRRNSTIVLRTDSEKRSLAESGLSWFSESEEKAPKKLEYDSGSLKMEPGTSKWRRERPESCDDSSKGGELKKPISLGHPGSLKKGKTPPVAVTSPITHTAQSALKVAGKPEGKATDKGKLAVKNTGLQRSSSDAGRDRLSDAKKPPSGIARPSTSGSFGYKKPPPATGTATVMQTGGSATLSKIQKSSGIPVKPVNGRKTSLDVSNSAEPGFLAPGARSNIQYRSLPRPAKSSSMSVTGGRGGPRPVSSSIDPSLLSTKQGGLTPSRLKEPTKVASGRTTPAPVNQTDREKEKAKAKAVALDSDNISLKSIGSPESTPKNQASHPTATKLAELPPTPLRATAKSFVKPPSLANLDKVNSNSLDLPSSSDTTHASKVPDLHATSSASGGPLPSCFTPSPAPILNINSASFSQGLELMSGFSVPKETRMYPKLSGLHRSMESLQMPMSLPSAFPSSTPVPTPPAPPAAPTEEETEELTWSGSPRAGQLDSNQRDRNTLPKKGLRYQLQSQEETKERRHSHTIGGLPESDDQSELPSPPALPMSLSAKGQLTNIVSPTAATTPRITRSNSIPTHEAAFELYSGSQMGSTLSLAERPKGMIRSGSFRDPTDDVHGSVLSLASSASSTYSSAEERMQSEQIRKLRRELESSQEKVATLTSQLSANANLVAAFEQSLVNMTSRLRHLAETAEEKDTELLDLRETIDFLKKKNSEAQAVIQGALNASETTPKELRIKRQNSSDSISSLNSITSHSSIGSSKDADAKKKKKKSWLRSSFNKAFSIKKGPKSASSYSDIEEIATPDSSAPSSPKLQHGSTETASPSIKSSTSSSVGTDVTEGPAHPAPHTRLFHANEEEEPEKKEVSELRSELWEKEMKLTDIRLEALNSAHQLDQLRETMHNMQLEVDLLKAENDRLKVAPGPSSGSTPGQVPGSSALSSPRRSLGLALTHSFGPSLADTDLSPMDGISTCGPKEEVTLRVVVRMPPQHIIKGDLKQQEFFLGCSKVSGKVDWKMLDEAVFQVFKDYISKMDPASTLGLSTESIHGYSISHVKRVLDAEPPEMPPCRRGVNNISVSLKGLKEKCVDSLVFETLIPKPMMQHYISLLLKHRRLVLSGPSGTGKTYLTNRLAEYLVERSGREVTEGIVSTFNMHQQSCKDLQLYLSNLANQIDRETGIGDVPLVILLDDLSEAGSISELVNGALTCKYHKCPYIIGTTNQPVKMTPNHGLHLSFRMLTFSNNVEPANGFLVRYLRRKLVESDSDINANKEELLRVLDWVPKLWYHLHTFLEKHSTSDFLIGPCFFLSCPIGIEDFRTWFIDLWNNSIIPYLQEGAKDGIKVHGQKAAWEDPVEWVRDTLPWPSAQQDQSKLYHLPPPTVGPHSIASPPEDRTVKDSTPSSLDSDPLMAMLLKLQEAANYIESPDRETILDPNLQATL

SEQ ID NO: 299111 - protein, 260 aa, Artificial Sequence
  derived and/or modified sequence
MHQQSCKDLQLYLSNLANQIDRETGIGDVPLVILLDDLSEAGSISELVNGALTCKYHKCPYIIGTTNQPVKMTPNHGLHLSFSRMLTFSNNVEPANGFLVRYLRRKLVESDSDINANKEELLRVLDWVPKLWYHLHTFLEKHSTSDFLIGSPCFFLSCPIGIEDFRTWFIDLWNNSIIPYLQEGAKDGIKVHGQKAAWEDPVEWVRDTLPWPSAQQDDSTPSSLDSDPLMAMLLKLQEAANYIESPDRETILDPNLQATL
